United States Patent Application Publication US 2017/0114356 A1 - sequence listing, part 36

SEQ ID NO: 48300 - DNA, 2215 bp, Zea Mays
ctcaaatctcaccctcccaccacatccacaaaaaatcaccctccccacctcgatcctcttccgcgagacggcaaaccgatcggtggaacggaacctccctcagtctcaaggcgagcgagcaagcgcggctcacgtccacagggccagcgacagtaggctgtaggccccgcccgctccagatccataggcagccgcgcgcgatcgcggcgtggtggataaaagcgtgcgcgctgcgccgctgccacgaggtaagagaggcgggacgagcgtcagtgcagtgcgcgtgtggtcgggtagcgatccgaggagcgcgcagcgatggcagcggcggccgtggtgcccgggaggctggaggagcagccggacgagcagctgggcggaagccagctcgacatcggagggctcgccttccagggcgacgtgggcgggggcttcaccggcggcggagcgggctccggggcctccggcggtggcggcggcaacaagatgctggaccggggcatcaacacggccatcgtgctcggggccagcacctacgctctcaccaagctgctcaccgtcgaccaggactactggcatgggtggacgatcttcgagatcctgcgctatatgccggagcacaactggtccgcatacgaggaggccctcaaagccaacccggttctagccaagatgatgatcagcggtgtcgtctactcccttggtgactggattgcacagtgctacgaaggcaagccgatatttgatttcgaccgtgctaggatgttccggtctggccttgttgggttcacgcttcatgggtcactttcacattactactaccatatatgcgaggcactgttcccattcaaggattggtgggttgtccctgcaaaggttgcattcgatcagaccatctggtctgcgatctggaacagtatctactttgtggtcttgggtttccttcggttggaatcacctaccactatctacaacgagctcaagtccacattctggcccatgcttactgctggatggaagttgtggccttttgcgcacttagttacatatggtgtggttcctgttgagcaaagacttctatgggtcgactgtgtggagcttgtctgggtcacaatactgtcgacttattcaaacgaaaagtcagaggcaaggaattctgatagtacctccacaccagcggcttcaaaggacaactccacatagcaaccccaaagatcttggaaagttgcttcgcccttccctcacttcaggggttatgtaaattgtacagttagctgcagcaactatgcagaagtgaactgcacttgttttgggacgtaaggtactctgcaacttgaattatcctatggaaccagagttggtcggtgtactcctagcaaactagtttccataaatctgtcatattggaagagttgatacaatttcattactctgctaagagttctaccaagaaagcatgtacagatgtgtttaatgtagaggtttttaatgtgcttaagggggatatttattaaaaaaaatcgttggacctgtctctctgtgaagagacatattaacaatagacgtctatcttttactgtaggaatctgttatctattctatcgatatgatattgtacagttatatttatttttatatttattaataaattatatttataaactttctattacataataaagtctcttagttgtgtcttatgctcgaagaatcgctttagtatctctctactgtacatcctctaaataaaaggagcattcggggatcccacgcaagtgttactttcatttcccttatcccaccggagagggtgccgacgctgggccacggcgtgttgggagcggaggttttcctgaccttgcacatggggacgtcaaggaacgcgtcgtcgctgtccggcccgggtcgtggcgaaggatgaggcgaatggcgtgcaacaccgagcggtacacgtcatgggtgaccgacttcacgtggcaccctcccatgttgcacgtcagccatcgtgggggtgacagggcaaaggtggccagcagatggtggtgctggatctgggtgggtggaacatgagaagagagtaaagacacgctacgtcacatattgaggtagatttttggtgtagcatcttctctactaataataaacaaaaataatattgaagagagtaaagacacgctacgtctaatttgttttatctttttacattaaatttgac

SEQ ID NO: 48301 - DNA, 268 bp, Zea Mays
tatcaaagaaagaaaacagactcatccgatggtagctttgagcagaaaaagttaatcaattgaatactagagttcaaagtcacaattgctccagtagattcaacaccataaaattcttcattgcatagtgtgtttagaagaggctgacaacaagtagattccaatctctgagattcttcccgcatgatttgtccacttttcagaaacttctgtgtcttagaaagagcattgacatctcccctggtacagacataaagaaacctaaata

SEQ ID NO: 48302 - DNA, 2161 bp, Zea Mays
cgacgacggccgtgacgcgcctttatttgccggcgaaaaaaaaagattcggggggtgcggcggttattgcgtcgccggcaggtaaggcggaccatttatccccatcccgtgcggagccggtccgcctccgcgcgcgaaaggcgagcgctgcctacccgtcgacgcccgccgccgacaacacagtcacagtctcgcagatgtggacggtgccggagccgaaggagatcatcagaaggtcgacgttggaggtggagaagatgagccttgtcgacggcgactgcgctccgaaaagcgccggcgatgcaagagacgttcccggagaggttccaagaactcaagatgtcatccagacgctggacaggacgatctcgaacctggagatggagctagcgtccgcgaaggcgacgcaggagtccatgctccacggcgccgccggcgccccggtgcccgagcccacggggaagcggaagcacttcatggtcgtcggcgtaaacaccgcgttcagcagccggaagaggagagactcggtccgcgcgacatggatgcctcaaggcgagaagaggaggacgatggaggaagagaagggcatcgtcattcggttcgtcatcggccacagcgcgactcccggcggcatacttgaccgagcgatcgacgcggaggacaggaagcacggggacttcatgaggctggaccacgtggaagggtacctggagctggcggcgaagaccaaggcgtacttcgtggcggccgtgtccacgtgggacgcggagtactacgtcaaggtagacgacgacgtgcatgtgaacatagcgcactgcagcgactcttggaaacacgctggcgaggcaccgctccaagccgcgagcttacgttggctgcatgaaatctggccccgtgctagcccagaagggcgtgaggtaccacgagcctgagtactggaaattcggcgagtgggggaacaggtacttccgccacgcctccggtcagctgtacgccatctccaaggacctggcctcctacatagcactcaaccagcatgtcctgcacaaatacgctaacgaagacgtgtccctgggatcctggttcatcggactggacgtcgagcacgtcgacgaccgccgcctttgctgcggcacgccaccagattgcgagtggaaggcgcaggcggggaacgcgtgcgtcgcctccttcgactggagctgcagcggcatctgcaaatccgctgaccggatcaaggaggtccatcagcgctgcggcgagagcgagaacgcgatttggaatgcagagttttaggccccagataaatcgcacgcttttttacaaggaaagcacgtacatacatacgtacgtatacaaggggacaacaaaaaaaacagggctcaacagtgtgtgcctggctgccaccgaaggctcactctgctttgcaagtgcaggaccagactgaagggcttcagatcgagaggggcaatgtacacccaagtgtacatgcgttatggtagacacaaggggtgtatgttttttttttggggggggagggggggtgtttttggattaggaattggattattgtaaggggattttttctttttctattttggtgctcgaaaagatcccacgttttttttactgatataaagacaagctaggagaggatcatgatgaggaagagagagagtgaaaggagtgggagactgggcatctccccccaccattcttggcgagatcctcatcgatgttactggttggtttcaaataacatactgtaataaatttcttctccaaagtaactgaattgtcagcgttcttctttttttttcaaagtgaaattgaattctcagctattttgtaccgagcgagaaagagaaacagcactgctgtcctgtccagagaggactgtatatactataccttcgggcgatcccggcgaactttcttcgggagacggagaggcggcagctcggttgattcgcggtggcgtcggagttccaagggtaaatgccggcggcgcttctttggccgagcccagcgatcgggagggagaggatgcgccccggcgcacagggaaatgcgtcaggtccagcttctcctcgtcgcgcgggcagggcatgcggcgctcttggccgagtcggggatcgggtcgggaggcggcgctcggatccca

SEQ ID NO: 48303 - DNA, 1438 bp, Zea Mays
ctcgactcgtcggcctcgcgtccaaccgctcaaccatctctatcttattttctacacgcgtgctcagctcttagcaaattctgggcgttcttctctctgtacgcggctgccagcacacaccgccgagtccgcgtggctgctcagccagtactgctcacgccagcacaacagtgatcagccaacacttatcctcaactccaactcgttcagccggttcttcatccgtcgtccacaggcttcagacgtagctcgccagcttcgacctccgccctgcccttgaccccactcgcccgttcttgttcccgacgctcgagctcacctcagcttcgctgtgcccctgcgttcggcctcttccctccaccagcggacgtcctcggtctcgctttcctcgccgtggcaaggccccggccacgacgtcatccccctctaagctagctgttgaagtcgtgcctcgcatacgcctattcgatgaaatgcccaaacgtcacgtccgctccttgtcccaacaccctgtcacaattccgtgcgttgccgtgtgtgtttcggaagagaggaatcccatatatgtgaggacaggcaatccgtgcaatagttgtttgatgtttggtgttatgcgcaaatcagaaatcgtcatcattatcccaaatatcgatttggtttgtgatatggtacactagctgaaaaatcgtgcgaagcgaagggtgtggatcaaaacaacccacaagacgatgtcggccgatgagcccgaagatggatggactaagcagatgtcagaacaaaagttgatcgtcaactggccttcatttaacaacactaacgtagtgttatcccaggtaagccccggtgcatttgccacctccttgttgtttttaaaacttttatcacttatgtgacagaatctcccaagtaattaggcccacctacagttgtccttgtccaacagacatcagacaaccctgtagatgttcctgaatcactcgacaagttcggtatcttctttcttacctttccaggaacgttttacccgtcttgcagacattacagaacatcggagatatagaaatgcggaagcgattacataaacttacatttatttagaaagtaagatcaagttacttattacagatatgaaacgagtgctgaatagtattattacaataccaagggaggcaaaaactcctcccgatagtttttataaagtcctaatggaggatcctttcctcccgcacttcattccttgcgttcttcctttggttatgactcaacctgataattctctgatcagtgttgagagttgctttgtgtctggctaaccaattcatgcccaaaataacatctatatcttggcctttcagaacgatcatattagtaggaaagtcccgtccggccaaagttacgggcacttgataggccacttctctagtaaatatttgtcccc

SEQ ID NO: 48304 - DNA, 1560 bp, Zea Mays
ccatcctggatcagaaggcaacctcagcggccgcaagcccgcaactttatccatccgtttggcccacgcgctccgcagtctcctctctcctcgggtggctagggttttgactcctagtcctaaaccagctcccacgccgccatgatgcagccgccgccgccacatcagcagcagcaatgggcaatggcgcccccgcccccgccgcagtactaccaggcgggccctccgcctcccgctatgtggggccaaccgccaccgcaggcggcggcggcgccggcgccggccggcggcggggcgggggacgaggcgaggaccctctggatcggggacctgcagtactggatggatgagaactacctctatagctgcttctcccaggctggcgaggttatttccgtgaagataattcggaacaagcagactgggcaacctgagggttatggttttattgaattcagcaaccatgctgtagccgaacaagttctgcagaactataatggtcaaatgatgcccaatgttaatcaacctttcaaattgaattgggctaccagtggggctggtgagaaacgtggagacgatggttcagattatactatatttgttggggacttggcctcggatgttacagatttcattctacaagatacgttcaagagtcgttatccatcatttgcagattcggatgaacagacacgggcaatgactgaaatgaatggacaatactgttctagcagggccatgcgccttggaccagcatccaacaagaagaatactggtggaccacaaccatcgagtgctatttaccagaacacccaaggaactgattctgatagcgatccgaacaatactactgtatttgttggcggccttgacccgagtgtgactgacgagcttctgaagcaaactttcagtccatatggagagcttctctatgtcaaaatacctgtaggaaagcgctgcggatttgtccaatattctaacagggcatcagctgaggaggccataagggtgctaaatggaagccagttgggaggtcagagcataaggctctcatggggccgtagccctgcaaacaagcagcctcagcaagagcagagccaatggagcggtggtggctattatgggtatccccaaggatacgatccatatggctatgctcggccccctcaagatcctgccatgtacgcctacgcagcatatccagggtatggaaattaccagcaacagccaccacagcagcccccgccacaacagtaatgatgtcccgagagtgatcatttgcaagctggtcgcaaagtagctggggggttggggcgcagcaactttggtgcgttggcatgagaaattttgcggcggttgcttgtgttgtgttgtattgttccgacgcccttgtacacgtagcctgtgttgtaactgaatttttgccgaggccttatgagtgactagtgtttcaactgtaactggattgcacatttttgtcgcaaggaatgtactattattgtgtggctcgtgccgctttgaacgctgagtcccggtattaatttttcttcatgctcttat

SEQ ID NO: 48305 - DNA, 1349 bp, Zea Mays
acgctttggagaacacctaacagctggtgctgtggttatttccgtgaagataattcggaacaagcagactgggcaacctgagggttatggttttattgaattcagcaaccatgctgtagccgaacaagttctgcagaactataatggtcaaatgatgcccaatgttaatcaacctttcaaattgaattgggctaccagtggggctggtgagaaacgtggagacgatggttcagattatactatatttgttggggacttggcctcggatgttacagatttcattctacaagatacgttcaagagtcgttatccatcagttaagggtgcaaaagttgtctttgacagaactactggccgttcgaaaggctatggttttgtaaagtttgcagattcggatgaacagacacgggcaatgactgaaatgaatggacaatactgttctagcagggccatgcgccttggaccagcatccaacaagaagaatactggtggaccacaaccatcgagtgctatttaccagaacacccaaggaactgattctgatagcgatccgaacaatactactgtgggtatctgtaaatagtgctgtgtttttcaagctgcatgatggatgtttattttctagacttacttcattgcaggtatttgttggcggccttgacccgagtgtgactgacgagcttctgaagcaaactttcagtccatatggagagcttctctatgtcaaaatacctgtaggaaagcgctgcggatttgtccaatattctaacagggcatcagctgaggaggccataagggtgctaaatggaagccagttgggaggtcagagcataaggctctcatggggccgtagccctgcaaacaagcagcctcagcaagagcagagccaatggagcggtggtggctattatgggtatccccaaggatacgatccatatggctatgctcggccccctcaagatcctgccatgtacgcctacgcagcatatccagggtatggaaattaccagcaacagccaccacagcagcccccgccacaacagtaatgatgtcccgagagtgatcatttgcaagctggtcgcaaagtagctggggggttggggcgcagcaactttggtgcgttggcatgagaaattttgcggcggttgcttgtgttgtgttgtattgttccgacgcccttgtacacgtagcctgtgttgtaactgaatttttgccgaggccttatgagtgactagtgtttcaactgtaactggattgcacatttttgtcgcaaggaatgtactattattgtgtggctcgtgccgctttgaacgctgagtcccggtattaatttttcttcatgctcttat

SEQ ID NO: 48306 - DNA, 482 bp, Zea Mays
attttagctttcgacagcttgatcaccttgattggttttcagtcctaagagtacaccagctataatgtggagtggggactgtcccttcttctatggtgggctcttcattccagacagtttgtgcattagccttaacttccgttatggggcaaagattcctcgagacttcgaagattatgccagctggtgccgttgctggtctcagtgccgtgatgtccgcattttatctgttcaaaattgcaacgggcggcaaccacatcccaccaccaaagaaagagtaaaccaggctttaacttgtaaattatgtttgattgatgtcgaagaagactacgagcgattgtgttgtctagttgcatggtaacttcagggactaacatcttcttccccatttgtaattcggctagaatgtaccatggtttgtgaacaatgtaaaagaaataaagatgtgattcacggaaatgaatatgatgtttactgaggca

SEQ ID NO: 48307 - DNA, 3331 bp, Zea Mays
attctgttgatctatgcattatgcaatgctcgtgtaactattttatactcgaaccggattatattaaatgatgagcaattcatacattattatacaagtatctaatatctgcatatgtccggccaaataatatttgtatatatctgatccttgtattcatatttgtcaggtttctaactatccgtatcctaactcaaatccaattgaaatacacaaggataggatataggttgtccgttcgcatcagctcgttttcacccaatcacccctctaccatttttagcgatcaaagtttcaaaactgaagacaaccaatactgcgcgctctccaatatctaaaccagccctgcatgtgtatttggataaaacaaaggcagcaggatctctgacaacaaaatgacgagtggccccaaatgggcctagctaacccagagaggattggaatctcctgtaaactgatgcgaagaaactcgacccaaaacatctagacttattcttcataccaaaactcctacaaactgtactccacgaatccagccaaaggatgtcagatgctccatgctttctgtgtatcagaggctccttaccatcgactcaaaactggagaacattggaaggaaaattgctgagacactcagtggccttcctcttgccgcaaaggtggtagctggacacctgaaacgtaacaacagtgtagatgagtggaaacaagtcttgcagagaaatgcagtatgggaggaaatcatgccaattctacgaacgagctatgacaatctaccaccacagctgaaacaatgctttgcatattgcagcatcttcccccagaaactgggaatttgaagctgagcagctgattctgctgtggttagcacaaggttttgtgcacccagatggttgcaggagattggaggacattgggaaagaatacataaatgatctatgtaataagtcattcttcacgatacagaagaaagaatttgtcagctattatgtgatgccacctgtaatttatgagctcgcaaaatcagtggcagctgaagaatgcttcagaataggaggtgatgaaaggacaagaatcccatcgtcagtgcgtcatctatcagtacatctagatagactttcagcacttgatgacacaatcccatacaagaatctacgcactctcattttccttactagcagaacagtggctccaattaatgtctccatccctccagtggctctcaataacataagaagcctccgtgtgttggatttatcctgtgcatgatgggacgatttcctgatagcatatcaaattgtgtgcatcttcgctacctaaatatctcatctactaccattgcaacagtaccagaattcttgtgcaaactctaccacctacaggttttgaatttatcaggttgtaggcttggaaaattgccttccagaatgaacaacttggtcaatctacggaatctcacagcagctaatcagattatttcagctataacagacattggcaggctgaaatgccttcagaggttgccaactttcaaggttaccagagagaaaacacaaagtatagttcagcttgggtacctactagaactccaaggatccctacagatcagaaaccttgagaatgtcgaagctccaattgaggcaaaggaagcaatgctttgcaagaaacgccagctctctgtgctgcagctaatgtgggcatctgatcgagatgaggtaaatggaaataaggaagaggatgtgctagaagctctccaaccgcacgaaaatctgaagagactagacatcgtgggttggatgggagtcaaatcccctaattggcttaaaaatgaatggttaagcaatcttgagcttattttcctaagtggctgaaatgcatgggagcagcttccaccacttggtcagcttccctccatccgaacaatctggttgcagcatttgaaaatgttgagacagataggcccagaggcatatggcagtggcagccaaatgaagccattccaatcactagaagagctggtgcttgatgacatgccagaactcaatgagtggttatggagtgaccagacaatgaggaatctacagaatgtcgtgatcaaggactgcaataagctaaaagcgctgcctccagtgcctcctaaccttacagagataacaaattaacaattgcaaggaaagggtattgggtgccataccaccatgatgtaaagttggcacatgtgaccactggcaggtccagtgtctcatctctttgcatattcaattgccccctgttacttgccagattatctccttcagtgcagacgacaatgatgccctcctacagctaaaatcactccagagcttatgtatatctggttccaacacactgcaatcacttccttccactctgtccagcatgcaatccctgcataagttggtcttatggaactgccctgcgttggaatcactggcagaggaaccactgcctctgtcagttaggaagattgaagttgcactctgtcacccactgctcaaggagaggctcgtaaaagaatatggagttgactggccaaagattgcacacatcccttggattgaaatagatggtgaaattttgcagagattgcaaatatgaagatagtgtattttcaatctgaaacatatgattcaatatagatagatgttgatgtaacattaatcttcggaaaggaaatttgttccaaataattatatatggaaacaatattaatttaactccaaagtactactagttaaactatcacagtacttctgaaaatggtagaatcagcttgttattttttaaccaaatatttcttgtttgtaagatcttagcatttcagttaaaagtcatgtcaaatctcattcatagtaatcatgttaaaaatgtatgtgggtaaactatgcaactgaaaggaaatatgcaaggtaacccaaaaactgagttaaactattttggctgttcaacaaaaaaatcctagatgcttctcaaaacacaggaaaaactgaagcatatatgtaatgatattcagtactaagcatacattccaaggtcagaaaacaaatgactattatctggaaatgtcattaagattcaagatgccaagcgcatgcacacatatttttaagagaagctacataatcaatagctaaagttgatgttataccaagtatctatagcatagactccctctggtcaggtaaaaacatcgcttctgacagcaaatggttagttaactcaactccagtaagaacatcatcttttccctaccagagacagtaatgacaaaaggtccagcaaccaacaaattaacctaaaagttaaagccaag

SEQ ID NO: 48308 - DNA, 2434 bp, Zea Mays
atccttcaaagacttggaagactttgacctggtgtccaccagtatatgagagactataggtcttaagaaaggatatcaatctcagtaattggcaatatggatatctccagttacttggctataggtggctggttcatccaggttatcttcgacaaatacttgtcctaccagctccggcaatgggcggccgactgtggcatcgagcatgagctggacaggcttcgtgttgctttgcttcgcacgcagtcagttctccatggtgccgagctggtacccgcactctcctacagctcccttccatggatgcgagagctccgagatgttatgtatgatgcagaggacctcctagacaagcttgagtacaaccgtctccaccatgaggtagaagaatcaagtgcaaacgagagcagtagcccaatcagtgccttcatgctctcccggtttcacagccaaggtgtcgctgcttctagccttgaaccatgttgggatagatcagcaagggtaaagaataagatggtaaatctgttggagcgtattgagcaggttacaagtggagtaagtgaagtactcagtctacccaggaacatcggaagcagcaatcgcaacgccatgacaagctcaataccctacgggagaatcaccgggcgggacttcgaagcccaacagctggtaactgctctgataagttctcaggtcgagaacccagtttctgttgtctctattgtttgttggtgtaggtggcataggtaagactgctctagcacagcatgtgtacagcaacgctagaataacagagagctttgatgtgaggatgtggatttgtgttacttctctcttggacgagttgagaatcacaaaagaaatgctggagtcagcttccagcagtcggtttaggcatggtggcatagcaaatttcaatagacttcaagtcgccttgaaggcaaggcttgcttcaaaacgtttcctccttgccttagatgacgtttggaacagtgacaacaaaacaatagcaatagaacaagagaactggcagaagctgctagcccctctgaaggacggagcaaaggggagcaagatacttttgacaactcggtcaagtatagtagcagagatgctacaatcatcctctataattaatctggagaccttgcaagttaatgattgttggtccctgataaagacttatgtgtttgatgagacaaaacataccatcgactcaaaactggagaacattggaaggaaaattgctgagacactcagtggccttcctcttgccgcaaaggtggtagctggacaccaccatgatgtaaagttggcacatgtgaccactggcaggtccagtgtctcatctctttgcatattcaattgccccctgttacttgccagattatctccttcagtgcagacgacaatgatgccctcctacagctaaaatcactccagagcttatgtatatctggttccaacacactgcaatcacttccttccactctgtccagcatgcaatccctgcataagttggtcttatggaactgccctgcgttggaatcactggcagaggaaccactgcctctgtcagttaggaagattgaagttgcactctgtcacccactgctcaaggagaggctcgtaaaagaatatggagttgactggccaaagattgcacacatcccttggattgaaatagatggtgaaattttgcagagattgcaaatatgaagatagtgtattttcaatctgaaacatatgattcaatatagatagatgttgatgtaacattaatcttcggaaaggaaatttgttccaaataattatatatggaaacaatattaatttaactccaaagtactactagttaaactatcacagtacttctgaaaatggtagaatcagcttgttattttttaaccaaatatttcttgtttgtaagatcttagcatttcagttaaaagtcatgtcaaatctcattcatagtaatcatgttaaaaatgtatgtgggtaaactatgcaactgaaaggaaatatgcaaggtaacccaaaaactgagttaaactattttggctgttcaacaaaaaaatcctagatgcttctcaaaacacaggaaaaactgaagcatatatgtaatgatattcagtactaagcatacattccaaggtcagaaaacaaatgactattatctggaaatgtcattaagattcaagatgccaagcgcatgcacacatatttttaagagaagctacataatcaatagctaaagttgatgttataccaagtatctatagcatagactccctctggtcaggtaaaaacatcgcttctgacagcaaatggttagttaactcaactccagtaagaacatcatcttttccctaccagagacagtaatgacaaaaggtccagcaaccaacaaattaacctaaaagttaaagccaag

SEQ ID NO: 48309 - DNA, 3969 bp, Zea Mays
catttttttaatgacatttacttcttcagtttaggagtacgtcgcctctcatcccggctctcgcctctcgctccccagccatccatggcgatgccaccgagccgttcgtgggcggagctgcagcacgacctcctggtgtcgatcatgacccgcgtgggcgcgccggacctcctctggggcggcgcttcccgcgcctgctcttcgtggcgggccgcggcgcgggacccactcgcgtggcgacgcgtcgacctccgcgactgggtcgccctcacctccggccggcgcgccgcgagacctggacactccagctctcgcgtatccgtccacgccgcgctcgtcggcatcctggaggtcgccgccaagttggccgaagggcggatcgaggccgtgttgctccccgagtttgctgatgaggaccatctcttgttcctcgctgagaggtgccaaattcctgcaagcttgcatatggatgttttgctgattttttatgagtttttgcgatgttcatttgtaatgcttatcgcagggaaaatatatgttaattgtagtttcactttctttatggccataccaatctgaaaaagatggtgagtgactaagcgtacctgaactgatttctatctgtattatttattagttggaacttggaagtggaacagttgtttcttgacattatgcatttccctcatgatatgatactgatattgatgagatgtatgtattgattcaaggaataatttttcttgacctactgggtataaataaaaacatagaattttctgtggtaagatttatggccttttttttgttaactcacagtgaagcttctagttctagcactgatagcttaggtacagccacattagttaatgaacttgcactctgaaatggccagtcaaaatcagtcacaaattagaaaaaatatatgttgaaactgaaaataatgtatggtaatttgataggctgtgcctgtgcgtgtggtaatttatatcagtagttataggataggtaaattgggctgggccggcatgccgtgctgaggcagtagcctaggcacgaccttctcatcgggtcgggccggtcctaggctggctaaaagctcaggccataggtttggccatcaggcctcgggacttttggccaactatagctcagcccccttttgttaataccctgcactttcccaccattcctgatttttctccttctcatgcattcttttgccccatttcttgtttttccaattctctccatctcttacaccaccttaatatatacaagagtatcaagttgcataccgctttagacaactctgcaatcagcatgcccttttgtactgcttttttgcttatttttcattaggctagccttgtcacccctactcttcttaaaaccttcccacatttgccactaacaagttgaaaccagtgtctttcaggctttcagcatattcacagcttgcttgtcaccccaagccattttaaacattgtaattatagcagtttgctgtagtcttgctttactgcatatctaactgtaggtctatgtgttacattggctagtaaaaaaaacaataacatgaaaagggcaacagtgttcatgatttttttgcagcatgtccttttgttattaaaacatacatcatgtaattgtgattcagttgtgcaagttagagaagggcactcttagtttctatcatgtttttagtctttttattaatatagttgattacttgatttttgttattatatattgtgtttcatggtaacatttgttactatatctgtaaccaacatatatttattaaccatattacttaagtcatggaaattgacacaatttagagctcaggaactaaaagctacattcagaaatttagcagcggtctaaataattaccagtgacacttgtaggaattcagccaatagaaattgaagatcagactcattgaaatagattacttgctagttctaatgggcactagtatatgacatacaagtacctgaacttgtatatatgagagtatttcaatctgactgttgtattgcagaatttagatcaaaaacaccttgtacgttaaaagggaacaaagtagcaaggttgaatcgaaagtatagaactgagggttatgtggtctactttgcccttgcattataggatacatgtccaaacgggtttccttggatgtgtaaaggtggcaaaaggatgttcaaattcagtatgctgctggaatgttactctccctcatatacagatctaatctatcttttgtttggatcaactaagatattacaccgcgcctctacagttcttcgacattgcaagaaactttggctatagacttccgtcagtcaagttatattacaaaacttttgctccaattcaatatactccatccgtcctgaaatataaaatattaaaacatattatgtggtaagacagatgacgcaaataacactcgattactatttggattggcgatagacactaatggtaggtatgcatgttaaaattgtcttttggagtgtttgttctcttcacctagagtaccttgtattttggtacaaattttgaactctcaattcgctatatttcaggacggagggagtagtcaaaatatttcattcggttttttgatcgatgcaatggacttgcttatatttgttatatatgtgctcttggtgtcactatttttttggtattttcccagcgcaagtttacaaactcattttataaattatgttagagcacaggcaggctggcaggtgcgaattcggtttcagacaaaatttgcagcagacacaaacttgcaaaactgattccacacagtttttgttcctcaaatcaattatgttattttgatgccgtttttttctaacagtcatcaccagcagggtggcaacatatgcttttcatttcacttccacatgaatttgttttcctaattggttaatagttctttaaaggaatcagctaacagttggcgttcctatgtggctatggttgtgtaatgtcttcgtttaaagctaatcctatttctctctgttttttccctaggtgcccaaacctgcactatttcagccttcctagcacctgtatgacttacgatcagttctgcaaggcgataggtggacttcaatcgcttaaaggcatggcagtggacgagagtctgattaattatgatgtcctcctgcatgtgcaccagtgctgcccagactttgtggagctgaaggtgtctgcactgtacgtggatgaagagatggcctcagtcatctgcaactctcttcctcgtctgaagaagttggagataccaagttgtgacatgtcttccgctgcgattataaggttccttgattgcctagagcagctcgagcacctggacatctcaggttacgagacatcagccatctcaagcccggttcttgagaaagcttcgcggctcaaggtcttcctctggaactcgaaatttgagcttggggagttcatggactgctccaattgtggagaacacaacattaaccctcaagaaccctgcaagtgcatgatggagcacaaggtcatggactggctggctggaccttcataagcttcctgaaccaaaggcgtctcttcttgtgtcttgttaaatcatgacgttttcctggctgtaaaattccaacctctgtcaaagttggtgtctgagctgtatgcacaaggaaatatgctacttcaaatgtttagcgcgccttagagaggtctgcaaccttttaatgtaacaaattgttgtatcaagtgttaatggaacctcttctttacaccaatgagccgatacgaaacatctgtgcctattttgaagcgatttcacctcggagtcaaaccttgttgtgtggtgagtttttgcttcggctatgcgaagattaatccatttctttttttagaggacaggaggggggcctactgaaaattttatttaaattaaaaagaaaacaa

SEQ ID NO: 48310 - DNA, 936 bp, Zea Mays
tttgaacttggctggctgttccaggtgcccaaacctgcactatttcagccttcctagcacctgtatgacttacgatcagttctgcaaggcgataggtggacttcaatcgcttaaaggcatggcagtggacgagagtctgattaattatgatgtcctcctgcatgtgcaccagtgctgcccagactttgtggagctgaaggtgtctgcactgtacgtggatgaagagatggcctcagtcatctgcaactctcttcctcgtctgaagaagttggagataccaagttgtgacatgtcttccgctgcgattataaggttccttgattgcctagagcagctcgagcacctggacatctcaggttacgagacatcagccatctcaagcccggttcttgagaaagcttcgcggctcaaggtcttcctctggaactcgaaatttgagcttggggagttcatggactgctccaattgtggagaacacaacattaaccctcaagaaccctgcaagtgcatgatggagcacaaggtcatggactggctggctggaccttcataagcttcctgaaccaaaggcgtctcttcttgtgtcttgttaaatcatgacgttttcctggctgtaaaattccaacctctgtcaaagttggtgtctgagctgtatgcacaaggaaatatgctacttcaaatgtttagcgcgccttagagaggtctgcaaccttttaatgtaacaaattgttgtatcaagtgttaatggaacctcttctttacaccaatgagccgatacgaaacatctgtgcctattttgaagcgatttcacctcggagtcaaaccttgttgtgtggtgagtttttgcttcggctatgcgaagattaatccatttctttttttagaggacaggaggggggcctactgaaaattttatttaaattaaaaagaaaacaa

SEQ ID NO: 48311 - DNA, 2849 bp, Zea Mays
tttggctgttataaaaccactctactttcttcgggattgtcggacaacgcttatctccttgtaggtgaagtgttgaaaaagattgtggctctggcccctttcttctgttgccatttcataaatgagcttgcacgatcaatgcaaagcttgacactttgtgcaatgaaggagcttcgtttgtacgagaattctgaaaaggctcttcttagttctacatcagccaatggaactgcgattcttagagttgtgcaggctttgagttctcttgtcagtactcttcaagatagaaaggatccagaacagcctgctgagaaggaccattcagatgcagtttcccagatttctgaaattaacacagcattggatgctttgtggttggaattgagcaactgcataagcaaaatagaaagctcttcagagtatgcatcaaatctaactcctgcttctgcaagtgcagctacattaacagcaggagtagcacctccattgcctgcaggaacgcaaaataggcgtactcaaggcttgctggggcgcagcgggattcgcaggcggggcgcagcgggatttggcatcggtgatggcgcagaggtggctagggcgaatttgccggaggtgacaggcgcagcgggatttgcaggcggggcgcagcgggatttggcggcggcgacgcagagctgcgccagctcaccgatttatggcgatggcgcgttcgcgtctacggtctatccatctccaaaacgatgggcagctgacctacccaaccaccaagagctgaagagcaaattcctgtcccgcacatctgctcgccgcccagcgaacctgatggcgctcgtcgacgcgaaggccgccggcgcgtccacctccaccgtggccgctgcgcccacggtggagcacctgttgttcctcgtcgtcctcgacggcgtcgagacgcccatccacgaggggacgctgtacggaagcgccgggggcacagtcaccgtcaccggccctggccagctctccgccgacggcctcgagagcgtcctggtgcgcggcggcgggaccggggccggcgccgtgcggttcacgctctgcgccgacgcggccgccgagggcgtcggcgctgcgtgcttcgagcggtgcggcgcggcccgcgtggagggcgcgcgcgaggtgtccgtgtcctcgtgccgcgccgtggaagtggagcgcgcgggcagggtcaccctcgaccgctgccgcgacgcgcggctccggggcgggggcgcgctccgcgccacgcggtgccggcgcgctgacgtcgagagcttcggcggggtgcgcctggcgcggtgcaaggccgcgcgcgccgactggtgcggcaccgtcgaggtcgagctgtgcagggccgtcgacgtccgccgctgcggagctgtcaccggagagcggtgccgcgtcgtgaacgctgcagggtgcggcagcgtcgaggtggcgcgggccgtgatcaacatggtggaggaagagcagccgtagtcagcttcgcctccgaaaagccctagtgctccgcgccctcgacgccgccctctacaccgtgggcgcctcctgctcctccagcctcctcctccacaaggcgcgaaaggtcctcgccgaccccgacgcagccgcctgcttcccccaccagattccttttacagaaaatgaagaaaacgatgaggctagggctgcggtggccgatctcaagcgcctcctcgaccttgagtgggccaacctcccgccctccacgctcgagctcgtcgccggggacgggtcccaccagactggtgccgctgccgaccacaccatgccgaagcgtgaaattttagctaagcctgtgcaggttggatccgcttctcatcaatcaattcggacgcaagttgctgataacgcgagcaatgccaataaagctgatggcgcccggcgagatgaggcacatccttctaattctaatgtaaactatgaggctgatagtgatcgtgaaagtatggttgggcaccaaaatgcatcggttaaaggagcagagggtcaactttcagagaagtctgtctttacttctaaaaagcgcgttcttgtggagagaattccgaagtgggatagctctgatgatgatcagccagtgcggaagcgcaagttagatccatttgagagaaaaccatatccttctcctacatgtgcatataagatcagaaagaaatggagtaagatagagatagaaaccttgctggaaggggtggacaagtatggcataggcaactggaaagatatcaaattagcttaccctggtgtctttgaggagagatcaacggtagatctgaaggacaagtttagaaatttgggaaagcgccaccatgaatcgtcttgaggcttagtggcgctgtgcttttgctctgccctggagatattttatgttgatggcagtggtatgcaaaagaaggcctatgtaaggtgcatggagacatttgggtttcgtgccaaggatattgttgacttgttgagtgcactgttcttaaggcgtcgcttagacgtccaggcggaggtccaacgcctagccgccttgcccgcctaccgtacctaggcgatggtccaacgccttgtatcgtcttaccgctttaaaaaacatcgttgatggttgagtgtttaaagataagtaactggaaccccacatgatggcatgttgtcacgggcgtgcacaactcgagcacccatctggctcagaaaagcaccatgggaagatagaactctggcattggtggaatctgatgcaatggtcattgtaattctgaattgaaaattttgaaccagtgacacactaattgttcaagaagctcaatatcgtttgctccaggagtcagaag

SEQ ID NO: 48312 - DNA, 2870 bp, Zea Mays
tttggctgttataaaaccactctactttcttcgggattgtcggacaacgcttatctccttgtaggtgaagtgttgaaaaagattgtggctctggcccctttcttctgttgccatttcataaatgagcttgcacgatcaatgcaaagcttgacactttgtgcaatgaaggagcttcgtttgtacgagaattctgaaaaggctcttcttagttctacatcagccaatggaactgcgattcttagagttgtgcaggctttgagttctcttgtcagtactcttcaagatagaaaggatccagaacagcctgctgagaaggaccattcagatgcagtttcccagatttctgaaattaacacagcattggatgctttgtggttggaattgagcaactgcataagcaaaatagaaagctcttcagagtatgcatcaaatctaactcctgcttctgcaagtgcagctacattaacagcaggagtagcacctccattgcctgcaggaacgcaaaataggcgtactcaaggcttgctggggcgcagcgggattcgcaggcggggcgcagcgggatttggcatcggtgatggcgcagaggtggctagggcgaatttgccggaggtgacaggcgcagcgggatttgcaggcggggcgcagcgggatttggcggcggcgacgcagagctgcgccagctcaccgatttatggcgatggcgcgttcgcgtctacggtctatccatctccaaaacgatgggcagctgacctacccaaccaccaagagctgaagagcaaattcctgtcccgcacatctgctcgccgcccagcgaacctgatggcgctcgtcgacgcgaaggccgccggcgcgtccacctccaccgtggccgctgcgcccacggtggagcacctgttgttcctcgtcgtcctcgacggcgtcgagacgcccatccacgaggggacgctgtacggaagcgccgggggcacagtcaccgtcaccggccctggccagctctccgccgacggcctcgagagcgtcctggtgcgcggcggcgggaccggggccggcgccgtgcggttcacgctctgcgccgacgcggccgccgagggcgtcggcgctgcgtgcttcgagcggtgcggcgcggcccgcgtggagggcgcgcgcgaggtgtccgtgtcctcgtgccgcgccgtggaagtggagcgcgcgggcagggtcaccctcgaccgctgccgcgacgcgcggctccggggcgggggcgcgctccgcgccacgcggtgccggcgcgctgacgtcgagagcttcggcggggtgcgcctggcgcggtgcaaggccgcgcgcgccgactggtgcggcaccgtcgaggtcgagctgtgcagggccgtcgacgtccgccgctgcggagctgtcaccggagagcggtgccgcgtcgtgaacgctgcagggtgcggcagcgtcgaggtggcgcgggccgtgatcaacatggtggaggaagagcagccgtagtcagcttcgcctccgaaaagccctagtgctccgcgccctcgacgccgccctctacaccgtgggcgcctcctgctcctccagcctcctcctccacaaggcgcgaaaggtcctcgccgaccccgacgcagccgcctgcttcccccaccagattccttttacagaaaatgaagaaaacgatgaggctagggctgcggtggccgatctcaagcgcctcctcgaccttgagtgggccaacctcccgccctccacgctcgagctcgtcgccggggacgggtcccaccagactggtgccgctgccgaccacaccatgcgtacaaagcttcgcctgttcgcgaagcgtgaaattttagctaagcctgtgcaggttggatccgcttctcatcaatcaattcggacgcaagttgctgataacgcgagcaatgccaataaagctgatggcgcccggcgagatgaggcacatccttctaattctaatgtaaactatgaggctgatagtgatcgtgaaagtatggttgggcaccaaaatgcatcggttaaaggagcagagggtcaactttcagagaagtctgtctttacttctaaaaagcgcgttcttgtggagagaattccgaagtgggatagctctgatgatgatcagccagtgcggaagcgcaagttagatccatttgagagaaaaccatatccttctcctacatgtgcatataagatcagaaagaaatggagtaagatagagatagaaaccttgctggaaggggtggacaagtatggcataggcaactggaaagatatcaaattagcttaccctggtgtctttgaggagagatcaacggtagatctgaaggacaagtttagaaatttgggaaagcgccaccatgaatcgtcttgaggcttagtggcgctgtgcttttgctctgccctggagatattttatgttgatggcagtggtatgcaaaagaaggcctatgtaaggtgcatggagacatttgggtttcgtgccaaggatattgttgacttgttgagtgcactgttcttaaggcgtcgcttagacgtccaggcggaggtccaacgcctagccgccttgcccgcctaccgtacctaggcgatggtccaacgccttgtatcgtcttaccgctttaaaaaacatcgttgatggttgagtgtttaaagataagtaactggaaccccacatgatggcatgttgtcacgggcgtgcacaactcgagcacccatctggctcagaaaagcaccatgggaagatagaactctggcattggtggaatctgatgcaatggtcattgtaattctgaattgaaaattttgaaccagtgacacactaattgttcaagaagctcaatatcgtttgctccaggagtcagaag

SEQ ID NO: 48313 - DNA, 2838 bp, Zea Mays
tttggctgttataaaaccactctactttcttcgggattgtcggacaacgcttatctccttgtaggtgaagtgttgaaaaagattgtggctctggcccctttcttctgttgccatttcataaatgagcttgcacgatcaatgcaaagcttgacactttgtgcaatgaaggagcttcgtttgtacgagaattctgaaaaggctcttcttagttctacatcagccaatggaactgcgattcttagagttgtgcaggctttgagttctcttgtcagtactcttcaagatagaaaggatccagaacagcctgctgagaaggaccattcagatgcagtttcccagatttctgaaattaacacagcattggatgctttgtggttggaattgagcaactgcataagcaaaatagaaagctcttcagagtatgcatcaaatctaactcctgcttctgcaagtgcagctacattaacagcaggagtagcacctccattgcctgcaggaacgcaaaataggcgtactcaaggcttgctggggcgcagcgggattcgcaggcggggcgcagcgggatttggcatcggtgatggcgcagaggtggctagggcgaatttgccggaggtgacaggcgcagcgggatttgcaggcggggcgcagcgggatttggcggcggcgacgcagagctgcgccagctcaccgatttatggcgatggcgcgttcgcgtctacggtctatccatctccaaaacgatgggcagctgacctacccaaccaccaagagctgaagagcaaattcctgtcccgcacatctgctcgccgcccagcgaacctgatggcgctcgtcgacgcgaaggccgccggcgcgtccacctccaccgtggccgctgcgcccacggtggagcacctgttgttcctcgtcgtcctcgacggcgtcgagacgcccatccacgaggggacgctgtacggaagcgccgggggcacagtcaccgtcaccggccctggccagctctccgccgacggcctcgagagcgtcctggtgcgcggcggcgggaccggggccggcgccgtgcggttcacgctctgcgccgacgcggccgccgagggcgtcggcgctgcgtgcttcgagcggtgcggcgcggcccgcgtggagggcgcgcgcgaggtgtccgtgtcctcgtgccgcgccgtggaagtggagcgcgcgggcagggtcaccctcgaccgctgccgcgacgcgcggctccggggcgggggcgcgctccgcgccacgcggtgccggcgcgctgacgtcgagagcttcggcggggtgcgcctggcgcggtgcaaggccgcgcgcgccgactggtgcggcaccgtcgaggtcgagctgtgcagggccgtcgacgtccgccgctgcggagctgtcaccggagagcggtgccgcgtcgtgaacgctgcagggtgcggcagcgtcgaggtggcgcgggccgtgatcaacatggtggaggaagagcagccgtagtcagcttcgcctccgaaaagccctagtgctccgcgccctcgacgccgccctctacaccgtgggcgcctcctgctcctccagcctcctcctccacaaggcgcgaaaggtcctcgccgaccccgacgcagccgcctgcttcccccaccagattccttttacagaaaatgaagaaaacgatgaggctagggctgcggtggccgatctcaagcgcctcctcgaccttgagtgggccaacctcccgccctccacgctcgagctcgtcgccggggacgggtcccaccagactggtgccgctgccgaccacaccatgcgtacaaagcttcgcctgttcggttggatccgcttctcatcaatcaattcggacgcaagttgctgataacgcgagcaatgccaataaagctgatggcgcccggcgagatgaggcacatccttctaattctaatgtaaactatgaggctgatagtgatcgtgaaagtatggttgggcaccaaaatgcatcggttaaaggagcagagggtcaactttcagagaagtctgtctttacttctaaaaagcgcgttcttgtggagagaattccgaagtgggatagctctgatgatgatcagccagtgcggaagcgcaagttagatccatttgagagaaaaccatatccttctcctacatgtgcatataagatcagaaagaaatggagtaagatagagatagaaaccttgctggaaggggtggacaagtatggcataggcaactggaaagatatcaaattagcttaccctggtgtctttgaggagagatcaacggtagatctgaaggacaagtttagaaatttgggaaagcgccaccatgaatcgtcttgaggcttagtggcgctgtgcttttgctctgccctggagatattttatgttgatggcagtggtatgcaaaagaaggcctatgtaaggtgcatggagacatttgggtttcgtgccaaggatattgttgacttgttgagtgcactgttcttaaggcgtcgcttagacgtccaggcggaggtccaacgcctagccgccttgcccgcctaccgtacctaggcgatggtccaacgccttgtatcgtcttaccgctttaaaaaacatcgttgatggttgagtgtttaaagataagtaactggaaccccacatgatggcatgttgtcacgggcgtgcacaactcgagcacccatctggctcagaaaagcaccatgggaagatagaactctggcattggtggaatctgatgcaatggtcattgtaattctgaattgaaaattttgaaccagtgacacactaattgttcaagaagctcaatatcgtttgctccaggagtcagaag

SEQ ID NO: 48314 - DNA, 3058 bp, Zea Mays
tttggctgttataaaaccactctactttcttcgggattgtcggacaacgcttatctccttgtaggtgaagtgttgaaaaagattgtggctctggcccctttcttctgttgccatttcataaatgagcttgcacgatcaatgcaaagcttgacactttgtgcaatgaaggagcttcgtttgtacgagaattctgaaaaggctcttcttagttctacatcagccaatggaactgcgattcttagagttgtgcaggctttgagttctcttgtcagtactcttcaagatagaaaggatccagaacagcctgctgagaaggaccattcagatgcagtttcccagatttctgaaattaacacagcattggatgctttgtggttggaattgagcaactgcataagcaaaatagaaagctcttcagagtatgcatcaaatctaactcctgcttctgcaagtgcagctacattaacagcaggagtagcacctccattgcctgcaggaacgcaaaataggcgtactcaaggcttgctggggcgcagcgggattcgcaggcggggcgcagcgggatttggcatcggtgatggcgcagaggtggctagggcgaatttgccggaggtgacaggcgcagcgggatttgcaggcggggcgcagcgggatttggcggcggcgacgcagagctgcgccagctcaccgatttatggcgatggcgcgttcgcgtctacggtctatccatctccaaaacgatgggcagctgacctacccaaccaccaagagctgaagagcaaattcctgtcccgcacatctgctcgccgcccagcgaacctgatggcgctcgtcgacgcgaaggccgccggcgcgtccacctccaccgtggccgctgcgcccacggtggagcacctgttgttcctcgtcgtcctcgacggcgtcgagacgcccatccacgaggggacgctgtacggaagcgccgggggcacagtcaccgtcaccggccctggccagctctccgccgacggcctcgagagcgtcctggtgcgcggcggcgggaccggggccggcgccgtgcggttcacgctctgcgccgacgcggccgccgagggcgtcggcgctgcgtgcttcgagcggtgcggcgcggcccgcgtggagggcgcgcgcgaggtgtccgtgtcctcgtgccgcgccgtggaagtggagcgcgcgggcagggtcaccctcgaccgctgccgcgacgcgcggctccggggcgggggcgcgctccgcgccacgcggtgccggcgcgctgacgtcgagagcttcggcggggtgcgcctggcgcggtgcaaggccgcgcgcgccgactggtgcggcaccgtcgaggtcgagctgtgcagggccgtcgacgtccgccgctgcggagctgtcaccggagagcggtgccgcgtcgtgaacgctgcagggtgcggcagcgtcgaggtggcgcgggccgtgatcaacatggtggaggaagagcagccgtacccagcagcccatccccagcagcactgcctcgtcgtctcgcatattggcgttggcatcaccgtcggcattgtgcccattaccatgccgccgctgcccgcggccgacgatttactcattctcgagttcatcgcgagcaaccgccgtatcccccacgccgtgttcaactccttcatcgcctcccaatccccaccctccgccttctcccgcacctcacagcgcctccgaaaagccctagtgctccgcgccctcgacgccgccctctacaccgtgggcgcctcctgctcctccagcctcctcctccacaaggcgcgaaaggtcctcgccgaccccgacgcagccgcctgcttcccccaccagattccttttacagaaaatgaagaaaacgatgaggctagggctgcggtggccgatctcaagcgcctcctcgaccttgagtgggccaacctcccgccctccacgctcgagctcgtcgccggggacgggtcccaccagactggtgccgctgccgaccacaccatgccgaagcgtgaaattttagctaagcctgtgcaggttggatccgcttctcatcaatcaattcggacgcaagttgctgataacgcgagcaatgccaataaagctgatggcgcccggcgagatgaggcacatccttctaattctaatgtaaactatgaggctgatagtgatcgtgaaagtatggttgggcaccaaaatgcatcggttaaaggagcagagggtcaactttcagagaagtctgtctttacttctaaaaagcgcgttcttgtggagagaattccgaagtgggatagctctgatgatgatcagccagtgcggaagcgcaagttagatccatttgagagaaaaccatatccttctcctacatgtgcatataagatcagaaagaaatggagtaagatagagatagaaaccttgctggaaggggtggacaagtatggcataggcaactggaaagatatcaaattagcttaccctggtgtctttgaggagagatcaacggtagatctgaaggacaagtttagaaatttgggaaagcgccaccatgaatcgtcttgaggcttagtggcgctgtgcttttgctctgccctggagatattttatgttgatggcagtggtatgcaaaagaaggcctatgtaaggtgcatggagacatttgggtttcgtgccaaggatattgttgacttgttgagtgcactgttcttaaggcgtcgcttagacgtccaggcggaggtccaacgcctagccgccttgcccgcctaccgtacctaggcgatggtccaacgccttgtatcgtcttaccgctttaaaaaacatcgttgatggttgagtgtttaaagataagtaactggaaccccacatgatggcatgttgtcacgggcgtgcacaactcgagcacccatctggctcagaaaagcaccatgggaagatagaactctggcattggtggaatctgatgcaatggtcattgtaattctgaattgaaaattttgaaccagtgacacactaattgttcaagaagctcaatatcgtttgctccaggagtcagaag

SEQ ID NO: 48315 - DNA, 2834 bp, Zea Mays
tttggctgttataaaaccactctactttcttcgggattgtcggacaacgcttatctccttgtaggtgaagtgttgaaaaagattgtggctctggcccctttcttctgttgccatttcataaatgagcttgcacgatcaatgcaaagcttgacactttgtgcaatgaaggagcttcgtttgtacgagaattctgaaaaggctcttcttagttctacatcagccaatggaactgcgattcttagagttgtgcaggctttgagttctcttgtcagtactcttcaagatagaaaggatccagaacagcctgctgagaaggaccattcagatgcagtttcccagatttctgaaattaacacagcattggatgctttgtggttggaattgagcaactgcataagcaaaatagaaagctcttcagagtatgcatcaaatctaactcctgcttctgcaagtgcagctacattaacagcaggagtagcacctccattgcctgcaggaacgcaaaataggcgtactcaaggcttgctggggcgcagcgggattcgcaggcggggcgcagcgggatttggcatcggtgatggcgcagaggtggctagggcgaatttgccggaggtgacaggcgcagcgggatttgcaggcggggcgcagcgggatttggcggcggcgacgcagagctgcgccagctcaccgatttatggcgatggcgcgttcgcgtctacggtctatccatctccaaaacgatgggcagctgacctacccaaccaccaagagctgaagagcaaattcctgtcccgcacatctgctcgccgcccagcgaacctgatggcgctcgtcgacgcgaaggccgccggcgcgtccacctccaccgtggccgctgcgcccacggtggagcacctgttgttcctcgtcgtcctcgacggcgtcgagacgcccatccacgaggggacgctgtacggaagcgccgggggcacagtcaccgtcaccggccctggccagctctccgccgacggcctcgagagcgtcctggtgcgcggcggcgggaccggggccggcgccgtgcggttcacgctctgcgccgacgcggccgccgagggcgtcggcgctgcgtgcttcgagcggtgcggcgcggcccgcgtggagggcgcgcgcgaggtgtccgtgtcctcgtgccgcgccgtggaagtggagcgcgcgggcagggtcaccctcgaccgctgccgcgacgcgcggctccggggcgggggcgcgctccgcgccacgcggtgccggcgcgctgacgtcgagagcttcggcggggtgcgcctggcgcggtgcaaggccgcgcgcgccgactggtgcggcaccgtcgaggtcgagctgtgcagggccgtcgacgtccgccgctgcggagctgtcaccggagagcggtgccgcgtcgtgaacgctgcagggtgcggcagcgtcgaggtggcgcgggccgtgatcaacatggtggaggaagagcagccgtagtcagcttcgcctccgaaaagccctagtgctccgcgccctcgacgccgccctctacaccgtgggcgcctcctgctcctccagcctcctcctccacaaggcgcgaaaggtcctcgccgaccccgacgcagccgcctgcttcccccaccagattccttttacagaaaatgaagaaaacgatgaggctagggctgcggtggccgatctcaagcgcctcctcgaccttgagtgggccaacctcccgccctccacgctcgagctcgtcgccggggacgggtcccaccagactggtgccgctgccgaccacaccatgcgtacaaagcttcgcctgttcggttggatccgcttctcatcaatcaattcggacgcaagttgctgataacgcgagcaatgccaataaagctgatggcgcccggcgagatgaggcacatccttctaattctaatgtaaactatgaggctgatagtgatcgtgaaagtatggttgggcaccaaaatgcatcggttaaaggagcagagggtcaactttcagagaagtctgtctttacttctaaaaagcgcgttcttgtggagagaattccgaagtgggatagctctgatgatgatcagccagtgcggaagcgcaagttagatccatttgagagaaaaccatatccttctcctacatgtgcatataagatcagaaagaaatggagtaagatagagatagaaaccttgctggaaggggtggacaagtatggcataggcaactggaaagatatcaaattagcttaccctggtgtctttgaggagagatcaacgatctgaaggacaagtttagaaatttgggaaagcgccaccatgaatcgtcttgaggcttagtggcgctgtgcttttgctctgccctggagatattttatgttgatggcagtggtatgcaaaagaaggcctatgtaaggtgcatggagacatttgggtttcgtgccaaggatattgttgacttgttgagtgcactgttcttaaggcgtcgcttagacgtccaggcggaggtccaacgcctagccgccttgcccgcctaccgtacctaggcgatggtccaacgccttgtatcgtcttaccgctttaaaaaacatcgttgatggttgagtgtttaaagataagtaactggaaccccacatgatggcatgttgtcacgggcgtgcacaactcgagcacccatctggctcagaaaagcaccatgggaagatagaactctggcattggtggaatctgatgcaatggtcattgtaattctgaattgaaaattttgaaccagtgacacactaattgttcaagaagctcaatatcgtttgctccaggagtcagaag

SEQ ID NO: 48316 - DNA, 2820 bp, Zea Mays
ctcgcctgtagctcgccggagatccatgcctttgtgagctcgagtggagagaaaaaaaaaggagcagcgaagagcgaacgaccgagatgctggagaagctgtgggacgacgtggtggccgggcctcgcccggagacgggcctcgagaagctccgcaaggccaccaccgcccgcccgctcgtcgtcgtcgacaaaggtgcccccatcaataaattgcaggctacttgcgcatcagagggacggtgtgagattcttatacaatttgtatagaaacaatcatggcggtgttcttggagatgacatgggtttggggaagaccattcaaactattgcttttttgtcttctgttattggaaaaggcaatggccatgggcaatcaacaaacaaaggaaagatgactggtcctgtactcatcctctgccctacttcggtgatccggaactgggaaaatgaattttccgagtgggcagaattctctgttgctgtctatcatggtccaaatcgtgatttagttcttggaaaaattgaaaatcaaggactggaggtactcattaccagttttgacactttcagaattcatgataaggttttatgtggtatctcgtgggaacttgtggttgttgatgaggcacatcgtctcaagaatgaaaagtccaagttatatacagcatgcttggggataacaactcaaaagcggtttggtctcacggggaccataatgcagaataagatcatggaattatttaatctatttgactgggtcgtgcctggctgcttaggggaccgagaacactttcgagcttattatgatgagcctctaaaacagggtcagaggctaagtgctcctgagagatttgttcaagttgctgatgcgcgcaagaagcaccttgtttccattcttagggaattcttattgagaaggacaaaagaggagacaattggacatcttatgcttgggaaggaggataatattgttttctgcaaaatgagtgacgttcaaaaacgtgtttatagaagaatgctgcaacaacctgatatacaaatccttattaataaggatgtccgctgtagctgtggaagtcctttacctcaggttgaatgttgcaagagaactgaaccagatggtgttatatggtcttatcttcacagagagaaccctgaaggctgttctatatgccccttctgtcttgttcttcctttcctcgtcaagcttcagcagattagcaaccatctggagctgataaaacctaatccaaaggatgagcttgaaaagcagaagaaagatgctgaacttgcagctgctgtctttggtgcagatattgacttagttggtggtactgctaaaagtgagaacttcatgggtctcagtgatgctgagaactgtggaaagatgcgagcactagaaaggcttctgtcattatggactggacagggtgacaagattcttcttttcagttattctgtcaggatgcttgacatactagagaagtttctcataaggaagggttattgcttttcacgcttcgatggaacaactccgatgaatgcacgccaatcactagtggatgagttcaacagaagccctagcaaacaggttttccttatatctactcgagcaggtaatttaggtgtaaaccttgttagtgctaaccgcgtggtgatatttgatccaagttggaaccctgcccaagacttgcaagcacaagacagatcatttcggtatggacagagacggcatgttacagtatttcgcctacttggtgccggttcacttgaagagctcatttattctaggcaaatatataaacagcagctttccaacattgcagtctctggaaaaatagagaggcgttactttgaaggtgtgcaggatgacaagaaatttcaaggtgagctctttgggatctgcaatcttttccgtgacttgtccgataagctttttactaggatagtttatgcccaccgcaacgaggatgtcgtgaacatgaggacagacggaagagagaaaggtggagcagacgagactgtccagagctccttagaggagctgcttagtaagaatgaaacaaagcacactgccatggaaaaatcttattcatcggaggagaaaagggaagtggcaagatcttattcactggagcagaaaaagaaagagtttagctgcatcgcatccttcatgggtatggatgaccttgaatttagcaagtggttgctatcagcctcaccgcaccagcggtctgaagtgctgcaggactacaggaggaagaagaaaaatcagaaatgatgatgcaggtcctcggagctaaccggctaccgcaaagctttgacgtagtgattagcttgtgtagctaattgtggtagttatgacaagggaatggtagtaaaattgacccgtggcaccgatcagtatgtatgtctgcagccccgcttattttgaaccttatattggtgcaaactgagctcagcaaggccttggtcactctccctggccgttttttttcggtcaggtgaaatataatctgtattgtgtctgttagttcctgttcagctgtctaagcctttgtgtagcgagtcttatcatgttaggtggcttgcaatgttaccttggtctgtactaatcatttggatatcgtagtcttctccgtactaaaatataattcgttttagattaaatatacattcattcggtaacttatgaatgtagtttgtctgtgtgtggctacattcattggaacgagttatttacaaacattacactcccttacaacgtagttttcaactttagaaccgtgtctttgcctctctcaattttagaaccaag

SEQ ID NO: 48317 - DNA, 2264 bp, Zea Mays
gtcgaaattgtttttgctcgtctgttcttcgttggataactagaaaaatttcctcccaaaattgccgccgtcgcctccgtgtccttccacggcagggacccgccggagcatcaccgcctccgtccatgtcgctcaaccgcctcaaggaaaccctccacgcctgttcctcttcctcctccgaaccacggacccaaccgcgctcaccacagcatcctgcccgccttccgcggagacccccaaagacgtccctttcgcagcagctcctccgcctcgaggccgccgcctcttcatcctccttcttctcctccaggcccttacagctcccacccgcccccaggcccccgatcgagaagccgcgggaggatgtcgaaccgccgtcgtcggaggatgaggacgagagaaaaagtcgccccattatccgccgctgcctgcatccgccaccagcggccgccctcgagtcccgcgggccatacgagccacttgtgctctcgctgcctggagagcaccctgtcgtccaggtgcccccatcaataaattgcaggctacttgcgcatcagagggacggtgtgagattcttatacaatttgtatagaaacaatcatggcggtgttcttggagatgacatgggtttggggaagaccattcaaactattgcttttttgtcttctgttattggaaaaggcaatggccatgggcaatcaacaaacaaaggaaagatgactggtcctgtactcatcctctgccctacttcggtgatccggaactgggaaaatgaattttccgagtgggcagaattctctgttgctgtctatcatggtccaaatcgtgatttagttcttggaaaaattgaaaatcaaggactggaggtactcattaccagttttgacactttcagaattcatgataaggttttatgtggtatctcgtgggaacttgtggttgttgatgaggcacatcgtctcaagaatgaaaagtccaagttatatacagcatgcttggggataacaactcaaaagcggtttggtctcacggggaccataatgcagaataagatcatggaattatttaatctatttgactgggtcgtgcctggctgcttaggggaccgagaacactttcgagcttattatgatgagcctctaaaacagggtcagaggctaagtgctcctgagagatttgttcaagttgctgatgcgcgcaagaagcaccttgtttccattcttagggaattcttattgagaaggacaaaagaggagacaattggacatcttatgcttgggaaggaggataatattgttttctgcaaaatgagtgacgttcaaaaacgtgtttatagaagaatgctgcaacaacctgatatacaaatccttattaataaggatgtccgctgtagctgtggaagtcctttacctcaggttgaatgttgcaagagaactgaaccagatggtgttatatggtcttatcttcacagagagaaccctgaaggctgttctatatgccccttctgtcttgttcttcctttcctcgtcaagcttcagcagattagcaaccatctggagctgataaaacctaatccaaaggatgagcttgaaaagcagaagaaagatgctgaacttgcagctgctgtctttggtgcagatattgacttagttggtggtactgctaaaagtgagaacttcatgggtctcagtgatgctgagaactgtggaaagatgcgagcactagaaaggcttctgtcattatggactggacagggtgacaagattcttcttttcagttattctgtcaggatgcttgacatactagagaagtttctcataaggaagggttattgcttttcacgcttcgatggaacaactccgatgaatgcacgccaatcactagtggatgagttcaacagaagccctagcaaacaggttttccttatatctactcgagcaggtaatttaggtgtaaaccttgttagtgctaaccgcgtggtgatatttgatccaagttggaaccctgcccaagacttgcaagcacaagacagatcatttcggtatggacagagacggcatgttacagtatttcgcctacttggtgccggttcacttgaagagctcatttattctaggcaaatatataaacagcagctttccaacattgcagtctctggaaaaatagagaggcgttactttgaaggtgtgcaggaactagatcccaagtgttattttttcatcagcgcatcaaattcagcattgatggcgttcttccaaagttcc

SEQ ID NO: 48318 - DNA, 2119 bp, Zea Mays
gtctgttcttcgttggataactagaaaaatttcctcccaaaattgccgccgtcgcctccgtgtccttccacggcagggacccgccggagcatcaccgcctccgtccatgtcgctcaaccgcctcaaggaaaccctccacgcctgttcctcttcctcctccgaaccacggacccaaccgcgctcaccacagcatcctgcccgccttccgcggagacccccaaagacgtccctttcgcagcagctcctccgcctcgaggccgccgcctcttcatcctccttcttctcctccaggcccttacagctcccacccgcccccaggcccccgatcgagaagccgcgggaggatgtcgaaccgccgtcgtcggaggatgaggacgagagaaaaagtcgccccattatccgccgctgcctgcatccgccaccagcggccgccctcgagtcccgcgggccatacgagccacttgtgctctcgctgcctggagagcaccctgtcgtccaggtgcccccatcaataaattgcaggctacttgcgcatcagagggacggtgtgagattcttatacaatttgtatagaaacaatcatggcggtgttcttggagatgacatgatgcttgacatactagagaagtttctcataaggaagggttattgcttttcacgcttcgatggaacaactccgatgaatgcacgccaatcactagtggatgagttcaacagaagccctagcaaacaggttttccttatatctactcgagcaggtaatttaggtgtaaaccttgttagtgctaaccgcgtggtgatatttgatccaagttggaaccctgcccaagacttgcaagcacaagacagatcatttcggtatggacagagacggcatgttacagtatttcgcctacttggtgccggttcacttgaagagctcatttattctaggcaaatatataaacagcagctttccaacattgcagtctctggaaaaatagagaggcgttactttgaaggtgtgcaggatgacaagaaatttcaaggtgagctctttgggatctgcaatcttttccgtgacttgtccgataagctttttactagtgagattattgagatgcatggagaacatggcaagagtagtgcaacagaagcaacagggataagagaaatagtcgatactgatttatttggttcacaagagaataggaagtcttccacagcaacaacacatacggatgatcagaaattggttgattttgggatagtttatgcccaccgcaacgaggatgtcgtgaacatgaggacagacggaagagagaaaggtggagcagacgagactgtccagagctccttagaggagctgcttagtaagaatgaaacaaagcacactgccatggaaaaatcttattcatcggaggagaaaagggaagtggcaagatcttattcactggagcagaaaaagaaagagtttagctgcatcgcatccttcatgggtatggatgaccttgaatttagcaagtggttgctatcagcctcaccgcaccagcggtctgaagtgctgcaggactacaggaggaagaagaaaaatcagaaatgatgatgcaggtcctcggagctaaccggctaccgcaaagctttgacgtagtgattagcttgtgtagctaattgtggtagttatgacaagggaatggtagtaaaattgacccgtggcaccgatcagtatgtatgtctgcagccccgcttattttgaaccttatattggtgcaaactgagctcagcaaggccttggtcactctccctggccgttttttttcggtcaggtgaaatataatctgtattgtgtctgttagttcctgttcagctgtctaagcctttgtgtagcgagtcttatcatgttaggtggcttgcaatgttaccttggtctgtactaatcatttggatatcgtagtcttctccgtactaaaatataattcgttttagattaaatatacattcattcggtaacttatgaatgtagtttgtctgtgtgtggctacattcattggaacgagttatttacaaacattacactcccttacaacgtagttttcaactttagaaccgtgtctttgcctctctcaattttagaaccaag

SEQ ID NO: 48319 - DNA, 2154 bp, Zea Mays
gttggataactagaaaaatttcctcccaaaattgccgccgtcgcctccgtgtccttccacggcagggacccgccggagcatcaccgcctccgtccatgtcgctcaaccgcctcaaggaaaccctccacgcctgttcctcttcctcctccgaaccacggacccaaccgcgctcaccacagcatcctgcccgccttccgcggagacccccaaagacgtccctttcgcagcagctcctccgcctcgaggccgccgcctcttcatcctccttcttctcctccaggcccttacagctcccacccgcccccaggcccccgatcgagaagccgcgggaggatgtcgaaccgccgtcgtcggaggatgaggacgagagaaaaagtcgccccattatccgccgctgcctgcatccgccaccagcggccgccctcgagtcccgcgggccatacgagccacttgtgctctcgctgcctggagagcaccctgtcgtccaggtgcccccatcaataaattgcaggctacttgcgcatcagagggacggtgtgagattcttatacaatttgtatagaaacaatcatggcggtgttcttggagatgacatgggtttggggaagaccattcaaactattgcttttttgtcttctgttattggaaaaggcaatggccatgggcaatcaacaaacaaaggaaagatgactggtcctgtactcatcctctgccctacttcggtgatccggaactgggaaaatgaattttccgagtgggcagaattctctgttgctgtctatcatggtccaaatcgtgatttagttcttggaaaaattgaaaatcaaggactggaggtactcattaccagttttgacactttcagaattcatgataaggttttatgtggtatctcgtgggaacttgtggttgttgatgaggcacatcgtctcaagaatgaaaagtccaagttatatacagcatgcttggggataacaactcaaaagcggtttggtctcacggggaccataatgcagaataagatcatggaattatttaatctatttgactgggtcgtgcctggctgcttaggggaccgagaacactttcgagcttattatgatgagcctctaaaacagggtcagaggctaagtgctcctgagagatttgttcaagttgctgatgcgcgcaagaagcaccttgtttccattcttagggaattcttattgagaaggacaaaagaggagacaattggacatcttatgcttgggaaggaggataatattgttttctgcaaaatgagtgacgttcaaaaacgtgtttatagaagaatgctgcaacaacctgatatacaaatccttattaataaggatgtccgctgtagctgtggaagtcctttacctcaggttgaatgttgcaagagaactgaaccagatggtgttatatggtcttatcttcacagagagaaccctgaaggctgttctatatgccccttctgtcttgttcttcctttcctcgtcaagcttcagcagattagcaaccatctggagctgataaaacctaatccaaaggatgagcttgaaaagcagaagaaagatgctgaacttgcagctgctgtctttggtgcagatattgacttagttggtggtactgctaaaagtgagaacttcatgggtctcagtgatgctgagaactgtggaaagatgcgagcactagaaaggcttctgtcattatggactggacagggtgacaagattcttcttttcagttattctgtcaggatgcttgacatactagagaagtttctcataaggaagggttattgcttttcacgcttcgatggaacaactccgatgaatgcacgccaatcactagtggatgagttcaacagaagccctagcaaacagttggaaccctgcccaagacttgcaagcacaagacagatcatttcggtatggacagagacggcatgttacagtatttcgcctacttggtgccggttcacttgaagagctcatttattctaggcaaatatataaacagcagctttccaacattgcagtctctggaaaaatagagaggcgttactttgaaggtgtgcaggaactagatcccaagtgttattttttcatcagcgcatcaaattcagcattgatggcgttcttccaaagttcc

SEQ ID NO: 48320 - DNA, 2830 bp, Zea Mays
gtatcctgttgcccctgctgctcatgaccaaccgcaagaaaaataggtgcccccatcaataaattgcaggctacttgcgcatcagagggacggtgtgagattcttatacaatttgtatagaaacaatcatggcggtgttcttggagatgacatgggtttggggaagaccattcaaactattgcttttttgtcttctgttattggaaaaggcaatggccatgggcaatcaacaaacaaaggaaagatgactggtcctgtactcatcctctgccctacttcggtgatccggaactgggaaaatgaattttccgagtgggcagaattctctgttgctgtctatcatggtccaaatcgtgatttagttcttggaaaaattgaaaatcaaggactggaggtactcattaccagttttgacactttcagaattcatgataaggttttatgtggtatctcgtgggaacttgtggttgttgatgaggcacatcgtctcaagaatgaaaagtccaagttatatacagcatgcttggggataacaactcaaaagcggtttggtctcacggggaccataatgcagaataagatcatggaattatttaatctatttgactgggtcgtgcctggctgcttaggggaccgagaacactttcgagcttattatgatgagcctctaaaacagggtcagaggctaagtgctcctgagagatttgttcaagttgctgatgcgcgcaagaagcaccttgtttccattcttagggaattcttattgagaaggacaaaagaggagacaattggacatcttatgcttgggaaggaggataatattgttttctgcaaaatgagtgacgttcaaaaacgtgtttatagaagaatgctgcaacaacctgatatacaaatccttattaataaggatgtccgctgtagctgtggaagtcctttacctcaggttgaatgttgcaagagaactgaaccagatggtgttatatggtcttatcttcacagagagaaccctgaaggctgttctatatgccccttctgtcttgttcttcctttcctcgtcaagcttcagcagattagcaaccatctggagctgataaaacctaatccaaaggatgagcttgaaaagcagaagaaagatgctgaacttgcagctgctgtctttggtgcagatattgacttagttggtggtactgctaaaagtgagaacttcatgggtctcagtgatgctgagaactgtggaaagatgcgagcactagaaaggcttctgtcattatggactggacagggtgacaagattcttcttttcagttattctgtcaggatgcttgacatactagagaagtttctcataaggaagggttattgcttttcacgcttcgatggaacaactccgatgaatgcacgccaatcactagtggatgagttcaacagaagccctagcaaacaggttttccttatatctactcgagcaggtaatttaggtgtaaaccttgttagtgctaaccgcgtggtgatatttgatccaagttggaaccctgcccaagacttgcaagcacaagacagatcatttcggtatggacagagacggcatgttacagtatttcgcctacttggtgccggttcacttgaagagctcatttattctaggcaaatatataaacagcagctttccaacattgcagtctctggaaaaatagagaggcgttactttgaaggtgtgcaggatgacaagaaatttcaaggtgagctctttgggatctgcaatcttttccgtgacttgtccgataagctttttactagtgagattattgagatgcatggagaacatggcaagagtagtgcaacagaagcaacagggataagagaaatagtcgatactgatttatttggttcacaagagaataggaagtcttccacagcaacaacacatacggatgatcagaaattggttgattttgggatagtttatgcccaccgcaacgaggatgtcgtgaacatgaggacagacggaagagagaaaggtggagcagacgagactgtccagagctccttagaggagctgcttagtaagaatgaaacaaagcacactgccatggaaaaatcttattcatcggaggagaaaagggaagtggcaagatcttattcactggagcagaaaaagaaagagtttagctgcatcgcatccttcatgggtatggatgaccttgaatttagcaagtggttgctatcagcctcaccgcaccagcggtctgaagtgctgcaggactacaggaggaagaagaaaaatcagaaatgatgatgcaggtcctcggagctaaccggctaccgcaaagctttgacgtagtgattagcttgtgtagctaattgtggtagttatgacaagggaatggtagtaaaattgacccgtggcaccgatcagtatgtatgtctgcagccccgcttattttgaaccttatattggtgcaaactgagctcagcaaggccttggtcactctccctggccgttttttttcggtcaggtgaaatataatctgtattgtgtctgttagttcctgttcagctgtctaagcctttgtgtagcgagtcttatcatgttaggtggcttgcaatgttaccttggtctgtactaatcatttggatatcgtagtcttctccgtactaaaatataattcgttttagattaaatatacattcattcggtaacttatgaatgtagtttgtctgtgtgtggctacattcattggaacgagttatttacaaacattacactcccttacaacgtagttttcaactttagaaccgtgtctttgcctctctcaattttagaaccaag

SEQ ID NO: 48321 - DNA, 2704 bp, Zea Mays
atactaagtaagctcggcttattaaaggggtttggggaagaccattcaaactattgcttttttgtcttctgttattggaaaaggcaatggccatgggcaatcaacaaacaaaggaaagatgactggtcctgtactcatcctctgccctacttcggtgatccggaactgggaaaatgaattttccgagtgggcagaattctctgttgctgtctatcatggtccaaatcgtgatttagttcttggaaaaattgaaaatcaaggactggaggtactcattaccagttttgacactttcagaattcatgataaggttttatgtggtatctcgtgggaacttgtggttgttgatgaggcacatcgtctcaagaatgaaaagtccaagttatatacagcatgcttggggataacaactcaaaagcggtttggtctcacggggaccataatgcagaataagatcatggaattatttaatctatttgactgggtcgtgcctggctgcttaggggaccgagaacactttcgagcttattatgatgagcctctaaaacagggtcagaggctaagtgctcctgagagatttgttcaagttgctgatgcgcgcaagaagcaccttgtttccattcttagggaattcttattgagaaggacaaaagaggagacaattggacatcttatgcttgggaaggaggataatattgttttctgcaaaatgagtgacgttcaaaaacgtgtttatagaagaatgctgcaacaacctgatatacaaatccttattaataaggatgtccgctgtagctgtggaagtcctttacctcaggttgaatgttgcaagagaactgaaccagatggtgttatatggtcttatcttcacagagagaaccctgaaggctgttctatatgccccttctgtcttgttcttcctttcctcgtcaagcttcagcagattagcaaccatctggagctgataaaacctaatccaaaggatgagcttgaaaagcagaagaaagatgctgaacttgcagctgctgtctttggtgcagatattgacttagttggtggtactgctaaaagtgagaacttcatgggtctcagtgatgctgagaactgtggaaagatgcgagcactagaaaggcttctgtcattatggactggacagggtgacaagattcttcttttcagttattctgtcaggatgcttgacatactagagaagtttctcataaggaagggttattgcttttcacgcttcgatggaacaactccgatgaatgcacgccaatcactagtggatgagttcaacagaagccctagcaaacaggttttccttatatctactcgagcaggtaatttaggtgtaaaccttgttagtgctaaccgcgtggtgatatttgatccaagttggaaccctgcccaagacttgcaagcacaagacagatcatttcggtatggacagagacggcatgttacagtatttcgcctacttggtgccggttcacttgaagagctcatttattctaggcaaatatataaacagcagctttccaacattgcagtctctggaaaaatagagaggcgttactttgaaggtgtgcaggatgacaagaaatttcaaggtgagctctttgggatctgcaatcttttccgtgacttgtccgataagctttttactagtgagattattgagatgcatggagaacatggcaagagtagtgcaacagaagcaacagggataagagaaatagtcgatactgatttatttggttcacaagagaataggaagtcttccacagcaacaacacatacggatgatcagaaattggttgattttgggatagtttatgcccaccgcaacgaggatgtcgtgaacatgaggacagacggaagagagaaaggtggagcagacgagactgtccagagctccttagaggagctgcttagtaagaatgaaacaaagcacactgccatggaaaaatcttattcatcggaggagaaaagggaagtggcaagatcttattcactggagcagaaaaagaaagagtttagctgcatcgcatccttcatgggtatggatgaccttgaatttagcaagtggttgctatcagcctcaccgcaccagcggtctgaagtgctgcaggactacaggaggaagaagaaaaatcagaaatgatgatgcaggtcctcggagctaaccggctaccgcaaagctttgacgtagtgattagcttgtgtagctaattgtggtagttatgacaagggaatggtagtaaaattgacccgtggcaccgatcagtatgtatgtctgcagccccgcttattttgaaccttatattggtgcaaactgagctcagcaaggccttggtcactctccctggccgttttttttcggtcaggtgaaatataatctgtattgtgtctgttagttcctgttcagctgtctaagcctttgtgtagcgagtcttatcatgttaggtggcttgcaatgttaccttggtctgtactaatcatttggatatcgtagtcttctccgtactaaaatataattcgttttagattaaatatacattcattcggtaacttatgaatgtagtttgtctgtgtgtggctacattcattggaacgagttatttacaaacattacactcccttacaacgtagttttcaactttagaaccgtgtctttgcctctctcaattttagaaccaag

SEQ ID NO: 48322 - DNA, 1626 bp, Zea Mays
gttgaaatcaccggccaatatccaagcaccctcacatgcagctcttacatctttgatttcctggaggaacagaatcttttcactgtctcccagtggaccatagacacaagtcaaccaccaggatgcttgacatactagagaagtttctcataaggaagggttattgcttttcacgcttcgatggaacaactccgatgaatgcacgccaatcactagtggatgagttcaacagaagccctagcaaacaggttttccttatatctactcgagcaggtaatttaggtgtaaaccttgttagtgctaaccgcgtggtgatatttgatccaagttggaaccctgcccaagacttgcaagcacaagacagatcatttcggtatggacagagacggcatgttacagtatttcgcctacttggtgccggttcacttgaagagctcatttattctaggcaaatatataaacagcagctttccaacattgcagtctctggaaaaatagagaggcgttactttgaaggatgacaagaaatttcaaggtgagctctttgggatctgcaatcttttccgtgacttgtccgataagctttttactagtgagattattgagatgcatggagaacatggcaagagtagtgcaacagaagcaacagggataagagaaatagtcgatactgatttatttggttcacaagagaataggaagtcttccacagcaacaacacatacggatgatcagaaattggttgattttgggatagtttatgcccaccgcaacgaggatgtcgtgaacatgaggacagacggaagagagaaaggtggagcagacgagactgtccagagctccttagaggagctgcttagtaagaatgaaacaaagcacactgccatggaaaaatcttattcatcggaggagaaaagggaagtggcaagatcttattcactggagcagaaaaagaaagagtttagctgcatcgcatccttcatgggtatggatgaccttgaatttagcaagtggttgctatcagcctcaccgcaccagcggtctgaagtgctgcaggactacaggaggaagaagaaaaatcagaaatgatgatgcaggtcctcggagctaaccggctaccgcaaagctttgacgtagtgattagcttgtgtagctaattgtggtagttatgacaagggaatggtagtaaaattgacccgtggcaccgatcagtatgtatgtctgcagccccgcttattttgaaccttatattggtgcaaactgagctcagcaaggccttggtcactctccctggccgttttttttcggtcaggtgaaatataatctgtattgtgtctgttagttcctgttcagctgtctaagcctttgtgtagcgagtcttatcatgttaggtggcttgcaatgttaccttggtctgtactaatcatttggatatcgtagtcttctccgtactaaaatataattcgttttagattaaatatacattcattcggtaacttatgaatgtagtttgtctgtgtgtggctacattcattggaacgagttatttacaaacattacactcccttacaacgtagttttcaactttagaaccgtgtctttgcctctctcaattttagaaccaag

SEQ ID NO: 48323 - DNA, 1135 bp, Zea Mays
cttcttcatcatatcctaccaaaatgatgacaagaaatttcaaggtgagctctttgggatctgcaatcttttccgtgacttgtccgataagctttttactagtgagattattgagatgcatggagaacatggcaagagtagtgcaacagaagcaacagggataagagaaatagtcgatactgatttatttggttcacaagagaataggaagtcttccacagcaacaacacatacggatgatcagaaattggttgattttgggatagtttatgcccaccgcaacgaggatgtcgtgaacatgaggacagacggaagagagaaaggtggagcagacgagactgtccagagctccttagaggagctgcttagtaagaatgaaacaaagcacactgccatggaaaaatcttattcatcggaggagaaaagggaagtggcaagatcttattcactggagcagaaaaagaaagagtttagctgcatcgcatccttcatgggtatggatgaccttgaatttagcaagtggttgctatcagcctcaccgcaccagcggtctgaagtgctgcaggactacaggaggaagaagaaaaatcagaaatgatgatgcaggtcctcggagctaaccggctaccgcaaagctttgacgtagtgattagcttgtgtagctaattgtggtagttatgacaagggaatggtagtaaaattgacccgtggcaccgatcagtatgtatgtctgcagccccgcttattttgaaccttatattggtgcaaactgagctcagcaaggccttggtcactctccctggccgttttttttcggtcaggtgaaatataatctgtattgtgtctgttagttcctgttcagctgtctaagcctttgtgtagcgagtcttatcatgttaggtggcttgcaatgttaccttggtctgtactaatcatttggatatcgtagtcttctccgtactaaaatataattcgttttagattaaatatacattcattcggtaacttatgaatgtagtttgtctgtgtgtggctacattcattggaacgagttatttacaaacattacactcccttacaacgtagttttcaactttagaaccgtgtctttgcctctctcaattttagaaccaag

SEQ ID NO: 48324 - DNA, 5181 bp, Zea Mays
agagcagataatcctatcctcacttgaggatgctatgtggagcatgcacaaatcaatccacagatattcatttaaggctattgtgacgaaccacttagttctgcgtggaacttatcgcagtctcacccttgtaatttatggcaataccgccgaagaccttggtcaattcaacatagaactaggtctggaccattctcttgctaatgttgttagctctccatcagagggaaagcttgaagaccttccaccagcgctacattcatccaagttgtcatttgaagaatcattatcatcattgaaaccatcgagttttcatgccactgatgtcgacttatcaattgaagcgaagaaagtcttgcatttggctctgaaaatgtaccaaatatctgatgtggagaatcttattcccaacctaagaagtgcagttctctcagctatttcaaaatatgtgactgctagtacaaatcatattctacacactttgagtcaagattcagcaaatgcgtttatcaacagtgattttgattctcaggaaattaacaaaattcttgctgaagctggtaaggagctctctgaaatttggaagaatgtccatgctgttactgagagtaatcttttcaatgataatggttttaccattggagtagatgaagacttgcccacgaccaagattctaattgagttgtttaaccattgtttcccatattacaagaaattatctttacttgatctacaatgtccttctcagagcaaatggttggttctgtctttgagtttggttctcctgctatgctcctcaaaggagagttgcttttattttgttgatactggtgggatggagcaaattattaatctgctttgctggaggacaccaaaatctgcagctaccacattgcttctcctaggtattgtggagcatgctactcggaatggttttggatgtgaagcttttctgggatggtggccacgagctgagcacaccagcatacctgttggcagcagcgatggttattgctctttactgaagcttctactggaaaaggaaaggcatgatattgcctctctagctacatatgttctacagcgcttgcggttttatgagatactatctaaatacgagtctgcggtagtcaaagtgatttccaatattcaggcagataaactttctactgatggagttccatttcttatttctgctagtgttgaacttggtgaaatgctgaaattgataattttctgtggccctattgaagatccatcaccagtggctactgctagtagaatatttaagtctgaacatttagaaggcttgctttcgtacaaagcaacaattgatcttataacttcgtccaaatacagttttttgcagtatgatacggatccatacttattgtctcttatccaggaaagaagtttttttcctctgtcagcggccttattgtcatcacctatattgcatttaccaaatggccctgccgccgaaattttgatggggatagcatcatcaattgaatctattatcctctccctcctcttttgtcgttcagggttatcgttcttgctcagtcagcctgaagcaactgagcttatacttctttctcttcaagatgcagaaaaaatgaataaatcagaatgcataactcttcgacaggcttttgttcttttatcaaaagggttcttttgccgcccaaaagaagtgggattgataacagaattacatcttaaagtgggaagtgctgccactaggatcctctcagttcctccgaattctgatgaacttttgtgggttctctgggaactttgtgccatttcaaggtctgattctggccgacaagcattattagctcttgggtactttcctgaggcaatatcagttctactgagatctctctcttcatataaggatcttgattcagtcatggctgagaatggagggtcgcctttgggtcttgcaattttccattcagctgcagaaattcttgaagttttggttgtggattcaactgcttcatcgcttgaatcatggattgggtttgctgttgatctgcacaaggctctgcattcatcttctcctggttcaaacaggaaagatgcaccaacaaggttgcttgaatggattgatgctggtgttgtttatcagagaaatgttgctctatgcagcacttctgtggtccaattaacaacagctttccgtatcttggcatttatttcggatgataagcctgtggcgtcatccctttttgaagaaggcgccataactgttatatatgttgtcctgatgaactgcaagtctatgcttgagcgtttatcaaatagttatgattaccttgttgatgaaggggctgaactgagttctaccacagaattacttctagatcgaactcatgagaaagctattgttgacctcatgattccctcacttgtcttgttgataaatctccttcatatattacgtgaaacgaaagaacaataccgcaacaaaaaacttcttagttctcttctgcagttgcaccgagaagttagcccgaggctagcagcttgtgctgcagatttgtccttcatgtttcctacttttgctataggttttggtgttgtttgtcatcttatcacgtcagcacttgcttgctggccgttgtataattgggcacctggtctgtttcattgccttcttgaaaataccgaggctactaatgcgtccgtaccattgggcccgaaggctgcttttagtctgctttgtctcctgggtgatctgttcccagatgaaggcatatggctatggaaagttgaacttccttctctcagtgccattagatctttgagtactggagcagtgctagggcctcaagtggagaaaggggtgaactggtacctgcatcctgaacatgtgaccatattacttgtgaggctgatgccacaacttgataggcttgctcgtatcattgataactttgctacttcggtcttgatggtgatacaggacatgcttcgtgttttcattgttcgtgttgccttagaaaagattgagtgtgcagttgttcttctacgccctatatttatgtggttagatgataaagttgacaaaacttccctgtcagagagagacacctttaaggtccatcagttgcttcagtttactgtaaaattgtctgagcatcctactggcaaggcattgctttggaggatggggttcacaaggattcttagcaagttactacagaattgtagccgagcatctttcccgtatgataatcagacttttggaagggcgcactctaagaatgaccttatgctcaaatggaggatccctttgtttaaatctattgcatatatctttagtatcgacccatgtaataatgagaaggctgatgttgaagagtccctgaatgagaagtctgttcatgaatgctcttctgtcatgcatgacctcatgatgttctgccaggttttgcctgttggccgggaaatgttagcatgttcgttggcgttcaaggaattggtttattcttatacctgtagaagtgcagtaactttgatactttcacaaatacatacttccaacaaagatgttcttgaaaaagatgagagtgaccctaaccataactcaccatctctggatggttggaattgcttttcctcattgttcaagtgctggaagaagcttgtaaagtatgttggttctaatgaacgaacagattatttagtagaaactatttattccttgacactaggtgctatcaccctcagccagtatggtgaaaatggttccttggaatcatctggtgagagtccaagtgagattgagttattcatgaagacatatgaagagaagatatgccagggcattgaaaattcagcgactgctgttggaaagactcttttacgcaagggtcaaactcaatacatgcttgcaggcgctggcagttcatcagcgaatgagttacccaatgtggaggccaagcttctatggaacacatttccagcaaataggatccctctggagaccttcagctcaggtttacctgctcggccgatgccaccccttacaccttattcagctgttgctactcagcacgctacgatgaactctggctctcctgcaaacctgtatagccagggcagtgttgtccagccttctccaactgcttctattattagtgattcaaatttggccatgaactccgcatctggcagcatgcttgcatcgaatctgctgccatcatttgcatcacaatttctgatgagcaggccttcaatgcctactccgttttttggcacgcctcttcaacaagttcaattctcatccggtcttccacaaaatatttctaaccctcagccacctgtctcaatacaaccacggccacccccacccccaccacccccgcagcagccacatccttctcagacactccaacaacttggtgctatccaattaccacaccaagatcagcagcactcatatccccatagtgctatcttgccacaagttacgttgcagtttcctaaccagctacccattcctcaagtacaattgtatcatcaaagccagcaggaatctgggcaaacactgaggcaagttggtgaacaatcacaacttcagaaccagggtatgcaagcagatagtttctctcaacagcagcaagactcagggatcaacttaaaccagttcttttcatctccagaagccattcagagtctacttagtgatcgtgagaagctctgccaacttttagagcagaatccaaaacttatgcaaatgctccaggatcgcattggccagttgtagtcgcactggaggtgctattgtgaaagtgaaatctgatgctggtcgatcgctaggttcctagagtatggtgttgttttgttttcggctatggctgtagctagatgaaagcaactgccagcttgctagtcgccgaaatgtattcctatgtacattatatgtaactttgttctgtaatgtgaaaatttgtaatgttagtgcgtatctaatttatagttttaagtttaccttagtggttagatcgtgtgacatgcgcagcgacgggaaaacgacgccgccttttgtctgcaaaggcatttgacgctaactacctgtagagttctgaatatcctgttgcactcttgtgtgtatctggttgctttaatgctcgaaaatgaatatcctaaggttttgcattcgta

SEQ ID NO: 48325 - DNA, 6657 bp, Zea Mays
agagcagataatcctatcctcacttgaggatgctatgtggagcatgcacaaatcaatccacagatattcatttaaggctattgtgacgaaccacttagttctgcgtggaacttatcgcagtctcacccttgtaatttatggcaataccgccgaagaccttggtcaattcaacatagaactaggtctggaccattctcttgctaatgttgttagctctccatcagagggaaagcttgaagaccttccaccagcgctacattcatccaagttgtcatttgaagaatcattatcatcattgaaaccatcgagttttcatgccactgatgtcgacttatcaattgaagcgaagaaagtcttgcatttggctctgaaaatgtaccaaatatctgatgtggagaatcttattcccaacctaagaagtgcagttctctcagctatttcaaaatatgtgactgctagtacaaatcatattctacacactttgagtcaagattcagcaaatgcgtttatcaacagtgattttgattctcaggaaattaacaaaattcttgctgaagctggtaaggagctctctgaaatttggaagaatgtccatgctgttactgagagtaatcttttcaatgataatggttttaccattggagtagatgaagacttgcccacgaccaagattctaattgagttgtttaaccattgtttcccatattacaagaaattatctttacttgatctacaatgtccttctcagagcaaatggttggttctgtctttgagtttggttctcctgctatgctcctcaaaggagagttgcttttattttgttgatactggtgggatggagcaaattattaatctgctttgctggaggacaccaaaatctgcagctaccacattgcttctcctaggtattgtggagcatgctactcggaatggttttggatgtgaagcttttctgggatggtggccacgagctgagcacaccagcatacctgttggcagcagcgatggttattgctctttactgaagcttctactggaaaaggaaaggcatgatattgcctctctagctacatatgttctacagcgcttgcggttttatgagatactatctaaatacgagtctgcggtagtcaaagtgatttccaatattcaggcagataaactttctactgatggagttccatttcttatttctgctagtgttgaacttggtgaaatgctgaaattgataattttctgtggccctattgaagatccatcaccagtggctactgctagtagaatatttaagtctgaacatttagaaggcttgctttcgtacaaagcaacaattgatcttataacttcgtccaaatacagttttttgcagtatgatacggatccatacttattgtctcttatccaggaaagaagtttttttcctctgtcagcggccttattgtcatcacctatattgcatttaccaaatggccctgccgccgaaattttgatggggatagcatcatcaattgaatctattatcctctccctcctcttttgtcgttcagggttatcgttcttgctcagtcagcctgaagcaactgagcttatacttctttctcttcaagatgcagaaaaaatgaataaatcagaatgcataactcttcgacaggcttttgttcttttatcaaaagggttcttttgccgcccaaaagaagtgggattgataacagaattacatcttaaagtgggaagtgctgccactaggatcctctcagttcctccgaattctgatgaacttttgtgggttctctgggaactttgtgccatttcaaggtctgattctggccgacaagcattattagctcttgggtactttcctgaggcaatatcagttctactgagatctctctcttcatataaggatcttgattcagtcatggctgagaatggagggtcgcctttgggtcttgcaattttccattcagctgcagaaattcttgaagttttggttgtggattcaactgcttcatcgcttgaatcatggattgggtttgctgttgatctgcacaaggctctgcattcatcttctcctggttcaaacaggaaagatgcaccaacaaggttgcttgaatggattgatgctggtgttgtttatcagagaaatgttgctctatgcagcacttctgtggtccaattaacaacagctttccgtatcttggcatttatttcggatgataagcctgtggcgtcatccctttttgaagaaggcgccataactgttatatatgttgtcctgatgaactgcaagtctatgcttgagcgtttatcaaatagttatgattaccttgttgatgaaggggctgaactgagttctaccacagaattacttctagatcgaactcatgagaaagctattgttgacctcatgattccctcacttgtcttgttgataaatctccttcatatattacgtgaaacgaaagaacaataccgcaacaaaaaacttcttagttctcttctgcagttgcaccgagaagttagcccgaggctagcagcttgtgctgcagatttgtccttcatgtttcctacttttgctataggttttggtgttgtttgtcatcttatcacgtcagcacttgcttgctggccgttgtataattgggcacctggtctgtttcattgccttcttgaaaataccgaggctactaatgcgtccgtaccattgggcccgaaggctgcttttagtctgctttgtctcctgggtgatctgttcccagatgaaggcatatggctatggaaagttgaacttccttctctcagtgccattagatctttgagtactggagcagtgctagggcctcaagtggagaaaggggtgaactggtacctgcatcctgaacatgtgaccatattacttgtgaggctgatgccacaacttgataggcttgctcgtatcattgataactttgctacttcggtcttgatggtgatacaggacatgcttcgtgttttcattgttcgtgttgccttagaaaagattgagtgtgcagttgttcttctacgccctatatttatgtggttagatgataaagttgacaaaacttccctgtcagagagagacacctttaaggtccatcagttgcttcagtttactgtaaaattgtctgagcatcctactggcaaggcattgctttggaggatggggttcacaaggattcttagcaagttactacagaattgtagccgagcatctttcccgtatgataatcagacttttggaagggcgcactctaagaatgaccttatgctcaaatggaggatccctttgtttaaatctattgcatatatctttagtatcgacccatgtaataatgagaaggctgatgttgaagagtccctgaatgagaagtctgttcatgaatgctcttctgtcatgcatgacctcatgatgttctgccaggttttgcctgttggccgggaaatgttagcatgttcgttggcgttcaaggaattggtttattcttatacctgtagaagtgcagtaactttgatactttcacaaatacatacttccaacaaagatgttcttgaaaaagatgagagtgaccctaaccataactcaccatctctggatggttggaattgcttttcctcattgttcaagtgctggaagaagcttgtaaagtatgttggttctaatgaacgaacagattatttagtagaaactatttattccttgacactaggtgctatcaccctcagccagtatggtgaaaatcttgagggtctgttaatactgaggtatctatttgggctcccttctgatcctagtggttccttggaatcatctggtgagagtccaagtgagattgagttattcatgaagacatatgaagagaagatatgccagggcattgaaaattcagcgactgctgttggaaagactcttttacgcaagctactgaattcgatcaaattactacgctcaattcttgagaattctggtcaatccgcagatacagttcagatggttcttgaagaaggcactgactcactgtctgaaattgctcgctctgttgttatgacagctcatcttatgccatccctagccaatgtgtcagtaaatgatgaatctccttttctcttctctaatatgtggaaggttattgttgattcagaagagcctcttgactgccaagagggtgaatttgcaaagaggctagtttgggagttgcctgattcttctcttgatagacaactagcacctggccaatctgccaggaggaaattagcactgggagagagtgcaagtaggcgtgtaagggataatcaactgcctgaacccactgggcagttctcacgaggtttaaatacatccaatgcttcttcgggacatacacgcagagacactttccgtcagcggaaacctaacacaagtagaccaccttcaatgcatgtagatgactatgttgcaagagagagaaacatagatggtgcaagtagtgcgtcaaatattgtgaactctaccccacgaggaacacttagtggaaggcctccatccattcatgttgatgaatttatggcaaggcagagagaacgtcaaaatcatgcgccagccccaactggagatgcacctcaagctaaaagtcagacaacaagtttagatgacagtcttcgtactaagccagagaacttgcgtcaacccaagactgatctcgatgatgatcaagaaattgaaattgtctttgatgaggaatcaggttcggatgataaacttcctttccctcaaccagatgatagtctccaatctccacctgtcattattggggaaaattctcctggtcctgttattgacgagacagaaaatcaggagaatgaaagagttccctttttccagagggccacatctatcccgaaggacgatgaaaatcttggcattggcatttcttcccagactgcaatgctctcagaagctaacagttctttggaactgaaacattcagtttctagcccagggaagaattcttttcgtgatcatgctgaagagtctaattatgattctattggtgtatctgggagaccatctttacaagcagatcatcaacaattatctcgtagacatgaaaagagaagtccacgaaaattttctgagacttctctgtcaaatggattccatgggcgtgagcatagacattccaataaccatccacctctgccaccaatgccacctccaatttcatccgtgtccatgcaaaatactgattcagttaataggcagtcatcttcgttcagtgctcgagatcgaccaacacctaatccttctggttatcctacacaatcttttgactctagtatgcctagtgctttcacaggccttcagggtcaaactcaatacatgcttgcaggcgctggcagttcatcagcgaatgagttacccaatgtggaggccaagcttctatggaacacatttccagcaaataggatccctctggagaccttcagctcaggtttacctgctcggccgatgccaccccttacaccttattcagctgttgctactcagcacgctacgatgaactctggctctcctgcaaacctgtatagccagggcagtgttgtccagccttctccaactgcttctattattagtgattcaaatttggccatgaactccgcatctggcagcatgcttgcatcgaatctgctgccatcatttgcatcacaatttctgatgagcaggccttcaatgcctactccgttttttggcacgcctcttcaacaagttcaattctcatccggtcttccacaaaatatttctaaccctcagccacctgtctcaatacaaccacggccacccccacccccaccacccccgcagcagccacatccttctcagacactccaacaacttggtgctatccaattaccacaccaagatcagcagcactcatatccccatagtgctatcttgccacaagttacgttgcagtttcctaaccagctacccattcctcaagtacaattgtatcatcaaagccagcaggaatctgggcaaacactgaggcaagttggtgaacaatcacaacttcagaaccagggtatgcaagcagatagtttctctcaacagcagcaagactcagggatcaacttaaaccagttcttttcatctccagaagccattcagagtctacttagtgatcgtgagaagctctgccaacttttagagcagaatccaaaacttatgcaaatgctccaggatcgcattggccagttgtagtcgcactggaggtgctattgtgaaagtgaaatctgatgctggtcgatcgctaggttcctagagtatggtgttgttttgttttcggctatggctgtagctagatgaaagcaactgccagcttgctagtcgccgaaatgtattcctatgtacattatatgtaactttgttctgtaatgtgaaaatttgtaatgttagtgcgtatctaatttatagttttaagtttaccttagtggttagatcgtgtgacatgcgcagcgacgggaaaacgacgccgccttttgtctgcaaaggcatttgacgctaactacctgtagagttctgaatatcctgttgcactcttgtgtgtatctggttgctttaatgctcgaaaatgaatatcctaaggttttgcattcgta

SEQ ID NO: 48326 - DNA, 6599 bp, Zea Mays
agagcagataatcctatcctcacttgaggatgctatgtggagcatgcacaaatcaatccacagatattcatttaaggctattgtgacgaaccacttagttctgcgtggaacttatcgcagtctcacccttgtaatttatggcaataccgccgaagaccttggtcaattcaacatagaactaggtctggaccattctcttgctaatgttgttagctctccatcagagggaaagcttgaagaccttccaccagcgctacattcatccaagttgtcatttgaagaatcattatcatcattgaaaccatcgagttttcatgccactgatgtcgacttatcaattgaagcgaagaaagtcttgcatttggctctgaaaatgtaccaaatatctgatgtggagaatcttattcccaacctaagaagtgcagttctctcagctatttcaaaatatgtgactgctagtacaaatcatattctacacactttgagtcaagattcagcaaatgcgtttatcaacagtgattttgattctcaggaaattaacaaaattcttgctgaagctggtaaggagctctctgaaatttggaagaatgtccatgctgttactgagagtaatcttttcaatgataatggttttaccattggagtagatgaagacttgcccacgaccaagattctaattgagttgtttaaccattgtttcccatattacaagaaattatctttacttgatctacaatgtccttctcagagcaaatggttggttctgtctttgagtttggttctcctgctatgctcctcaaaggagagttgcttttattttgttgatactggtgggatggagcaaattattaatctgctttgctggaggacaccaaaatctgcagctaccacattgcttctcctaggtattgtggagcatgctactcggaatggttttggatgtgaagcttttctgggatggtggccacgagctgagcacaccagcatacctgttggcagcagcgatggttattgctctttactgaagcttctactggaaaaggaaaggcatgatattgcctctctagctacatatgttctacagcgcttgcggttttatgagatactatctaaatacgagtctgcggtagtcaaagtgatttccaatattcaggcagataaactttctactgatggagttccatttcttatttctgctagtgttgaacttggtgaaatgctgaaattgataattttctgtggccctattgaagatccatcaccagtggctactgctagtagaatatttaagtctgaacatttagaaggcttgctttcgtacaaagcaacaattgatcttataacttcgtccaaatacagttttttgcagtatgatacggatccatacttattgtctcttatccaggaaagaagtttttttcctctgtcagcggccttattgtcatcacctatattgcatttaccaaatggccctgccgccgaaattttgatggggatagcatcatcaattgaatctattatcctctccctcctcttttgtcgttcagggttatcgttcttgctcagtcagcctgaagcaactgagcttatacttctttctcttcaagatgcagaaaaaatgaataaatcagaatgcataactcttcgacaggcttttgttcttttatcaaaagggttcttttgccgcccaaaagaagtgggattgataacagaattacatcttaaagtgggaagtgctgccactaggatcctctcagttcctccgaattctgatgaacttttgtgggttctctgggaactttgtgccatttcaaggtctgattctggccgacaagcattattagctcttgggtactttcctgaggcaatatcagttctactgagatctctctcttcatataaggatcttgattcagtcatggctgagaatggagggtcgcctttgggtcttgcaattttccattcagctgcagaaattcttgaagttttggttgtggattcaactgcttcatcgcttgaatcatggattgggtttgctgttgatctgcacaaggctctgcattcatcttctcctggttcaaacaggaaagatgcaccaacaaggttgcttgaatggattgatgctggtgttgtttatcagagaaatgttgctctatgcagcacttctgtggtccaattaacaacagctttccgtatcttggcatttatttcggatgataagcctgtggcgtcatccctttttgaagaaggcgccataactgttatatatgttgtcctgatgaactgcaagtctatgcttgagcgtttatcaaatagttatgattaccttgttgatgaaggggctgaactgagttctaccacagaattacttctagatcgaactcatgagaaagctattgttgacctcatgattccctcacttgtcttgttgataaatctccttcatatattacgtgaaacgaaagaacaataccgcaacaaaaaacttcttagttctcttctgcagttgcaccgagaagttagcccgaggctagcagcttgtgctgcagatttgtccttcatgtttcctacttttgctataggttttggtgttgtttgtcatcttatcacgtcagcacttgcttgctggccgttgtataattgggcacctggtctgtttcattgccttcttgaaaataccgaggctactaatgcgtccgtaccattgggcccgaaggctgcttttagtctgctttgtctcctgggtgatctgttcccagatgaaggcatatggctatggaaagttgaacttccttctctcagtgccattagatctttgagtactggagcagtgctagggcctcaagtggagaaaggggtgaactggtacctgcatcctgaacatgtgaccatattacttgtgaggctgatgccacaacttgataggcttgctcgtatcattgataactttgctacttcggtcttgatggtgatacaggacatgcttcgtgttttcattgttcgtgttgccttagaaaagattgagtgtgcagttgttcttctacgccctatatttatgtggttagatgataaagttgacaaaacttccctgtcagagagagacacctttaaggtccatcagttgcttcagtttactgtaaaattgtctgagcatcctactggcaaggcattgctttggaggatggggttcacaaggattcttagcaagttactacagaattgtagccgagcatctttcccgtatgataatcagacttttggaagggcgcactctaagaatgaccttatgctcaaatggaggatccctttgtttaaatctattgcatatatctttagtatcgacccatgtaataatgagaaggctgatgttgaagagtccctgaatgagaagtctgttcatgaatgctcttctgtcatgcatgacctcatgatgttctgccaggttttgcctgttggccgggaaatgttagcatgttcgttggcgttcaaggaattggtttattcttatacctgtagaagtgcagtaactttgatactttcacaaatacatacttccaacaaagatgttcttgaaaaagatgagagtgaccctaaccataactcaccatctctggatggttggaattgcttttcctcattgttcaagtgctggaagaagcttgtaaagtatgttggttctaatgaacgaacagattatttagtagaaactatttattccttgacactaggtgctatcaccctcagccagtatggtgaaaatcttgagggtctgttaatactgaggtatctatttgggctcccttctgatcctagtggttccttggaatcatctggtgagagtccaagtgagattgagttattcatgaagacatatgaagagaagatatgccagggcattgaaaattcagcgactgctgttggaaagactcttttacgcaagatacagttcagatggttcttgaagaaggcactgactcactgtctgaaattgctcgctctgttgttatgacagctcatcttatgccatccctagccaatgtgtcagtaaatgatgaatctccttttctcttctctaatatgtggaaggttattgttgattcagaagagcctcttgactgccaagagggtgaatttgcaaagaggctagtttgggagttgcctgattcttctcttgatagacaactagcacctggccaatctgccaggaggaaattagcactgggagagagtgcaagtaggcgtgtaagggataatcaactgcctgaacccactgggcagttctcacgaggtttaaatacatccaatgcttcttcgggacatacacgcagagacactttccgtcagcggaaacctaacacaagtagaccaccttcaatgcatgtagatgactatgttgcaagagagagaaacatagatggtgcaagtagtgcgtcaaatattgtgaactctaccccacgaggaacacttagtggaaggcctccatccattcatgttgatgaatttatggcaaggcagagagaacgtcaaaatcatgcgccagccccaactggagatgcacctcaagctaaaagtcagacaacaagtttagatgacagtcttcgtactaagccagagaacttgcgtcaacccaagactgatctcgatgatgatcaagaaattgaaattgtctttgatgaggaatcaggttcggatgataaacttcctttccctcaaccagatgatagtctccaatctccacctgtcattattggggaaaattctcctggtcctgttattgacgagacagaaaatcaggagaatgaaagagttccctttttccagagggccacatctatcccgaaggacgatgaaaatcttggcattggcatttcttcccagactgcaatgctctcagaagctaacagttctttggaactgaaacattcagtttctagcccagggaagaattcttttcgtgatcatgctgaagagtctaattatgattctattggtgtatctgggagaccatctttacaagcagatcatcaacaattatctcgtagacatgaaaagagaagtccacgaaaattttctgagacttctctgtcaaatggattccatgggcgtgagcatagacattccaataaccatccacctctgccaccaatgccacctccaatttcatccgtgtccatgcaaaatactgattcagttaataggcagtcatcttcgttcagtgctcgagatcgaccaacacctaatccttctggttatcctacacaatcttttgactctagtatgcctagtgctttcacaggccttcagggtcaaactcaatacatgcttgcaggcgctggcagttcatcagcgaatgagttacccaatgtggaggccaagcttctatggaacacatttccagcaaataggatccctctggagaccttcagctcaggtttacctgctcggccgatgccaccccttacaccttattcagctgttgctactcagcacgctacgatgaactctggctctcctgcaaacctgtatagccagggcagtgttgtccagccttctccaactgcttctattattagtgattcaaatttggccatgaactccgcatctggcagcatgcttgcatcgaatctgctgccatcatttgcatcacaatttctgatgagcaggccttcaatgcctactccgttttttggcacgcctcttcaacaagttcaattctcatccggtcttccacaaaatatttctaaccctcagccacctgtctcaatacaaccacggccacccccacccccaccacccccgcagcagccacatccttctcagacactccaacaacttggtgctatccaattaccacaccaagatcagcagcactcatatccccatagtgctatcttgccacaagttacgttgcagtttcctaaccagctacccattcctcaagtacaattgtatcatcaaagccagcaggaatctgggcaaacactgaggcaagttggtgaacaatcacaacttcagaaccagggtatgcaagcagatagtttctctcaacagcagcaagactcagggatcaacttaaaccagttcttttcatctccagaagccattcagagtctacttagtgatcgtgagaagctctgccaacttttagagcagaatccaaaacttatgcaaatgctccaggatcgcattggccagttgtagtcgcactggaggtgctattgtgaaagtgaaatctgatgctggtcgatcgctaggttcctagagtatggtgttgttttgttttcggctatggctgtagctagatgaaagcaactgccagcttgctagtcgccgaaatgtattcctatgtacattatatgtaactttgttctgtaatgtgaaaatttgtaatgttagtgcgtatctaatttatagttttaagtttaccttagtggttagatcgtgtgacatgcgcagcgacgggaaaacgacgccgccttttgtctgcaaaggcatttgacgctaactacctgtagagttctgaatatcctgttgcactcttgtgtgtatctggttgctttaatgctcgaaaatgaatatcctaaggttttgcattcgta

SEQ ID NO: 48327 - DNA, 6121 bp, Zea Mays
agagcagataatcctatcctcacttgaggatgctatgtggagcatgcacaaatcaatccacagatattcatttaaggctattgtgacgaaccacttagttctgcgtggaacttatcgcagtctcacccttgtaatttatggcaataccgccgaagaccttggtcaattcaacatagaactaggtctggaccattctcttgctaatgttgttagctctccatcagagggaaagcttgaagaccttccaccagcgctacattcatccaagttgtcatttgaagaatcattatcatcattgaaaccatcgagttttcatgccactgatgtcgacttatcaattgaagcgaagaaagtcttgcatttggctctgaaaatgtaccaaatatctgatgtggagaatcttattcccaacctaagaagtgcagttctctcagctatttcaaaatatgtgactgctagtacaaatcatattctacacactttgagtcaagattcagcaaatgcgtttatcaacagtgattttgattctcaggaaattaacaaaattcttgctgaagctggtaaggagctctctgaaatttggaagaatgtccatgctgttactgagagtaatcttttcaatgataatggttttaccattggagtagatgaagacttgcccacgaccaagattctaattgagttgtttaaccattgtttcccatattacaagaaattatctttacttgatctacaatgtccttctcagagcaaatggttggttctgtctttgagtttggttctcctgctatgctcctcaaaggagagttgcttttattttgttgatactggtgggatggagcaaattattaatctgctttgctggaggacaccaaaatctgcagctaccacattgcttctcctaggtattgtggagcatgctactcggaatggttttggatgtgaagcttttctgggatggtggccacgagctgagcacaccagcatacctgttggcagcagcgatggttattgctctttactgaagcttctactggaaaaggaaaggcatgatattgcctctctagctacatatgttctacagcgcttgcggttttatgagatactatctaaatacgagtctgcggtagtcaaagtgatttccaatattcaggcagataaactttctactgatggagttccatttcttatttctgctagtgttgaacttggtgaaatgctgaaattgataattttctgtggccctattgaagatccatcaccagtggctactgctagtagaatatttaagtctgaacatttagaaggcttgctttcgtacaaagcaacaattgatcttataacttcgtccaaatacagttttttgcagtatgatacggatccatacttattgtctcttatccaggaaagaagtttttttcctctgtcagcggccttattgtcatcacctatattgcatttaccaaatggccctgccgccgaaattttgatggggatagcatcatcaattgaatctattatcctctccctcctcttttgtcgttcagggttatcgttcttgctcagtcagcctgaagcaactgagcttatacttctttctcttcaagatgcagaaaaaatgaataaatcagaatgcataactcttcgacaggcttttgttcttttatcaaaagggttcttttgccgcccaaaagaagtgggattgataacagaattacatcttaaagtgggaagtgctgccactaggatcctctcagttcctccgaattctgatgaacttttgtgggttctctgggaactttgtgccatttcaaggtctgattctggccgacaagcattattagctcttgggtactttcctgaggcaatatcagttctactgagatctctctcttcatataaggatcttgattcagtcatggctgagaatggagggtcgcctttgggtcttgcaattttccattcagctgcagaaattcttgaagttttggttgtggattcaactgcttcatcgcttgaatcatggattgggtttgctgttgatctgcacaaggctctgcattcatcttctcctggttcaaacaggaaagatgcaccaacaaggttgcttgaatggattgatgctggtgttgtttatcagagaaatgttgctctatgcagcacttctgtggtccaattaacaacagctttccgtatcttggcatttatttcggatgataagcctgtggcgtcatccctttttgaagaaggcgccataactgttatatatgttgtcctgatgaactgcaagtctatgcttgagcgtttatcaaatagttatgattaccttgttgatgaaggggctgaactgagttctaccacagaattacttctagatcgaactcatgagaaagctattgttgacctcatgattccctcacttgtcttgttgataaatctccttcatatattacgtgaaacgaaagaacaataccgcaacaaaaaacttcttagttctcttctgcagttgcaccgagaagttagcccgaggctagcagcttgtgctgcagatttgtccttcatgtttcctacttttgctataggttttggtgttgtttgtcatcttatcacgtcagcacttgcttgctggccgttgtataattgggcacctggtctgtttcattgccttcttgaaaataccgaggctactaatgcgtccgtaccattgggcccgaaggctgcttttagtctgctttgtctcctgggtgatctgttcccagatgaaggcatatggctatggaaagttgaacttccttctctcagtgccattagatctttgagtactggagcagtgctagggcctcaagtggagaaaggggtgaactggtacctgcatcctgaacatgtgaccatattacttgtgaggctgatgccacaacttgataggcttgctcgtatcattgataactttgctacttcggtcttgatggtgatacaggacatgcttcgtgttttcattgttcgtgttgccttagaaaagattgagtgtgcagttgttcttctacgccctatatttatgtggttagatgataaagttgacaaaacttccctgtcagagagagacacctttaaggtccatcagttgcttcagtttactgtaaaattgtctgagcatcctactggcaaggcattgctttggaggatggggttcacaaggattcttagcaagttactacagaattgtagccgagcatctttcccgtatgataatcagacttttggaagggcgcactctaagaatgaccttatgctcaaatggaggatccctttgtttaaatctattgcatatatctttagtatcgacccatgtaataatgagaaggctgatgttgaagagtccctgaatgagaagtctgttcatgaatgctcttctgtcatgcatgacctcatgatgttctgccaggttttgcctgttggccgggaaatgttagcatgttcgttggcgttcaaggaattggtttattcttatacctgtagaagtgcagtaactttgatactttcacaaatacatacttccaacaaagatgttcttgaaaaagatgagagtgaccctaaccataactcaccatctctggatggttggaattgcttttcctcattgttcaagtgctggaagaagcttgtaaagtatgttggttctaatgaacgaacagattatttagtagaaactatttattccttgacactaggtgctatcaccctcagccagtatggtgaaaatcttgagggtctgttaatactgaggtatctatttgggctcccttctgatcctagtggttccttggaatcatctggtgagagtccaagtgagattgagttattcatgaagacatatgaagagaagatatgccagggcattgaaaattcagcgactgctgttggaaagactcttttacgcaagctactgaattcgatcaaattactacgctcaattcttgagaattctggtcaatccgcagatacagttcagatggttcttgaagaaggcactgactcactgtctgaaattgctcgctctgttgttatgacagctcatcttatgccatccctagccaatgtgtcagtaaatgatgaatctccttttctcttctctaatatgtggaaggttattgttgattcagaagagcctcttgactgccaagagggtgaatttgcaaagaggctagtttgggagttgcctgattcttctcttgatagacaactagcacctggccaatctgccaggaggaaattagcactgggagagagtgcaagtaggcgtgtaagggataatcaactgcctgaacccactgggcagttctcacgaggtttaaatacatccaatgcttcttcgggacatacacgcagagacactttccgtcagcggaaacctaacacaagtagaccaccttcaatgcatgtagatgactatgttgcaagagagagaaacatagatggtgcaagtagtgcgtcaaatattgtgaactctaccccacgaggaacacttagtggaaggcctccatccattcatgttgatgaatttatggcaaggcagagagaacgtcaaaatcatgcgccagccccaactggagatgcacctcaagctaaaagtcagacaacaagtttagatgacagtcttcgtactaagccagagaacttgcgtcaacccaagactgatctcgatgatgatcaagaaattgaaattgtctttgatgaggaatcaggttcggatgataaacttcctttccctcaaccagatgatagtctccaatctccacctgtcattattggggaaaattctcctggtcctgttattgacgagacagaaaatcaggagaatgaaagagttccctttttccagagggccacatctatcccgaaggacgatgaaaatcttggcattggcatttcttcccagactgcaatgctctcagaagctaacagttctttggaactgaaacattcagtttctagcccagggaagaattcttttcgtgatcatgctgaagagtctaattatgattctattggtgtatctgggagaccatctttacaagcagatcatcaacaattatctcgtagacatgaaaagagaagtccacgaaaattttctgagacttctctgtcaaatggattccatgggcgtgagcatagacattccaataaccatccacctctgccaccaatgccacctccaatttcatccgtgtccatgcaaaatactgattcagttaataggcagtcatcttcgttcagtgctcgagatcgaccaacacctaatccttctggttatcctacacaatcttttgactctagtatgcctagtgctttcacaggccttcagggtcaaactcaatacatgcttgcaggcgctggcagttcatcagcgaatgagttacccaatgtggaggccaagcttctatggaacacatttccagcaaataggatccctctggagaccttcagctcaggaatctgggcaaacactgaggcaagttggtgaacaatcacaacttcagaaccagggtatgcaagcagatagtttctctcaacagcagcaagactcagggatcaacttaaaccagttcttttcatctccagaagccattcagagtctacttagtgatcgtgagaagctctgccaacttttagagcagaatccaaaacttatgcaaatgctccaggatcgcattggccagttgtagtcgcactggaggtgctattgtgaaagtgaaatctgatgctggtcgatcgctaggttcctagagtatggtgttgttttgttttcggctatggctgtagctagatgaaagcaactgccagcttgctagtcgccgaaatgtattcctatgtacattatatgtaactttgttctgtaatgtgaaaatttgtaatgttagtgcgtatctaatttatagttttaagtttaccttagtggttagatcgtgtgacatgcgcagcgacgggaaaacgacgccgccttttgtctgcaaaggcatttgacgctaactacctgtagagttctgaatatcctgttgcactcttgtgtgtatctggttgctttaatgctcgaaaatgaatatcctaaggttttgcattcgta

SEQ ID NO: 48328 - DNA, 2700 bp, Zea Mays
actgaattcgatcaaattactacgctcaattcttgagaattctggtcaatccgcagatacagttcagatggttcttgaagaaggcactgactcactgtctgaaattgctcgctctgttgttatgacagctcatcttatgccatccctagccaatgtgtcagtaaatgatgaatctccttttctcttctctaatatgtggaaggttattgttgattcagaagagcctcttgactgccaagagggtgaatttgcaaagaggctagtttgggagttgcctgattcttctcttgatagacaactagcacctggccaatctgccaggaggaaattagcactgggagagagtgcaagtaggcgtgtaagggataatcaactgcctgaacccactgggcagttctcacgaggtttaaatacatccaatgcttcttcgggacatacacgcagagacactttccgtcagcggaaacctaacacaagtagaccaccttcaatgcatgtagatgactatgttgcaagagagagaaacatagatggtgcaagtagtgcgtcaaatattgtgaactctaccccacgaggaacacttagtggaaggcctccatccattcatgttgatgaatttatggcaaggcagagagaacgtcaaaatcatgcgccagccccaactggagatgcacctcaagctaaaagtcagacaacaagtttagatgacagtcttcgtactaagccagagaacttgcgtcaacccaagactgatctcgatgatgatcaagaaattgaaattgtctttgatgaggaatcaggttcggatgataaacttcctttccctcaaccagatgatagtctccaatctccacctgtcattattggggaaaattctcctggtcctgttattgacgagacagaaaatcaggagaatgaaagagttccctttttccagagggccacatctatcccgaaggacgatgaaaatcttggcattggcatttcttcccagactgcaatgctctcagaagctaacagttctttggaactgaaacattcagtttctagcccagggaagaattcttttcgtgatcatgctgaagagtctaattatgattctattggtgtatctgggagaccatctttacaagcagatcatcaacaattatctcgtagacatgaaaagagaagtccacgaaaattttctgagacttctctgtcaaatggattccatgggcgtgagcatagacattccaataaccatccacctctgccaccaatgccacctccaatttcatccgtgtccatgcaaaatactgattcagttaataggcagtcatcttcgttcagtgctcgagatcgaccaacacctaatccttctggttatcctacacaatcttttgactctagtatgcctagtgctttcacaggccttcagggtcaaactcaatacatgcttgcaggcgctggcagttcatcagcgaatgagttacccaatgtggaggccaagcttctatggaacacatttccagcaaataggatccctctggagaccttcagctcaggtttacctgctcggccgatgccaccccttacaccttattcagctgttgctactcagcacgctacgatgaactctggctctcctgcaaacctgtatagccagggcagtgttgtccagccttctccaactgcttctattattagtgattcaaatttggccatgaactccgcatctggcagcatgcttgcatcgaatctgctgccatcatttgcatcacaatttctgatgagcaggccttcaatgcctactccgttttttggcacgcctcttcaacaagttcaattctcatccggtcttccacaaaatatttctaaccctcagccacctgtctcaatacaaccacggccacccccacccccaccacccccgcagcagccacatccttctcagacactccaacaacttggtgctatccaattaccacaccaagatcagcagcactcatatccccatagtgctatcttgccacaagttacgttgcagtttcctaaccagctacccattcctcaagtacaattgtatcatcaaagccagcaggaatctgggcaaacactgaggcaagttggtgaacaatcacaacttcagaaccagggtatgcaagcagatagtttctctcaacagcagcaagactcagggatcaacttaaaccagttcttttcatctccagaagccattcagagtctacttagtgatcgtgagaagctctgccaacttttagagcagaatccaaaacttatgcaaatgctccagttgtagtcgcactggaggtgctattgtgaaagtgaaatctgatgctggtcgatcgctaggttcctagagtatggtgttgttttgttttcggctatggctgtagctagatgaaagcaactgccagcttgctagtcgccgaaatgtattcctatgtacattatatgtaactttgttctgtaatgtgaaaatttgtaatgttagtgcgtatctaatttatagttttaagtttaccttagtggttagatcgtgtgacatgcgcagcgacgggaaaacgacgccgccttttgtctgcaaaggcatttgacgctaactacctgtagagttctgaatatcctgttgcactcttgtgtgtatctggttgctttaatgctcgaaaatgaatatcctaaggttttgcattcgta

SEQ ID NO: 48329 - DNA, 885 bp, Zea Mays
caagactgcaggacagcaggagcccagcccaggacttgttttctgctgggagtgacacaagctccagctcagtggaatgggcaatggtggagctgcttcgaagcccgggttcaatggctaaagcatgcgacgagcttgcaacagtcatcggcccaagaaaagacatcgaggaatctgatattgggcggctgccctacctccaagccgtggtgaaagagaccttcaggctgcatcctgctgccccgctgttgctaccgcggcgtgcccaggccgacgtgaagatgatgggctacgtgattcccgaaggttctcgagtgttcgtaaacgtatgggcgatgggtcgagacgaggagacgtggcctgagcctgagaagtttttgcccgagaggttcctggggaagaagacgcagcaggcggttgatctcaggggcggggacttcgatctcatcccgttcggtggaggacgccggatctgccctgggatgccgctggcgatcaggatggtgcatctgctgcttgcgtcgctcttgaatcagtttgcatggaggcttccggctgagctagagaggaatggagttgacatggctgagaatttcggcatcacgttgaccaaggccgtgcctctttgtgctatagccacagagatctgagtcggcaagctattctattctagttaactattctatggtcgatatatgtacatgtatccttatcaaatttcgaaataaacttagcaaataggttagaggatgtttggtttgaagaatcaatctattctacatggagtgatgcatcatgattcatgaatccattctacatatttggtgtaatgaactcgttactcgtattcactacacaaggaacagagtactttgccgtcggaac

SEQ ID NO: 48330 - DNA, 174 bp, Zea Mays
tcagcctgggccagcagcgaaactccctccccgccttccccacgcatgcaggcgggaggtggaaaaaccacctgggttgcatgcgcatgtacgagctcgtttgggttgcatgcgcatgtacgagctcgtttcgtgtcgtacaatcaatcaaacacagacacgtttcaaatcaac

SEQ ID NO: 48331 - DNA, 1648 bp, Zea Mays
ggccagtcaacggtacggtccttaatcaacacagacgggcgactctgtctgctcagcgcctggtctagatttattaaccatttccccatttttggtacccggcaggggtactctttttggatgatgaacccatctggagccctgatggactcatcatcataagtttgctttcacttttgaatcaaaagcccctaaccaatgttacacatcattcttttggaaaaacaaatgatttttgagtttctaagcaggactaagcagtaataattgtttttataaaacagggatttaggaattttcaaggaatggtaatgcatcaattgtttatcacacaactcctatcacctaatgcatcatatcaggtgataaagcatgtaaaacgcaaggaaggggcaaatgcaccggggcttgccttatcacaggaggagatctgagatcttctattacgataattagttagatggaatccaccactggatcagtagaactggaacatgctccttcacaaatcacttcttctgggtactctgctctaacacgcggaaagccgacgaagcgagagaaccacatggagaaagtatgccgagcacaacggcttgctgggtatcaggaacagcgagacaggcagctagcagctttacgatgacatcgcgagcacgacgaggtcggaagagaggttgtgggtcaaggaaatcgacgacgcgaaggagctgcaaggttgagcgtggctgacgaggagacaacaaccatgagtacgttgcagctcacaacatggatggggaactgcggcaagcacaacaaacaaggctgcacgacgagcgtcggcacggcgtggaagctgcaggacgacctcgaccctcacctcaccagcgaggtcggcggacgacaaagcgtggagttggaagacggtaccaggccggcgagctggaacgtgtgcgatggagcagcgacagatggtcggtcgagcgcgtgaggaagcagctcaaggcacggaagagcagcagcagcgcccaagccagcgtgagaagggagctcgcgtccgggctcagtatctgggagttgagcacaaggtacaaggcgaaggcgagtgctatgcgctatgcgtgagagctcaattggagcacgccgagagagagagagacgtgggagatttctagagagtgtacgtgtcacgtgtgctccagataaaagagagaacgttgagagatgcagctggaatggataggaaggagcgcttgaattatctagacgagagaaatgatgtggagataaggaagagaataaagaatttcagagagacgtttcagagagtggacgtctgcaccaaattgtatgccccaaactgatccaagtttcagctatcagcacctgaatcccacacttcttcgacagaacccccatcttaatccccttaaatctcacgattccaaatgataacagtgaactgaccgtaacataaattgctctctcaacatccttctacatctttgcttcagaattcctagtccaaaaccccacggatttggtactatagacctccaaaattgagcacaaattcacaaaaactcagtttgcagctaactgaaccagagttcagaccatacccaactgacggaggatgtttaggtgcagtttactctcagttttg

SEQ ID NO: 48332 - DNA, 822 bp, Zea Mays
gaggtgcgagcgcgacacgcgctgacctactcgacggcctccacctccgtcttgaggcgaagcgtagtgcgaaggaccaactctttcgaagggaaattatatctcaggtgcttaggagtctgccatggccagcgagaataaggtatttaggttcgaggaagtcgccaagcacaacgtcaccaaggactgctggatcatcatcgccggcaaggtgtatgatgtcactccttttatggatgagcatcctggtggagatgaggttttgctagctgtaactgggaaagatgctacagctgattttgaagatattggccacagtgattccgcaagggacatgatggagaagtaccacatcgggcagatagatgcttcaacaatcccagcaaagcgaacttatgtgcacccccagcaagcgcccagccactcagacaagaataatgatctcctcatcaagatcctgcagttccttgtgcccattatgatcctgggccttgcatttggtatacgtcagtacaccaaatcagagtagtactgttcttgaagacttgcctttggagtctgttttatggtaatggtttggatgagaacagttcagtaattgcttagtgtatttgtcaggtggatgttatctcattggtcatatactatgtattatggacatccatgtgttgccgaaatgtgctcttttccccatgaaccgaggcatacaagatgaattctgactcttccatgaaccgagtagttgataccagattattgcagtaatgtttgttttgtgtatgcgcacttggatgtcgcaataaacagaaccaaaccataaac

SEQ ID NO: 48333 - DNA, 864 bp, Zea Mays
gctcaaatgacgccatgccggcgccaccgagggcgaaagctgtccagatcgtgtgattttgcatcccatccgcgagcgcgacacgcgctgacctactcgacggcctccacctccgtcttgaggcgaagcgtagggaaattatatctcaggtgcttaggagtctgccatggccagcgagaataaggtatttaggttcgaggaagtcgccaagcacaacgtcaccaaggactgctggatcatcatcgccggcaaggtgtatgatgtcactccttttatggatgagcatcctggtggagatgaggttttgctagctgtaactgggaaagatgctacagctgattttgaagatattggccacagtgattccgcaagggacatgatggagaagtaccacatcgggcagatagatgcttcaacaatcccagcaaagcgaacttatgtgcacccccagcaagcgcccagccactcagacaagaataatgatctcctcatcaagatcctgcagttccttgtgcccattatgatcctgggccttgcatttggtatacgtcagtacaccaaatcagagtagtactgttcttgaagacttgcctttggagtctgttttatggtaatggtttggatgagaacagttcagtaattgcttagtgtatttgtcaggtggatgttatctcattggtcatatactatgtattatggacatccatgtgttgccgaaatgtgctcttttccccatgaaccgaggcatacaagatgaattctgactcttccatgaaccgagtagttgataccagattattgcagtaatgtttgttttgtgtatgcgcacttggatgtcgcaataaacagaaccaaaccataaac

SEQ ID NO: 48334 - DNA, 669 bp, Zea Mays
ggaaagcttacgacgctacctctcttcgatgataaggttttgtggagaataattgatggtgtatgatgtcactccttttatggatgagcatcctggtggagatgaggttttgctagctgtaactgggaaagatgctacagctgattttgaagatattggccacagtgattccgcaagggacatgatggagaagtaccacatcgggcagatagatgcttcaacaatcccagcaaagcgaacttatgtgcacccccagcaagcgcccagccactcagacaagaataatgatctcctcatcaagatcctgcagttccttgtgcccattatgatcctgggccttgcatttggtatacgtcagtacaccaaatcagagtagtactgttcttgaagacttgcctttggagtctgttttatggtaatggtttggatgagaacagttcagtaattgcttagtgtatttgtcaggtggatgttatctcattggtcatatactatgtattatggacatccatgtgttgccgaaatgtgctcttttccccatgaaccgaggcatacaagatgaattctgactcttccatgaaccgagtagttgataccagattattgcagtaatgtttgttttgtgtatgcgcacttggatgtcgcaataaacagaaccaaaccataaac

SEQ ID NO: 48335 - DNA, 681 bp, Zea Mays
atactaccaaagatgttttggattgtcaaatatcagttgtagttattcatgagtgggcgactcaattcaggtgtatgatgtcactccttttatggatgagcatcctggtggagatgaggttttgctagctgtaactgggaaagatgctacagctgattttgaagatattggccacagtgattccgcaagggacatgatggagaagtaccacatcgggcagatagatgcttcaacaatcccagcaaagcgaacttatgtgcacccccagcaagcgcccagccactcagacaagaataatgatctcctcatcaagatcctgcagttccttgtgcccattatgatcctgggccttgcatttggtatacgtcagtacaccaaatcagagtagtactgttcttgaagacttgcctttggagtctgttttatggtaatggtttggatgagaacagttcagtaattgcttagtgtatttgtcaggtggatgttatctcattggtcatatactatgtattatggacatccatgtgttgccgaaatgtgctcttttccccatgaaccgaggcatacaagatgaattctgactcttccatgaaccgagtagttgataccagattattgcagtaatgtttgttttgtgtatgcgcacttggatgtcgcaataaacagaaccaaaccataaac

SEQ ID NO: 48336 - DNA, 702 bp, Zea Mays
caccttttagatctactccatgtccaatgctcagttgggttgatctgatcgaggaccagcaactgcctttagatcaactccatgttactcagtgtatgatgtcactccttttatggatgagcatcctggtggagatgaggttttgctagctgtaactgggaaagatgctacagctgattttgaagatattggccacagtgattccgcaagggacatgatggagaagtaccacatcgggcagatagatgcttcaacaatcccagcaaagcgaacttatgtgcacccccagcaagcgcccagccactcagacaagaataatgatctcctcatcaagatcctgcagttccttgtgcccattatgatcctgggccttgcatttggtatacgtcagtacaccaaatcagagtagtactgttcttgaagacttgcctttggagtctgttttatggtaatggtttggatgagaacagttcagtaattgcttagtgtatttgtcaggtggatgttatctcattggtcatatactatgtattatggacatccatgtgttgccgaaatgtgctcttttccccatgaaccgaggcatacaagatgaattctgactcttccatgaaccgagtagttgataccagattattgcagtaatgtttgttttgtgtatgcgcacttggatgtcgcaataaacagaaccaaaccataaac

SEQ ID NO: 48337 - DNA, 2582 bp, Zea Mays
cagccttccgtggccgcggtgcagtgccgctcgatctcacacccgctcgacgtggtggcccgccgttcagtcaccattcgtccgctgcagccacgaccccataaaagcccaccaggccatcacaagtcagagccactttcgcaagcccccttccgaccttgcccctgcggtctcccgagtcccgaagcatccccttccaaaaccctcgccgcgccgcagccacccttgcttccgcacgctatcgcccgggaccagccatctatggcggcgtccctgctcctccgcgccgtgcgccgaagggagcttgcgtcccctctcggatccctgggtgccagcatacagtcaacatgtgttgccaacgtttgctcaaaatggggaagttttgcaagacctttcagtgcaaaagctgctggaaatgaggttattgggattgatttggggacaactaactcatgtgtttcggttatggagggaaagaacccaaaagttattgagaatgctgaaggtgcgagaacaacaccatctgttgtcgcatttactcagaagggtgaaagacttgttggaactccagccaagcgccaggcagtaaccaacccccagaatactttctttggaacaaagaggttaattgggcgacgcttcgatgatccacagacacagaaagagatgaagatggtgccatacacaatcgtgaaggctccaaatggtgatgcttgggttcaaacaacagatggcaagcagtactcaccaagtcaggtcggtgcatttgtgctgaccaagatgaaggagacagctgaatcttaccttggcaagtctatctcaaaggcagtgattactgttccagcttatttcaatgatgctcagcgtcaggccacaaaggatgcaggccgcattgctggccttgatgttgaaaggatcatcaatgaacctacagcagccgctctgtcttatggaatgaacaacaaggaaggcttgatagcggtatttgatcttggaggaggaacttttgatatctctattctggagatctcaaatggagtttttgaggtcaaagcaacaaatggtgatactttcttgggtggtgaagattttgataatacactattggagttcttggtgagtgatttcaagagaactgagggcatagatctgtcgaaagatagattggccctgcaaaggcttcgtgaagctgctgagaaggcaaaggttgaactttcgtcgacttctcagacagaaatcaatctgccattcataacagctgatgcttcaggggcaaaacatttgaacatcacactgacaaggtcaaaatttgaatctcttgtacacaatctgattgagagaactagagatccatgcaagaactgtttgaaggatgccggaatatctactaaagaggtggatgaagtacttcttgttggtggaatgactagggttccaaaggtgcaggaggtagtctctgaaatctttgggaagaacccaagcaaaggagtcaatccagatgaagctgtggccatgggtgctgcacttcagggtggcattctccgtggagatgttaaggagcttcttcttcttgatgttactcccctgtcactaggtattgagacgctcggtggtatcttcaccagattgatcaacagaaacactacaatccccacaaagaaaagtcaggtgttctcaactgctgctgacaaccagacccaggtaggtatccgggtgttgcaagccaaagataaggctaccgggaaggagcagaacatcaccatacgatcctcgggtgggctgtcggaggctgacatccagaagatggtgcaagaagctgagctgcatgcccagaaggaccaggagcggaaagccctcattgacatcaggaacaatgccgacaccaccatctacagcatcgagaagagtcttggagagtacagggacaagatcccggcagaggttgcatctgagatcgaggctgccatcgctgacctccgccaggagatggcctcggatgacatcgagaagatcaaggccaagcttgaggctgccaacaaggctgtctcgaagattggacagcacatgtctggtggtggctctggcggctcgcagtcaggatctggacctcagggtggcggcgaccaggcgccggaggcagagtatgaggaggttaagaagtgaggctgcgggagttcaagggaattgtagcggcttgtttagaagtagctcgttttttttgggaacgcagatagtcagatgtctcagatgaggtgtaacctgtgttgcaataatctatgaacttacccctcttgttttctcctgcagtgaaacaggtcacacgacattgtcatggcttttattgcatatgaagccttgttctgcccgatgtactcgcacagcgaaaaccatcggcgagttctgttaatgagttgaagtatatttgttcctgtgttttgactattggtgatattaagggtggcaacaactgtgactttggcaatgttctgagaacgctaggtcagatcaaagagattgtatggtacttttgtgaagagccgtctcttatattttttaagtatttttttagttagcttcacaga

SEQ ID NO: 48338 - DNA, 2743 bp, Zea Mays
agccttccgtggccgcggtgcagtgccgctcgatctcacacccgctcgacgtggtggcccgccgttcagtcaccattcgtccgctgcagccacgaccccataaaagcccaccaggccatcacaagtcagagccactttcgcaagcccccttccgaccttgcccctgcggtctcccgagtcccgaagcatccccttccaaaaccctcgccgcgccgcagccacccttgcttccgcacgctatcgcccgggaccagccatctatggcggcgtccctgctcctccgcgccgtgcgccgaagggagcttgcgtcccctctcggatccggcctaagtcaaatgtacttgtttcagctgggtgccagcatacagtcaacatgtgttgccaacgtttgctcaaaatggggaagttttgcaagacctttcagtgcaaaagctgctggaaatgaggttattgggattgatttggggacaactaactcatgtgtttcggttatggagggaaagaacccaaaagttattgagaatgctgaaggtgcgagaacaacaccatctgttgtcgcatttactcagaagggtgaaagacttgttggaactccagccaagcgccaggcagtaaccaacccccagaatactttctttggaacaaagaggttaattgggcgacgcttcgatgatccacagacacagaaagagatgaagatggtgccatacacaatcgtgaaggctccaaatggtgatgcttgggttcaaacaacagatggcaagcagtactcaccaagtcaggtcggtgcatttgtgctgaccaagatgaaggagacagctgaatcttaccttggcaagtctatctcaaaggcagtgattactgttccagcttatttcaatgatgctcagcgtcaggccacaaaggatgcaggccgcattgctggccttgatgttgaaaggatcatcaatgaacctacagcagccgctctgtcttatggaatgaacaacaaggaaggcttgatagcggtatttgatcttggaggaggaacttttgatatctctattctggagatctcaaatggagtttttgaggtcaaagcaacaaatggtgatactttcttgggtggtgaagattttgataatacactattggagttcttggtgagtgatttcaagagaactgagggcatagatctgtcgaaagatagattggccctgcaaaggcttcgtgaagctgctgagaaggcaaaggttgaactttcgtcgacttctcagacagaaatcaatctgccattcataacagctgatgcttcaggggcaaaacatttgaacatcacactgacaaggtcaaaatttgaatctcttgtacacaatctgattgagagaactagagatccatgcaagaactgtttgaaggatgccggaatatctactaaagaggtggatgaagtacttcttgttggtggaatgactagggttccaaaggtgcaggaggtagtctctgaaatctttgggaagaacccaagcaaaggagtcaatccagatgaagctgtggccatgggtgctgcacttcagggtggcattctccgtggagatgttaaggagcttcttcttcttgatgttactcccctgtcactaggtattgagacgctcggtggtatcttcaccagattgatcaacagaaacactacaatccccacaaagaaaagtcaggtgttctcaactgctgctgacaaccagacccaggtaggtatccgggtgttgcaaggtgagcgtgaaatggctacagacaacaagctccttggtgaatttgacctcgtgggcattccacctgccccaagaggcttgcctcagattgaggttacattcgacatcgatgccaatggaatcgtgactgtctcagccaaagataaggctaccgggaaggagcagaacatcaccatacgatcctcgggtgggctgtcggaggctgacatccagaagatggtgcaagaagctgagctgcatgcccagaaggaccaggagcggaaagccctcattgacatcaggaacaatgccgacaccaccatctacagcatcgagaagagtcttggagagtacagggacaagatcccggcagaggttgcatctgagatcgaggctgccatcgctgacctccgccaggagatggcctcggatgacatcgagaagatcaaggccaagcttgaggctgccaacaaggctgtctcgaagattggacagcacatgtctggtggtggctctggcggctcgcagtcaggatctggacctcagggtggcggcgaccaggcgccggaggcagagtatgaggaggttaagaagtgaggctgcgggagttcaagggaattgtagcggcttgtttagaagtagctcgttttttttgggaacgcagatagtcagatgtctcagatgaggtgtaacctgtgttgcaataatctatgaacttacccctcttgttttctcctgcagtgaaacaggtcacacgacattgtcatggcttttattgcatatgaagccttgttctgcccgatgtactcgcacagcgaaaaccatcggcgagttctgttaatgagttgaagtatatttgttcctgtgttttgactattggtgatattaagggtggcaacaactgtgactttggcaatgttctgagaacgctaggtcagatcaaagagattgtatggtacttttgtgaagagccgtctcttatattttttaagtatttttttagttagcttcacaga

SEQ ID NO: 48339 - DNA, 2469 bp, Zea Mays
gttatctcaaattttcaatactggtgtggagttaaccatgaataaattgtagttgtgctatggcctctcagttcagctgggtgccagcatacagtcaacatgtgttgccaacgtttgctcaaaatggggaagttttgcaagacctttcagtgcaaaagctgctggaaatgaggttattgggattgatttggggacaactaactcatgtgtttcggttatggagggaaagaacccaaaagttattgagaatgctgaaggtgcgagaacaacaccatctgttgtcgcatttactcagaagggtgaaagacttgttggaactccagccaagcgccaggcagtaaccaacccccagaatactttctttggaacaaagaggttaattgggcgacgcttcgatgatccacagacacagaaagagatgaagatggtgccatacacaatcgtgaaggctccaaatggtgatgcttgggttcaaacaacagatggcaagcagtactcaccaagtcaggtcggtgcatttgtgctgaccaagatgaaggagacagctgaatcttaccttggcaagtctatctcaaaggcagtgattactgttccagcttatttcaatgatgctcagcgtcaggccacaaaggatgcaggccgcattgctggccttgatgttgaaaggatcatcaatgaacctacagcagccgctctgtcttatggaatgaacaacaaggaaggcttgatagcggtatttgatcttggaggaggaacttttgatatctctattctggagatctcaaatggagtttttgaggtcaaagcaacaaatggtgatactttcttgggtggtgaagattttgataatacactattggagttcttggtgagtgatttcaagagaactgagggcatagatctgtcgaaagatagattggccctgcaaaggcttcgtgaagctgctgagaaggcaaaggttgaactttcgtcgacttctcagacagaaatcaatctgccattcataacagctgatgcttcaggggcaaaacatttgaacatcacactgacaaggtcaaaatttgaatctcttgtacacaatctgattgagagaactagagatccatgcaagaactgtttgaaggatgccggaatatctactaaagaggtggatgaagtacttcttgttggtggaatgactagggttccaaaggtgcaggaggtagtctctgaaatctttgggaagaacccaagcaaaggagtcaatccagatgaagctgtggccatgggtgctgcacttcagggtggcattctccgtggagatgttaaggagcttcttcttcttgatgttactcccctgtcactaggtattgagacgctcggtggtatcttcaccagattgatcaacagaaacactacaatccccacaaagaaaagtcaggtgttctcaactgctgctgacaaccagacccaggtaggtatccgggtgttgcaaggtgagcgtgaaatggctacagacaacaagctccttggtgaatttgacctcgtgggcattccacctgccccaagaggcttgcctcagattgaggttacattcgacatcgatgccaatggaatcgtgactgtctcagccaaagataaggctaccgggaaggagcagaacatcaccatacgatcctcgggtgggctgtcggaggctgacatccagaagatggtgcaagaagctgagctgcatgcccagaaggaccaggagcggaaagccctcattgacatcaggaacaatgccgacaccaccatctacagcatcgagaagagtcttggagagtacagggacaagatcccggcagaggttgcatctgagatcgaggctgccatcgctgacctccgccaggagatggcctcggatgacatcgagaagatcaaggccaagcttgaggctgccaacaaggctgtctcgaagattggacagcacatgtctggtggtggctctggcggctcgcagtcaggatctggacctcagggtggcggcgaccaggcgccggaggcagagtatgaggaggttaagaagtgaggctgcgggagttcaagggaattgtagcggcttgtttagaagtagctcgttttttttgggaacgcagatagtcagatgtctcagatgaggtgtaacctgtgttgcaataatctatgaacttacccctcttgttttctcctgcagtgaaacaggtcacacgacattgtcatggcttttattgcatatgaagccttgttctgcccgatgtactcgcacagcgaaaaccatcggcgagttctgttaatgagttgaagtatatttgttcctgtgttttgactattggtgatattaagggtggcaacaactgtgactttggcaatgttctgagaacgctaggtcagatcaaagagattgtatggtacttttgtgaagagccgtctcttatattttttaagtatttttttagttagcttcacaga

SEQ ID NO: 48340 - DNA, 2323 bp, Zea Mays
ctcaaattttcaatactggtgtggagttaaccatgaataaattgtagttgtgctatggcctctcagtcagctgggtgccagcatacagtcaacatgtgttgccaacgtttgctcaaaatggggaagttttgcaagacctttcagtgcaaaagctgctggaaatgaggttattgggattgatttggggacaactaactcatgtgtttcggttatggagggaaagaacccaaaagttattgagaatgctgaaggtgcgagaacaacaccatctgttgtcgcatttactcagaagggtgaaagacttgttggaactccagccaagcgccaggcagtaaccaacccccagaatactttctttggaacaaagaggttaattgggcgacgcttcgatgatccacagacacagaaagagatgaagatggtgccatacacaatcgtgaaggctccaaatggtgatgcttgggttcaaacaacagatggcaagcagtactcaccaagtcaggtcggtgcatttgtgctgaccaagatgaaggagacagctgaatcttaccttggcaagtctatctcaaaggcagtgattactgttccagcttatttcaatgatgctcagcgtcaggccacaaaggatgcaggccgcattgctggccttgatgttgaaaggatcatcaatgaacctacagcagccgctctgtcttatggaatgaacaacaaggaaggcttgatagcggtatttgatcttggaggaggaacttttgatatctctattctggagatctcaaatggagtttttgaggtcaaagcaacaaatggtgatactttcttgggtggtgaagattttgataatacactattggagttcttggtgagtgatttcaagagaactgagggcatagatctgtcgaaagatagattggccctgcaaaggcttcgtgaagctgctgagaaggcaaagagatccatgcaagaactgtttgaaggatgccggaatatctactaaagaggtggatgaagtacttcttgttggtggaatgactagggttccaaaggtgcaggaggtagtctctgaaatctttgggaagaacccaagcaaaggagtcaatccagatgaagctgtggccatgggtgctgcacttcagggtggcattctccgtggagatgttaaggagcttcttcttcttgatgttactcccctgtcactaggtattgagacgctcggtggtatcttcaccagattgatcaacagaaacactacaatccccacaaagaaaagtcaggtgttctcaactgctgctgacaaccagacccaggtaggtatccgggtgttgcaaggtgagcgtgaaatggctacagacaacaagctccttggtgaatttgacctcgtgggcattccacctgccccaagaggcttgcctcagattgaggttacattcgacatcgatgccaatggaatcgtgactgtctcagccaaagataaggctaccgggaaggagcagaacatcaccatacgatcctcgggtgggctgtcggaggctgacatccagaagatggtgcaagaagctgagctgcatgcccagaaggaccaggagcggaaagccctcattgacatcaggaacaatgccgacaccaccatctacagcatcgagaagagtcttggagagtacagggacaagatcccggcagaggttgcatctgagatcgaggctgccatcgctgacctccgccaggagatggcctcggatgacatcgagaagatcaaggccaagcttgaggctgccaacaaggctgtctcgaagattggacagcacatgtctggtggtggctctggcggctcgcagtcaggatctggacctcagggtggcggcgaccaggcgccggaggcagagtatgaggaggttaagaagtgaggctgcgggagttcaagggaattgtagcggcttgtttagaagtagctcgttttttttgggaacgcagatagtcagatgtctcagatgaggtgtaacctgtgttgcaataatctatgaacttacccctcttgttttctcctgcagtgaaacaggtcacacgacattgtcatggcttttattgcatatgaagccttgttctgcccgatgtactcgcacagcgaaaaccatcggcgagttctgttaatgagttgaagtatatttgttcctgtgttttgactattggtgatattaagggtggcaacaactgtgactttggcaatgttctgagaacgctaggtcagatcaaagagattgtatggtacttttgtgaagagccgtctcttatattttttaagtatttttttagttagcttcacaga

SEQ ID NO: 48341 - DNA, 5107 bp, Zea Mays
aaataagattagccgattaaattgacaaaaaagtctaataaattataaatcgggaccgtggaaatattaattaactgcaaagtaaaaatagagagtaatcggttttgtacggggcaagaagcaaatgagatttcaaatggaacggcgtgatgttttacaactgcaaggagaggcagccacccggccccacgtccatccctaaaacatcgccacgttccgcctgcgccaccccccaatgtccgtggccaccggaggcggcggcgtccaccaccaccgagtccaatgcccaagtcccactacgccgcttccccacccccgcacccgccgccgctcctcccgctcgcgctcgtcccgccgcggcagtgcccgctcgtcgcggccctgctggcgctgctctcggtgctgcttgccaccgcgctctggctcctcctcgtgctctccccgtcccagggggctacccccgccgcctccgagcgctcggtgctgccggatgcgggagcggccgcggccgcgggccccggcgccgcctcgcccctctcgctcggccacatcgtcttcggcatcgcggggtcggcgcatctctggccgcgccgccgcgagtacgtccgcctgtggtgggaccccgccgcgatgcgcggcaacgtctggctcgacgcgggcgcgcccgccgcgccggggcctagcgccccctgggagggctccctcccgccgatccgggtgtccgaggacacctcgcgcttcaggtacaccaaccccacgggccacccgtcggggctccggatcgcgcgcatcgccgccgaggccgtccggctcgtcggcagaggggcgggcgcgcgctggctcgtgctcgtcgacgacgacaccgtgctgtgcgcggacaacctcgtcgccgtgctcagcaagtacgactggacggagatggtgtacgtcggggcgccgtccgagagccactccgccaacacctacttcagccatagcatggctttcggaggtggcggcgtcgcgctcagctttccgctcgccgctgcactcgcgcagacgctcgacgtgtgcatcgagaggtaccccaagctgtatggaagcgacgaccgcctccatgcctgcatcacggagctcggcgttcccctatcccgcgaatacggattccaccagtgggatatcagaggcaattctcatgggttattggcatctcatccaattgctcctttcatcagtatccaccatgtggagcttgtggaccccatataccctggattgaactctcttgagagtctggagctgtttacaaaggctatgaaaatggaacccatgagcttcctgcagcgttcaatttgttacgatcaaagccaaaagcttacatttgctatctcgttgggctatgttgttgaagtatatcccaatgttcttcttccgcgtgatttggagcgatcacaacgtacttacgttgcttataataggatgagtcagagaaatgaatttgattttgacactagagatgtccagaaatctttgtgcaagaagccgatcttatttttcttgaaggatgtctggaaggatggaaacataactaggggatcttatgcacgatcaagtgctagggatgacctcaaaagaaaggtgttctgcttccggtcaccccctttacctgacatagatgagatccaagtttcctcgtctccattaagcaagcgctggcatctggcaccaagaaggttgtgcagtgcacttaaaggatctattgatggtactctgtttatgtttgttcagcaatgtggacgtgggacttttggttcagcttctgattccttatgacatgggaaatagagatgtatattttctgttcagatgatacctggaagatgtagttaccaccctacattctttgagtcaagtataattggggctctttttctgcctcaaacgcttgacagtagccaactgtttgttataattggtagttactgaagggcatctactaccaagaacagattaagtgagccatcattcgtgggctaatatttttaacaacttcaagttcaacatgaataaaatgatgcagtgatgagagttgtctcattgagtcactaggtcgcatatttgatgtagcctctccagatttgcaggggaaggcttgcctaggtttatccttttcctagacctcactcatgtgggagcctctggcactgggtctgccccaagttcaacattaatgagatatggaaatgatatgtaataaagttaacaactatttcatttttacttgggaaaagccttgtgtcaggcaggcaccctagttactggagttccaagctaatttcatgtgcacattgttaatttaatgaccatgattgtccttaatgttctattttcataccttactttcagaattatacacacttcttacacagtttccttctgttgcctaattcaacatgatacaaaatgaatgactctcatattagttatggcaacatgtgcctttaatagagtgccataataactttttttactattttgctgattttctgaattctgaaagatggtgttgttatttttaatgattctgcacaaagacattctgtttgtacaatgttaccataacaatccttgaacttgactcttgctcttggtatgagcaggatatgccttcgtttccaattttctttgactttcctttgccagtgatacttatctacttgttctattgaaggaagcaaaggtctttgggggtttacacaaattaattaatccttttagttagaaggataaaacttctttgttttaaaccatagagtcagttcaagcctcatttttcctttgcacgaaatatgattctgaagggatatatagatgtgcatgttgctaaaaaggtggaaggtaacataaaataacagtatgcttgctgattggagagaagggattcattttgttcacagaataattgtttggcttctataattcctctggtgtcttaaactaggttaatgtattgtattgttgtagggttataggaggctgagtcactgtgagagcaactccatcatggccccaacttgagccctcatagctaaatataggtgcccagaccaaaaacacaactccagcatggcccttactagagccctcaaatttgggtggccacccaaatcctccctctagcactcaaacgatggttcaaggcttgaagccaacaccttctcaacccgccccatcatcctcgttgaaggcctcttcgatctcctcgtcggccaactcaacgcccggcgcaacggcaatgaggtaggcgatagctggcgtggaggagtggcacgacgcgagttgatgaagagaggagcggcacgggtgggtgggggacgtggaggagctgtgtggctcctggagtcgcctggtacccgtcgcgatggtagagacttagagataggtgcgagtggtaggcggtagctggcgcagcgtgggtggatgaggagaggagcgaagcggagcgaatggatgaggagcaacacggctcctcctggtagtgtctggtctcctccctcgatggaagtgtacctcctgtggtggttggtaggtgactctgcctttgctcgcataaatactgatgagactgaggatgggaagaacaaagaatgacaagcgagccctttgtgtcagtgttcatcaaatattatttaagccgatataaaaacttaaactgggggggggggggtaagacaactcctaggtattgcattaaaaagatggttttctcacgcaggtcgagaaaacttccaaacctcagccccactcatacacaacaccacaacctatgtgagaacgaccactagtaggcccaggccttagacatgtgatttggcgtgagataggtggtggaacttttttaaccctagctgagttgaatccaggacatgagtgctactcaagccaccgtctcaacttgaggccttttcgctgctggaatagatgtaaaaaaccaaatcctaaattatatttttgtgtttttggccaataaggcagctttcttgtattggtccatttggggcctaactcttccttcttaatataatgatgcgcagctcttctacccgttcgagaaaaaaaattatgtgacagttccctcaaatcaaaagtaggggccttgatttgagttttttttttgctggagttgctctgatagtaaatgattgctttgcatgaatctagtcgaatccatgcgtttgtcctccaaagctgatcacgggtctagttaacagtcatattgatgatcaaaagtttcatgggcagaatttggggaaaatgtttatattatttcaatcatttggtcataaattttactgttagtggaaaaatgatttattaacctgaaagttctgcactgaagttcatcttcttctttagtgcatgtccccaatattgaatagcatgtacaaggttccttttcttaagctcaacacctataagtttaaacctatagaagcagctagagaaaaaaaacataaaagcccaatcatggagatagtttcttggttagaagattgctagtcaattttctgttatctgcaggtactccctccgttttttatttgtcgtgttttagttcaaaaatgaactagtgagcgataaatattgagatagtatattttttcaaataccgtgtttgctggaaagtgttcacaatcacattagtgcatggaatctgaaccataaaaggaccactttagaaatcttatatgcctgctagatcaagatttgttttcctattgtattttgggatttccaaagacttccatcttgatcaaattataatttgtaaaagaaataaatatttttttttaaaaaaatgtccatcattggttgaaaaaattcaaaggaaaagccaaaatgctgcattaacattagttacgtaactgagatcaagtatttggaaacattttcttctgtaacaagatcttccaagatttgtgtgcatgtgttggtgctaactgtttcatttaaatgcctttttttttcctttcatgtttccacgtaatgtttgccatagtctgtgtttcatgctgtgcttgcatacatgcaaatctgttagcgaagttgtgtggtgtcttgatttaag

SEQ ID NO: 48342 - DNA, 5452 bp, Zea Mays
aaataagattagccgattaaattgacaaaaaagtctaataaattataaatcgggaccgtggaaatattaattaactgcaaagtaaaaatagagagtaatcggttttgtacggggcaagaagcaaatgagatttcaaatggaacggcgtgatgttttacaactgcaaggagaggcagccacccggccccacgtccatccctaaaacatcgccacgttccgcctgcgccaccccccaatgtccgtggccaccggaggcggcggcgtccaccaccaccgagtccaatgcccaagtcccactacgccgcttccccacccccgcacccgccgccgctcctcccgctcgcgctcgtcccgccgcggcagtgcccgctcgtcgcggccctgctggcgctgctctcggtgctgcttgccaccgcgctctggctcctcctcgtgctctccccgtcccagggggctacccccgccgcctccgagcgctcggtgctgccggatgcgggagcggccgcggccgcgggccccggcgccgcctcgcccctctcgctcggccacatcgtcttcggcatcgcggggtcggcgcatctctggccgcgccgccgcgagtacgtccgcctgtggtgggaccccgccgcgatgcgcggcaacgtctggctcgacgcgggcgcgcccgccgcgccggggcctagcgccccctgggagggctccctcccgccgatccgggtgtccgaggacacctcgcgcttcaggtacaccaaccccacgggccacccgtcggggctccggatcgcgcgcatcgccgccgaggccgtccggctcgtcggcagaggggcgggcgcgcgctggctcgtgctcgtcgacgacgacaccgtgctgtgcgcggacaacctcgtcgccgtgctcagcaagtacgactggacggagatggtgtacgtcggggcgccgtccgagagccactccgccaacacctacttcagccatagcatggctttcggaggtggcggcgtcgcgctcagctttccgctcgccgctgcactcgcgcagacgctcgacgtgtgcatcgagaggtaccccaagctgtatggaagcgacgaccgcctccatgcctgcatcacggagctcggcgttcccctatcccgcgaatacggattccaccagtgggatatcagaggcaattctcatgggttattggcatctcatccaattgctcctttcatcagtatccaccatgtggagcttgtggaccccatataccctggattgaactctcttgagagtctggagctgtttacaaaggctatgaaaatggaacccatgagcttcctgcagcgttcaatttgttacgatcaaagccaaaagcttacatttgctatctcgttgggctatgttgttgaagtatatcccaatgttcttcttccgcgtgatttggagcgatcacaacgtacttacgttgcttataataggatgagtcagagaaatgaatttgattttgacactagagatgtccagaaatctttgtgcaagaagccgatcttatttttcttgaaggatgtctggaaggatggaaacataactaggggatcttatgcacgatcaagtgctagggatgacctcaaaagaaaggtgttctgcttccggtcaccccctttacctgacatagatgagatccaagtttcctcgtctccattaagcaagcgctggcatctggcaccaagaaggttgtgcagtgcacttaaaggatctattgatggtactctgtttatgtttgttcagcaatgtggacgtgggacttttggttcagcttctgattccttatgacatgggaaatagagatgtatattttctgttcagatgatacctggaagatgtagttaccaccctacattctttgagtcaagtataattggggctctttttctgcctcaaacgcttgacagtagccaactgtttgttataattggtagttactgaagaaaagacaggctggaaattttcgctttggaatctctgtggttggtgtctgatacttggagactgaggcctagtgaagagatctttgactaaagctgcgccgctatggttggctgagaactaactatctggtttcatcctggtgaccagtttactcaccttcgtggattctccatgagttgtgcgaaatcaggtaaggatagtaatatgttagtcgtaggttttagtgctgtgatcctgtaacccttcattgttcgtacccttcccgtcctgtgccttctcatgtgaaatggagcattaaccaaagagtcgctgtggatttcagtcaggatccagtataatagttgaacgattgactttagaatttggagttaaacagtcctagattcatccacacctgttcgaactccggtggaaggttttccgatttctaggggaatttaaccatttcttcactttgatgtgaaatttcaacgagctggacagaactggccttctctttaagttgtatcttcatctagtgtatttttttaataataattcgtctggtgttgaagtcactttattgggatatgtctaatgcttgagtttaaatgaacacggacctaactcccttaacgaggggttcgtggatgcggatgtgcattgcccgtgccatgacgtccgtttgtgcaatggaaaaaagtgaacgcctctaggagctcgcggatgtggatgtatatcctctctggtacatgaaaatgcgtgaccgggcggctgagtgctcattttgagcgacgacatccgctatctgttggaaggaacaatgctttatatttatgctctccaatctccagagttttttttgcgttgttattttcagtagtgaacaaatgaacacgttctgtgggcctgatatatccacggccccaaaatcccatcctagtagaatgctttctggcccatcaggtccacggagttttgttgcccatcttatgtgcatgtaatctttccgttcttttttttatttgtcatcgttagtttgaaacaccgaggactgaagaggccacggccacgccgtgacgctctctgcttgggtcgatatcgcctagctagtgaagaatatttactaggattacacggtaacaaacactcgtcgatatatatatactagtcggttgcccgtgcgttacgacggcttacaacaatatctatataaattatcctacaaaaagattttaatattttttattaattgtctccgccctccgtataatatttttttgatttggctaactgatgttattatttactctattcaatatgtcttggtacaatacggtcaatgaagtgagcgattagaagagagttcacaacgactgactgaacgaacagagattataaaatgatataatttcaccatacagagaccaaataagagaaaatttgtgagctcaagtttctaaaataagtcacatgaactcaaacttataaaaaagatagatcaaaatatggagtgattgctaaagtcagacatcaataaaaactggatgcgctccatataaattatgttacttcgtagcaattactaacgtttaaaacaaacaaataaccgttcattttactgttcatgtgacaaatcattgttgctccattcaatttagtaacctcaaacaccatggagtccattgcgtcagtgtagtcttagaaacgacctaatgcttgcaagagtcaagaacgttgtgtcgtgtttgggctgtagcctcgggccgtagtgctggtgcggtccgacacgattacatattttttattttacaaaaaacgtatatacatatatataatttatattcaatattaaaaatatctgagcatgatgttctattggttagacagctttcacctcctccactgtttttaacattttacgctgatttaatcaaatgggccgacaggctaacggactgtcccggcacagtcagcaggccgatatgacgtgcctaggccagagttgtggcccgcgaggcgtctggcccgtgccgggccgtcgtttggccatctataggtgtgcaacgggttaatttgaaatagatgtgaaggtttatttgtaaaaagatgacgcgggatgaccgttgaaactgttgctttaagtatagtatatatatatactagtccgttgctcgtgacacttaaaatatccatcaaaaagatctcaaaattttttattgattgtttccgctctccacatattttttatttgactaactgatgttgtttactctatccaatatgtcttggtacaacacgaccaatgaagggagcgattagaagagagttcacaacgactgactgaacgaacagattatagaatgacataattccactatacagaaaccaaataagagaaagtttgtgagctcaaatttctaaaataagttacatgaactcaaacttataaaaaagatagatcaaaatatagagtgttgctaaagtcaggcatcaataaaaactggatgcgctccatataaattatggtacttcgtagcaattactaacgtttaaaatcaacaaataacatttccttttactgttagcgtgacaaatcactgctgatccgtccaattcagcaacctcaaacaccatagagtccattgcgacaatgtggtcttagaaacgatataatgcatgtaagagccaagaacacaaaggataaacactctgtggtagtgcccgcatggatcttcaaatcctaacacatattttgcaggatccatgagccatcataaaagaacacaaaccacgtacaaacaataaataaagtattaacacatccaaattatgttaagtccttagcacaaaaaactaacacccaaaacaacagagaaacaacacaataatttttgcaatgagagaaggatgtgtgacagatacatagaagtggttgacaccgtggtaagggaaagtccatgtagacaggcgatgccgagccatcgaacgggtaccataggcagcaaatcagggaccctcatcgctcgcctcccccacttccaaggtttcgtagagcaggaagggaatggaagaggcgggcatacctgttcgttgccggagaaggacacaacaaaaacctgagtatctagaggcgacataagtagtataacgctagatacatatacggagagagcacacaagtggataaagaagcccaatcggagcagctccgaaccgagagacacccgtaccagacgtcaatccgagaagggcgagagaatgcgagtgccttcccagccctggactcgccgaggcgacacaacaccaccaccaactccatagcatatgccgactgctatcgcgttgtgggtcttggttgtccaatatctcagacctgaactcctcgtcgccaagataacctaagtgtggaagacgccaatatgtcctcctcgacggcacgcacggagaaaggccaggagcaagaccgactcgccccatacccgcgtcgacgagcgtcggtcgg

SEQ ID NO: 48343 - DNA, 5210 bp, Zea Mays
aaataagattagccgattaaattgacaaaaaagtctaataaattataaatcgggaccgtggaaatattaattaactgcaaagtaaaaatagagagtaatcggttttgtacggggcaagaagcaaatgagatttcaaatggaacggcgtgatgttttacaactgcaaggagaggcagccacccggccccacgtccatccctaaaacatcgccacgttccgcctgcgccaccccccaatgtccgtggccaccggaggcggcggcgtccaccaccaccgagtccaatgcccaagtcccactacgccgcttccccacccccgcacccgccgccgctcctcccgctcgcgctcgtcccgccgcggcagtgcccgctcgtcgcggccctgctggcgctgctctcggtgctgcttgccaccgcgctctggctcctcctcgtgctctccccgtcccagggggctacccccgccgcctccgagcgctcggtgctgccggatgcgggagcggccgcggccgcgggccccggcgccgcctcgcccctctcgctcggccacatcgtcttcggcatcgcggggtcggcgcatctctggccgcgccgccgcgagtacgtccgcctgtggtgggaccccgccgcgatgcgcggcaacgtctggctcgacgcgggcgcgcccgccgcgccggggcctagcgccccctgggagggctccctcccgccgatccgggtgtccgaggacacctcgcgcttcaggtacaccaaccccacgggccacccgtcggggctccggatcgcgcgcatcgccgccgaggccgtccggctcgtcggcagaggggcgggcgcgcgctggctcgtgctcgtcgacgacgacaccgtgctgtgcgcggacaacctcgtcgccgtgctcagcaagtacgactggacggagatggtgtacgtcggggcgccgtccgagagccactccgccaacacctacttcagccatagcatggctttcggaggtggcggcgtcgcgctcagctttccgctcgccgctgcactcgcgcagacgctcgacgtgtgcatcgagaggtaccccaagctgtatggaagcgacgaccgcctccatgcctgcatcacggagctcggcgttcccctatcccgcgaatacggattccaccagtgggatatcagaggcaattctcatgggttattggcatctcatccaattgctcctttcatcagtatccaccatgtggagcttgtggaccccatataccctggattgaactctcttgagagtctggagctgtttacaaaggctatgaaaatggaacccatgagcttcctgcagcgttcaatttgttacgatcaaagccaaaagcttacatttgctatctcgttgggctatgttgttgaagtatatcccaatgttcttcttccgcgtgatttggagcgatcacaacgtacttacgttgcttataataggatgagtcagagaaatgaatttgattttgacactagagatgtccagaaatctttgtgcaagaagccgatcttatttttcttgaaggatgtctggaaggatggaaacataactaggggatcttatgcacgatcaagtgctagggatgacctcaaaagaaaggtgttctgcttccggtcaccccctttacctgacatagatgagatccaagtttcctcgtctccattaagcaagcgctggcatctgttgctgacagaagaaactttgcagaaaagacaggctggaaattttcgctttggaatctctgtggttggtgtctgatacttggagactgaggcctagtgaagagatctttgactaaagctgcgccgctatggttggctgagaactaactatctggtttcatcctggtgaccagtttactcaccttcgtggattctccatgagttgtgcgaaatcaggtaaggatagtaatatgttagtcgtaggttttagtgctgtgatcctgtaacccttcattgttcgtacccttcccgtcctgtgccttctcatgtgaaatggagcattaaccaaagagtcgctgtggatttcagtcaggatccagtataatagttgaacgattgactttagaatttggagttaaacagtcctagattcatccacacctgttcgaactccggtggaaggttttccgatttctaggggaatttaaccatttcttcactttgatgtgaaatttcaacgagctggacagaactggccttctctttaagttgtatcttcatctagtgtatttttttaataataattcgtctggtgttgaagtcactttattgggatatgtctaatgcttgagtttaaatgaacacggacctaactcccttaacgaggggttcgtggatgcggatgtgcattgcccgtgccatgacgtccgtttgtgcaatggaaaaaagtgaacgcctctaggagctcgcggatgtggatgtatatcctctctggtacatgaaaatgcgtgaccgggcggctgagtgctcattttgagcgacgacatccgctatctgttggaaggaacaatgctttatatttatgctctccaatctccagagttttttttgcgttgttattttcagtagtgaacaaatgaacacgttctgtgggcctgatatatccacggccccaaaatcccatcctagtagaatgctttctggcccatcaggtccacggagttttgttgcccatcttatgtgcatgtaatctttccgttcttttttttatttgtcatcgttagtttgaaacaccgaggactgaagaggccacggccacgccgtgacgctctctgcttgggtcgatatcgcctagctagtgaagaatatttactaggattacacggtaacaaacactcgtcgatatatatatactagtcggttgcccgtgcgttacgacggcttacaacaatatctatataaattatcctacaaaaagattttaatattttttattaattgtctccgccctccgtataatatttttttgatttggctaactgatgttattatttactctattcaatatgtcttggtacaatacggtcaatgaagtgagcgattagaagagagttcacaacgactgactgaacgaacagagattataaaatgatataatttcaccatacagagaccaaataagagaaaatttgtgagctcaagtttctaaaataagtcacatgaactcaaacttataaaaaagatagatcaaaatatggagtgattgctaaagtcagacatcaataaaaactggatgcgctccatataaattatgttacttcgtagcaattactaacgtttaaaacaaacaaataaccgttcattttactgttcatgtgacaaatcattgttgctccattcaatttagtaacctcaaacaccatggagtccattgcgtcagtgtagtcttagaaacgacctaatgcttgcaagagtcaagaacgttgtgtcgtgtttgggctgtagcctcgggccgtagtgctggtgcggtccgacacgattacatattttttattttacaaaaaacgtatatacatatatataatttatattcaatattaaaaatatctgagcatgatgttctattggttagacagctttcacctcctccactgtttttaacattttacgctgatttaatcaaatgggccgacaggctaacggactgtcccggcacagtcagcaggccgatatgacgtgcctaggccagagttgtggcccgcgaggcgtctggcccgtgccgggccgtcgtttggccatctataggtgtgcaacgggttaatttgaaatagatgtgaaggtttatttgtaaaaagatgacgcgggatgaccgttgaaactgttgctttaagtatagtatatatatatactagtccgttgctcgtgacacttaaaatatccatcaaaaagatctcaaaattttttattgattgtttccgctctccacatattttttatttgactaactgatgttgtttactctatccaatatgtcttggtacaacacgaccaatgaagggagcgattagaagagagttcacaacgactgactgaacgaacagattatagaatgacataattccactatacagaaaccaaataagagaaagtttgtgagctcaaatttctaaaataagttacatgaactcaaacttataaaaaagatagatcaaaatatagagtgttgctaaagtcaggcatcaataaaaactggatgcgctccatataaattatggtacttcgtagcaattactaacgtttaaaatcaacaaataacatttccttttactgttagcgtgacaaatcactgctgatccgtccaattcagcaacctcaaacaccatagagtccattgcgacaatgtggtcttagaaacgatataatgcatgtaagagccaagaacacaaaggataaacactctgtggtagtgcccgcatggatcttcaaatcctaacacatattttgcaggatccatgagccatcataaaagaacacaaaccacgtacaaacaataaataaagtattaacacatccaaattatgttaagtccttagcacaaaaaactaacacccaaaacaacagagaaacaacacaataatttttgcaatgagagaaggatgtgtgacagatacatagaagtggttgacaccgtggtaagggaaagtccatgtagacaggcgatgccgagccatcgaacgggtaccataggcagcaaatcagggaccctcatcgctcgcctcccccacttccaaggtttcgtagagcaggaagggaatggaagaggcgggcatacctgttcgttgccggagaaggacacaacaaaaacctgagtatctagaggcgacataagtagtataacgctagatacatatacggagagagcacacaagtggataaagaagcccaatcggagcagctccgaaccgagagacacccgtaccagacgtcaatccgagaagggcgagagaatgcgagtgccttcccagccctggactcgccgaggcgacacaacaccaccaccaactccatagcatatgccgactgctatcgcgttgtgggtcttggttgtccaatatctcagacctgaactcctcgtcgccaagataacctaagtgtggaagacgccaatatgtcctcctcgacggcacgcacggagaaaggccaggagcaagaccgactcgccccatacccgcgtcgacgagcgtcggtcgg

SEQ ID NO: 48344 - DNA, 3380 bp, Zea Mays
cctgcttcacatgcttctctctctaccattttttgcccacactcctctcccctctgtcattttggttttactaacaagttgtattaggcagagaggtaatggtaacacacctggcgacgtgcacgagtgcgcgtgtgcgggagcagtagctgtactgtaagcatgcagcagcagcagcacgggggaggcggcggagcaagcggtggaggcccagcgcagcagttctgcgcacagcaggtggagatgccgctgccattctcgccggtcggcggcgctgggcagcggatctcgctggcggaggcaccgtcgcccatcagcagccggccgccggcgccggcgccggctcagcagtatgacgagctcggcccgtccggcgccggcgcagtgggctttgacgccgagggcctggccgccgccgcagctggtgaggatggcgccagcggcggctcggcgggcaaccggtggccgcggcaggagacgctggagctgctcaagatccggtcggacatggacaccgccttccgggacgccaccctcaaggcccccctctgggagcaggtctccaggaagctggctgagaaagggtacaaccggagcgccaagaagtgcaaggagaagttcgagaacgtgcacaagtactacaagcgcacaaaggagagccgcgccggccggaacgacggcaagacgtaccgattcttcacgcagctggaggccctgcacggcaccggagcggctcccgcgtcggtggcgtcgcaggtgggcccggcaatctccggcggggtgtccggggcagcccggccgtcgtcggccgtgcgcgtgcctgccgagccgctgcctgcggtgtcggccggcgtgggaatgccgatgacgacgacggtgggctacccgagcatctcgacgtccaacacggaggacgactacacggacgaggacgactccgacgacgagggcacggaggagctggtgggcggcggcgcggacgatcagcgcaggaagaggaagagggtgtcggacggcagcgggaagatgatgaggttcttcgagggcctgatgaagcatgtgatggaccgtcaggaggcgatgcagcagaggttcttggaggccatcgagaagcgtgagcaggaccgcatgatccgcgaggaggcgtggcggcggcaggagatgactcgcctagcgcgcgagcaggagatcctggcgcaggagcgctctatggcagcctcacgcgacgctgccgtcctctccttcatacagaagatcaccgggcagaccatcccgatgccatccattgccgcgcccaccatcaacgccatgccaccgccgtcgcatccgaagccgccgccgccccctcagccgcaccccacacccattgcctccgtgtcgccagccccgccgccaccgcaaccaccagcttcgcagactccgcccccgcagcagcagaagtcgccaatgccggcgacgccacaaacgccagcaccgcaacggcaaagcacagacattgttatgacaccggccgagacgacgccgcacgccgacacccaggggcacgaggggtccggtggcggcgcgacgtcgtcccggtggccgaaggctgaggttcacgcgctgatacagctgcggagcacccttgacacgcggtaccaggagaccgggcccaaagggcccctctgggaggagatctccgccggcatgcggggcatgggttacaaccggaacgcgaagcggtgcaaggagaagtgggagaacatcaacaagtacttcaagaaggtgaaggagagcaacaagaagcgtcccgaggactccaagacgtgcccctacttccaccagctcgacgcactctaccgcaacaaggcggcgatcacctcatcctccggcgccggagccatggtgcacgctaacgcatcgtcggcaccgcaggagatggtcacggtcacggccgcgacgcccatctcacagacgccgccgcctccaacacagccttcccagtcccatcacgcggcgaagaacggcggcagcagcaactccgctggcacaggcactgggaacggcagctacgcatcagagcacggctccaggggcatgcaaacgcaggcgagcaacggcagcgctgcagccagcatgttcgtcggcctcggcggcggcgcggcctcggcagcgaagaagccagaggaaatcatgaaggagatgatagagcagaggcagccgcagcagccgcaggcggtggtaggcggctacaacagaatggacggcgcgggcagcaacaatatggacgacgacgacgacgacgatgaagacgactacgatgagaacgataacgacgaagatgacgccggcaacaaaatgcagtacgagatccagttccagcaccaccatcagcatccgaacgttgtcaggtcgaacgccggcgccggtggtggcaacccgcccggcaccaccgcgcccagcacggctgcggccccgacaacaacagccggatctttcttgggcatggtccagtgatcgatccatccacacgcgtatcccaagcattattcctcccggtgatgactactctatcctcctcttgccgatggcttcttttctttctctcgcttgtgacatttgtatctacctacctgtcgcctccatgctcgcgtccatatatctgatctactccacaaatcctaaaaccacaacaactatccccctctcctctctattctccggcgattctccatattcttcatgcaggtcgtagccacacctcgatccatgtcgtgtcgtcgtcgctgttgcccaccctcctatttctccattcgttgctgcgctagttacagtggtcgccctcttagatgttacagtaaaaaaaatattggtggtgatatggttatttattgattcgttagggtaattaataagaaccctcaaaagcttggggtcttcacggagtggttgaatcgatgcggtgaaaacggcacgtgaagggtaataagagatcgatcgagcggttaaagagaacaaggagacagagacaggtggcagatgatgcagtgggtgtttttcactgttactgcggtaatttttgtgcatgcggctactactgtacagtggggtagtttgttacaagagaggagtaaaaaaatggaaacagagaacttggccgtcatgcggcaagtgacatgaagaatagtcagtttgatgcatgcaggaatttgttttctttatccttttacttttttattttcagttttcactgtttcttttatgttctgcaacgagtaaactgtccattacgtttttctttcttcctcaaactgttgttaccgaaatttactgtgtatacttgagaaatattatatgttaaaattattgctattatatatagtatcgttattgattttgta

SEQ ID NO: 48345 - DNA, 3478 bp, Zea Mays
cccacatcatcccactcatcatctttctgtacacctccatctctctcccctgccgcagtactcaacatttcatcttctctctccttcaccctacatcccccatcttcttcctttaccttcatcacagatatcatattctcttcatctttctctctcccccatcctccctattatttattgaaggctgcttattgatgtggtaacacacctggcgacgtgcacgagtgcgcgtgtgcgggagcagtagctgtactgtaagcatgcagcagcagcagcacgggggaggcggcggagcaagcggtggaggcccagcgcagcagttctgcgcacagcaggtggagatgccgctgccattctcgccggtcggcggcgctgggcagcggatctcgctggcggaggcaccgtcgcccatcagcagccggccgccggcgccggcgccggctcagcagtatgacgagctcggcccgtccggcgccggcgcagtgggctttgacgccgagggcctggccgccgccgcagctggtgaggatggcgccagcggcggctcggcgggcaaccggtggccgcggcaggagacgctggagctgctcaagatccggtcggacatggacaccgccttccgggacgccaccctcaaggcccccctctgggagcaggtctccaggaagctggctgagaaagggtacaaccggagcgccaagaagtgcaaggagaagttcgagaacgtgcacaagtactacaagcgcacaaaggagagccgcgccggccggaacgacggcaagacgtaccgattcttcacgcagctggaggccctgcacggcaccggagcggctcccgcgtcggtggcgtcgcaggtgggcccggcaatctccggcggggtgtccggggcagcccggccgtcgtcggccgtgcgcgtgcctgccgagccgctgcctgcggtgtcggccggcgtgggaatgccgatgacgacgacggtgggctacccgagcatctcgacgtccaacacggaggacgactacacggacgaggacgactccgacgacgagggcacggaggagctggtgggcggcggcgcggacgatcagcgcaggaagaggaagagggtgtcggacggcagcgggaagatgatgaggttcttcgagggcctgatgaagcatgtgatggaccgtcaggaggcgatgcagcagaggttcttggaggccatcgagaagcgtgagcaggaccgcatgatccgcgaggaggcgtggcggcggcaggagatgactcgcctagcgcgcgagcaggagatcctggcgcaggagcgctctatggcagcctcacgcgacgctgccgtcctctccttcatacagaagatcaccgggcagaccatcccgatgccatccattgccgcgcccaccatcaacgccatgccaccgccgtcgcatccgaagccgccgccgccccctcagccgcaccccacacccattgcctccgtgtcgccagccccgccgccaccgcaaccaccagcttcgcagactccgcccccgcagcagcagaagtcgccaatgccggcgacgccacaaacgccagcaccgcaacggcaaagcacagacattgttatgacaccggccgagacgacgccgcacgccgacacccaggggcacgaggggtccggtggcggcgcgacgtcgtcccggtggccgaaggctgaggttcacgcgctgatacagctgcggagcacccttgacacgcggtaccaggagaccgggcccaaagggcccctctgggaggagatctccgccggcatgcggggcatgggttacaaccggaacgcgaagcggtgcaaggagaagtgggagaacatcaacaagtacttcaagaaggtgaaggagagcaacaagaagcgtcccgaggactccaagacgtgcccctacttccaccagctcgacgcactctaccgcaacaaggcggcgatcacctcatcctccggcgccggagccatggtgcacgctaacgcatcgtcggcaccgcaggagatggtcacggtcacggccgcgacgcccatctcacagacgccgccgcctccaacacagccttcccagtcccatcacgcggcgaagaacggcggcagcagcaactccgctggcacaggcactgggaacggcagctacgcatcagagcacggctccaggggcatgcaaacgcaggcgagcaacggcagcgctgcagccagcatgttcgtcggcctcggcggcggcgcggcctcggcagcgaagaagccagaggaaatcatgaaggagatgatagagcagaggcagccgcagcagccgcaggcggtggtaggcggctacaacagaatggacggcgcgggcagcaacaatatggacgacgacgacgacgacgatgaagacgactacgatgagaacgataacgacgaagatgacgccggcaacaaaatgcagtacgagatccagttccagcaccaccatcagcatccgaacgttgtcaggtcgaacgccggcgccggtggtggcaacccgcccggcaccaccgcgcccagcacggctgcggccccgacaacaacagccggatctttcttgggcatggtccagtgatcgatccatccacacgcgtatcccaagcattattcctcccggtgatgactactctatcctcctcttgccgatggcttcttttctttctctcgcttgtgacatttgtatctacctacctgtcgcctccatgctcgcgtccatatatctgatctactccacaaatcctaaaaccacaacaactatccccctctcctctctattctccggcgattctccatattcttcatgcaggtcgtagccacacctcgatccatgtcgtgtcgtcgtcgctgttgcccaccctcctatttctccattcgttgctgcgctagttacagtggtcgccctcttagatgttacagtaaaaaaaatattggtggtgatatggttatttattgattcgttagggtaattaataagaaccctcaaaagcttggggtcttcacggagtggttgaatcgatgcggtgaaaacggcacgtgaagggtaataagagatcgatcgagcggttaaagagaacaaggagacagagacaggtggcagatgatgcagtgggtgtttttcactgttactgcggtaatttttgtgcatgcggctactactgtacagtggggtagtttgttacaagagaggagtaaaaaaatggaaacagagaacttggccgtcatgcggcaagtgacatgaagaatagtcagtttgatgcatgcaggaatttgttttctttatccttttacttttttattttcagttttcactgtttcttttatgttctgcaacgagtaaactgtccattacgtttttctttcttcctcaaactgttgttaccgaaatttactgtgtatacttgagaaatattatatgttaaaattattgctattatatatagtatcgttattgattttgta

SEQ ID NO: 48346 - DNA, 3340 bp, Zea Mays
ttcatcttctctctccttcaccctacatcccccatcttcttcctttaccttcatcacagatatcatattctcttcatctttctctctcccccatcctccctattatttattgaaggctgcttattgatggtatcttatttcttttctctctcttcttcatcctcatcttcctcctgctgaaagagtacatttttttgccagcgtgcctgtagtactactagtgcttcatccccttcttctctggctacttcctcttctccctttctttccctttcccccctctctagcctccttcccttctccactcttatccctctctgaggtccgtctatctctcctctctgcctcccatctttttcacctgcccctcatgtactgatcgtttcatgacctccatttcccagtggtaacacacctggcgacgtgcacgagtgcgcgtgtgcgggagcagtagctgtactgtaagcatgcagcagcagcagcacgggggaggcggcggagcaagcggtggaggcccagcgcagcagttctgcgcacagcaggtggagatgccgctgccattctcgccggtcggcggcgctgggcagcggatctcgctggcggaggcaccgtcgcccatcagcagccggccgccggcgccggcgccggctcagcagtatgacgagctcggcccgtccggcgccggcgcagtgggctttgacgccgagggcctggccgccgccgcagctggtgaggatggcgccagcggcggctcggcgggcaaccggtggccgcggcaggagacgctggagctgctcaagatccggtcggacatggacaccgccttccgggacgccaccctcaaggcccccctctgggagcaggtctccaggaagctggctgagaaagggtacaaccggagcgccaagaagtgcaaggagaagttcgagaacgtgcacaagtactacaagcgcacaaaggagagccgcgccggccggaacgacggcaagacgtaccgattcttcacgcagctggaggccctgcacggcaccggagcggctcccgcgtcggtggcgtcgcaggtgggcccggcaatctccggcggggtgtccggggcagcccggccgtcgtcggccgtgcgcgtgcctgccgagccgctgcctgcggtgtcggccggcgtgggaatgccgatgacgacgacggtgggctacccgagcatctcgacgtccaacacggaggacgactacacggacgaggacgactccgacgacgagggcacggaggagctggtgggcggcggcgcggacgatcagcgcaggaagaggaagagggtgtcggacggcagcgggaagatgatgaggttcttcgagggcctgatgaagcatgtgatggaccgtcaggaggcgatgcagcagaggttcttggaggccatcgagaagcgtgagcaggaccgcatgatccgcgaggaggcgtggcggcggcaggagatgactcgcctagcgcgcgagcaggagatcctggcgcaggagcgctctatggcagcctcacgcgacgctgccgtcctctccttcatacagaagatcaccgggcagaccatcccgatgccatccattgccgcgcccaccatcaacgccatgccaccgccgtcgcatccgaagccgccgccgccccctcagccgcaccccacacccattgcctccgtgtcgccagccccgccgccaccgcaaccaccagcttcgcagactccgcccccgcagcagcagaagtcgccaatgccggcgacgccacaaacgccagcaccgcaacggcaaagcacagacattgttatgacaccggccgagacgacgccgcacgccgacacccaggggcacgaggggtccggtggcggcgcgacgtcgtcccggtggccgaaggctgaggttcacgcgctgatacagctgcggagcacccttgacacgcggtaccaggagaccgggcccaaagggcccctctgggaggagatctccgccggcatgcggggcatgggttacaaccggaacgcgaagcggtgcaaggagaagtgggagaacatcaacaagtacttcaagaaggtgaaggagagcaacaagaagcgtcccgaggactccaagacgtgcccctacttccaccagctcgacgcactctaccgcaacaaggcggcgatcacctcatcctccggcgccggagccatggtgcacgctaacgcatcgtcggcaccgcaggagatggtcacggtcacggccgcgacgcccatctcacagacgccgccgcctccaacacagccttcccagtcccatcacgcggcgaagaacggcggcagcagcaactccgctggcacaggcactgggaacggcagctacgcatcagagcacggctccaggggcatgcaaacgcaggcgagcaacggcagcgctgcagccagcatgttcgtcggcctcggcggcggcgcggcctcggcagcgaagaagccagaggaaatcatgaaggagatgatagagcagaggcagccgcagcagccgcaggcggtggtaggcggctacaacagaatggacggcgcgggcagcaacaatatggacgacgacgacgacgacgatgaagacgactacgatgagaacgataacgacgaagatgacgccggcaacaaaatgcagtacgagatccagttccagcaccaccatcagcatccgaacgttgtcaggtcgaacgccggcgccggtggtggcaacccgcccggcaccaccgcgcccagcacggctgcggccccgacaacaacagccggatctttcttgggcatggtccagtgatcgatccatccacacgcgtatcccaagcattattcctcccgggtaattaataagaaccctcaaaagcttggggtcttcacggagtggttgaatcgatgcggtgaaaacggcacgtgaagggtaataagagatcgatcgagcggttaaagagaacaaggagacagagacaggtggcagatgatgcagtgggtgtttttcactgttactgcggtaatttttgtgcatgcggctactactgtacagtggggtagtttgttacaagagaggagtaaaaaaatggaaacagagaacttggccgtcatgcggcaagtgacatgaagaatagtcagtttgatgcatgcaggaatttgttttctttatccttttacttttttattttcagttttcactgtttcttttatgttctgcaacgagtaaactgtccattacgtttttctttcttcctcaaactgttgttaccgaaatttactgtgtatacttgagaaatattatatgttaaaattattgctattatatatagtatcgttattgattttgta

SEQ ID NO: 48347 - DNA, 3115 bp, Zea Mays
gtcccggcgcgccgccgtaacggaattctcgtcggtggaatgccgcatgaaatctcgacggccttcgggaccggcccctggcgccgatttggctagcttcttagctagcaggcccagttaattaattattacttacccggctaaagaacacttctttttactttttcttaaccatccttcacgagaacagtgacttttccattttaaaatagctcgatatcgctctctccttcgctacttttccgggaaaaaaaatcagctctagtgttttaccaagctcttcgtctctccaatacagtaggaagctggctgagaaagggtacaaccggagcgccaagaagtgcaaggagaagttcgagaacgtgcacaagtactacaagcgcacaaaggagagccgcgccggccggaacgacggcaagacgtaccgattcttcacgcagctggaggccctgcacggcaccggagcggctcccgcgtcggtggcgtcgcaggtgggcccggcaatctccggcggggtgtccggggcagcccggccgtcgtcggccgtgcgcgtgcctgccgagccgctgcctgcggtgtcggccggcgtgggaatgccgatgacgacgacggtgggctacccgagcatctcgacgtccaacacggaggacgactacacggacgaggacgactccgacgacgagggcacggaggagctggtgggcggcggcgcggacgatcagcgcaggaagaggaagagggtgtcggacggcagcgggaagatgatgaggttcttcgagggcctgatgaagcatgtgatggaccgtcaggaggcgatgcagcagaggttcttggaggccatcgagaagcgtgagcaggaccgcatgatccgcgaggaggcgtggcggcggcaggagatgactcgcctagcgcgcgagcaggagatcctggcgcaggagcgctctatggcagcctcacgcgacgctgccgtcctctccttcatacagaagatcaccgggcagaccatcccgatgccatccattgccgcgcccaccatcaacgccatgccaccgccgtcgcatccgaagccgccgccgccccctcagccgcaccccacacccattgcctccgtgtcgccagccccgccgccaccgcaaccaccagcttcgcagactccgcccccgcagcagcagaagtcgccaatgccggcgacgccacaaacgccagcaccgcaacggcaaagcacagacattgttatgacaccggccgagacgacgccgcacgccgacacccaggggcacgaggggtccggtggcggcgcgacgtcgtcccggtggccgaaggctgaggttcacgcgctgatacagctgcggagcacccttgacacgcggtaccaggagaccgggcccaaagggcccctctgggaggagatctccgccggcatgcggggcatgggttacaaccggaacgcgaagcggtgcaaggagaagtgggagaacatcaacaagtacttcaagaaggtgaaggagagcaacaagaagcgtcccgaggactccaagacgtgcccctacttccaccagctcgacgcactctaccgcaacaaggcggcgatcacctcatcctccggcgccggagccatggtgcacgctaacgcatcgtcggcaccgcaggagatggtcacggtcacggccgcgacgcccatctcacagacgccgccgcctccaacacagccttcccagtcccatcacgcggcgaagaacggcggcagcagcaactccgctggcacaggcactgggaacggcagctacgcatcagagcacggctccaggggcatgcaaacgcaggcgagcaacggcagcgctgcagccagcatgttcgtcggcctcggcggcggcgcggcctcggcagcgaagaagccagaggaaatcatgaaggagatgatagagcagaggcagccgcagcagccgcaggcggtggtaggcggctacaacagaatggacggcgcgggcagcaacaatatggacgacgacgacgacgacgatgaagacgactacgatgagaacgataacgacgaagatgacgccggcaacaaaatgcagtacgagatccagttccagcaccaccatcagcatccgaacgttgtcaggtcgaacgccggcgccggtggtggcaacccgcccggcaccaccgcgcccagcacggctgcggccccgacaacaacagccggatctttcttgggcatggtccagtgatcgatccatccacacgcgtatcccaagcattattcctcccggtgatgactactctatcctcctcttgccgatggcttcttttctttctctcgcttgtgacatttgtatctacctacctgtcgcctccatgctcgcgtccatatatctgatctactccacaaatcctaaaaccacaacaactatccccctctcctctctattctccggcgattctccatattcttcatgcaggtcgtagccacacctcgatccatgtcgtgtcgtcgtcgctgttgcccaccctcctatttctccattcgttgctgcgctagttacagtggtcgccctcttagatgttacagtaaaaaaaatattggtggtgatatggttatttattgattcgttagggtaattaataagaaccctcaaaagcttggggtcttcacggagtggttgaatcgatgcggtgaaaacggcacgtgaagggtaataagagatcgatcgagcggttaaagagaacaaggagacagagacaggtggcagatgatgcagtgggtgtttttcactgttactgcggtaatttttgtgcatgcggctactactgtacagtggggtagtttgttacaagagaggagtaaaaaaatggaaacagagaacttggccgtcatgcggcaagtgacatgaagaatagtcagtttgatgcatgcaggaatttgttttctttatccttttacttttttattttcagttttcactgtttcttttatgttctgcaacgagtaaactgtccattacgtttttctttcttcctcaaactgttgttaccgaaatttactgtgtatacttgagaaatattatatgttaaaattattgctattatatatagtatcgttattgattttgta

SEQ ID NO: 48348 - DNA, 4148 bp, Zea Mays
gtcagtctgactgaggtccccgggtccgcgcagcaccagtgccccaccccatttccgcctacggcactacggcagtcggcagcagacggaccagaggctctagcacagtgccgcctcccacctcctgtcgtctcggtctcgctttaaaatcccgcgacgccgtggtcgctcgcctcttttggagcaggccatgtgaagcctctgaccccccgataccttccccttcctcccgtgctgctgctgcaggacagcgcggcgttcgccacacgcggcggcgaagcttcgcgagatccgtgcgcgatgtcgtcgcggccgtcgtcgtcgtcctcgcggcggagtagctcgccgttctccgcggggcaccgccgcccgcccaccgcgtcctcctcctcctcgagctcgtacttcagctccggccgcctcattccgcgctcgtcctcgtcctccgtcagctccagcttctacggcggcgggggtgggggcagcacgaggtccaccaccccgagccgccgcagctcatctgtagcaccggcactgccgccgtcgccagtgccgttcccgagcgcggacgagctcgtcatcgaagacacctcccgatccggcgacagcatctccgtcaccatccgcttccgaccgctcagcgagcgcgagttccagcgcggcgacgagatctcgtggtatccagatggggaccggcttgtgcggtgcgattacaacccgccaacggcttatgcttatgatagagtttttgggccttcgacaagcaccgaggctgtctatgatgttgcagcccgccctgttgtaaaaggtgctatggagggcataaacgggacagtttttgcctatggcgtcacaagtagtgggaagacccacacaatgcatggtgaccagaattgtcctggaataatcccactagccatcaaggatgtcttcagcatgatccaagatagtcctggaagagaatttttgcttcgtgtgtcgtaccttgaaatctataacgaggttataaatgatctacttgatcctactggccaaaatttgcgtgtgcgggaggatgcacagggaacctatgtagaaggaataaaagaagaagtagttctgtcaccaggacacgctctttcatttattgcagccggtgaagaacatcggcatgttggctctaacaacttcaacttatttagcagccgaagtcatactattttcacattgatgattgaaagcagcgcccgtggtgatgagtatgatggggccatgtattcacagcttaatttgattgatctagctggttctgagagctccaagacagagactacagggttaagaagaagggaagggtcatatattaataagagcctcttaactcttggaacagtcattggaaagctcagtgaagggagggcaacacatataccctatcgtgattctaagttgacccgtctactacagtcatcattgagtggccatggtcatgtctcactaatttgcacaattactccagcatcaagtaacatggaagaaacacataatacattgaagtttgcaagcagagcaaaacgtgttgaaatttacgcctctcgcaaccggataattgatgagaaatcattgatcaagaagtatcagaaagaaatatcctctctaaagcaagaactcgatcagctaaggagaggaatgattggtggtgccagccgggaagaaattttgagtttacgtcagcagttggaggcgggtcaggtcaagatgcagtctcgtctggaggaggaagaggaggcgaaagctgctctaatgagcaggatacaacgtttgaccaagttaatacttgtttccaccaaaaacaatattcctgccttgacagatgggcatcagagtcacaattctctcagtgagcaagataagttaatcacttcacaagatagttctacacttgtccaaactgagggcaccacaaaagaccccctatcatccgctttgccagactccttagatgagatcaatcagttaagatctggcaccggtgaacaatcttcagttaccggttctgcaacagattcaatgcaggtgggattcacggcatcagatcatatggatctactgattgaacaaattaagatgcttgctggggaggtcgcatttggtaccagttcactgaaaagactaatcgaacagtccatagatgatcctgaagcaacaaaggaccaaatcgagaatttagagcgtgaaatccagcaaaagaggagacatatgcgagccctggaaaaacaaatcatggaaagtggcgaggcatcagttgctaatgcatccatgatggatatgcagcagactatcacgaaactaacagcgcagtgcagtgagaaggctttcgacttagagttaaagtcagctgataatcgtgtactccaggagcagctacatcagaagaatttggaaatctacgatttacaagaaaaagttcttcgcgttgagcaacaactctcagcaaaagtggatatatcccctgagaaggaaactgattgtgcacagcaggagactattgatttgaaatctaaacttcagtccaaggttcttttactgataatgttctttcactttgtgtatttgagccccttgtgcagtatacctgtacaatttgacatactcgtcagcatagaatatttatggtttggctacatcctttctgtaattctactcgatagaaatagtatgcatgttcattagatggctatatgcaaactactagtgttttatgctttccatattgacatttaagtcaaccaactttgctgatgtactttggcaggaagctgaaatcgaaaagctgaaatatgagcatctgaaaatttctgaggaacattgcgatttaatcaaccagaaccataaattaagtgaggaagctgcatatgcaaaagaattggcttcttcggctgccgtcgaactcaagaatttggctgaagaagttacaaagctatctgtgctaaatgcaaagcaggcgaaggagttattagttgctcaggagatggcacattcaagggttcatggtagaaagggtcgtacagctagtaggggtagggatgaggttgggacatggagcctcgatttggaggacatgaaaatggagctacaggccagaagacagagggaggctgctttggaagctgctttggcagagaaggagcttctcgaagaagagtacaagaaaaagtttgacgaggcaaagaaaaaggaactatctctggagaatgatctagcaggcatgtgggttcttgttgctaagttgaaaagaggggctttaggcatatctgatttgaatgttgacgaccgaactgttaacctagctgatataactaacagcacaaaggagaacaaaggtggaaagaattttgctctagttgagaagcaagcatcagaagattctgtgaagtcactgagttcagaagaacatacaagtccggagtttgaaccacttcttgttcgtctgaaggctaaaattcaggagatgaaggaaaaggacattgatcccctgaccgataaagatgggaactcacatgtctgcaaagtttgtttcgaatctgcagccgctgcagtattgcttccttgccggcatttctgcttgtgcaagccttgctcgcttgcctgctcggagtgccctctgtgccgcacaagaatcgcagacaggataatcaccttcacgtgagctgcgttctagcttcaggtcattctgaagcacacatcctcttgtaaaatcttcaatggtatatgtttctctttttccttagcaaagaaggtgccttttatgttccttctgtgttgtatcgccattctttgggttccccttcccctatagcttcacgccttcaccttacgttctttgttgtatcgaggagttacaaatgatgacttctcgctctgcaaatatgtatagatacgcaactcgacgctgtaacacattttgattctctactcctgaagaaaagcagcgaacgacatgatgacgtgtgtatactgtgctcctagtcgtccctgttagcatggaaggctatattctataattgctgagctacgcccctataattatagatgatggccttcacttttattatcatggttgattagttgcctacatttaatcttccatatacataaactctctctat

SEQ ID NO: 48349 - DNA, 3910 bp, Zea Mays
gtcagtctgactgaggtccccgggtccgcgcagcaccagtgccccaccccatttccgcctacggcactacggcagtcggcagcagacggaccagaggctctagcacagtgccgcctcccacctcctgtcgtctcggtctcgctttaaaatcccgcgacgccgtggtcgctcgcctcttttggagcaggccatgtgaagcctctgaccccccgataccttccccttcctcccgtgctgctgctgcaggacagcgcggcgttcgccacacgcggcggcgaagcttcgcgagatccgtgcgcgatgtcgtcgcggccgtcgtcgtcgtcctcgcggcggagtagctcgccgttctccgcggggcaccgccgcccgcccaccgcgtcctcctcctcctcgagctcgtacttcagctccggccgcctcattccgcgctcgtcctcgtcctccgtcagctccagcttctacggcggcgggggtgggggcagcacgaggtccaccaccccgagccgccgcagctcatctgtagcaccggcactgccgccgtcgccagtgccgttcccgagcgcggacgagctcgtcatcgaagacacctcccgatccggcgacagcatctccgtcaccatccgcttccgaccgctcagcgagcgcgagttccagcgcggcgacgagatctcgtggtatccagatggggaccggcttgtgcggtgcgattacaacccgccaacggcttatgcttatgatagagtttttgggccttcgacaagcaccgaggctgtctatgatgttgcagcccgccctgttgtaaaaggtgctatggagggcataaacgggacagtttttgcctatggcgtcacaagtagtgggaagacccacacaatgcatggtgaccagaattgtcctggaataatcccactagccatcaaggatgtcttcagcatgatccaagatagtcctggaagagaatttttgcttcgtgtgtcgtaccttgaaatctataacgaggttataaatgatctacttgatcctactggccaaaatttgcgtgtgcgggaggatgcacagggaacctatgtagaaggaataaaagaagaagtagttctgtcaccaggacacgctctttcatttattgcagccggtgaagaacatcggcatgttggctctaacaacttcaacttatttagcagccgaagtcatactattttcacattgatgattgaaagcagcgcccgtggtgatgagtatgatggggccatgtattcacagcttaatttgattgatctagctggttctgagagctccaagacagagactacagggttaagaagaagggaagggtcatatattaataagagcctcttaactcttggaacagtcattggaaagctcagtgaagggagggcaacacatataccctatcgtgattctaagttgacccgtctactacagtcatcattgagtggccatggtcatgtctcactaatttgcacaattactccagcatcaagtaacatggaagaaacacataatacattgaagtttgcaagcagagcaaaacgtgttgaaatttacgcctctcgcaaccggataattgatgagaaatcattgatcaagaagtatcagaaagaaatatcctctctaaagcaagaactcgatcagctaaggagaggaatgattggtggtgccagccgggaagaaattttgagtttacgtcagcagttggaggcgggtcaggtcaagatgcagtctcgtctggaggaggaagaggaggcgaaagctgctctaatgagcaggatacaacgtttgaccaagttaatacttgtttccaccaaaaacaatattcctgccttgacagatgggcatcagagtcacaattctctcagtgagcaagataagttaatcacttcacaagatagttctacacttgtccaaactgagggcaccacaaaagaccccctatcatccgctttgccagactccttagatgagatcaatcagttaagatctggcaccggtgaacaatcttcagttaccggttctgcaacagattcaatgcaggtgggattcacggcatcagatcatatggatctactgattgaacaaattaagatgcttgctggggaggtcgcatttggtaccagttcactgaaaagactaatcgaacagtccatagatgatcctgaagcaacaaaggaccaaatcgagaatttagagcgtgaaatccagcaaaagaggagacatatgcgagccctggaaaaacaaatcatggaaagtggcgaggcatcagttgctaatgcatccatgatggatatgcagcagactatcacgaaactaacagcgcagtgcagtgagaaggctttcgacttagagttaaagtcagctgataatcgtgtactccaggagcagctacatcagaagaatttggaaatctacgatttacaagaaaaagttcttcgcgttgagcaacaactctcagcaaaagtggatatatcccctgagaaggaaactgattgtgcacagcaggagactattgatttgaaatctaaacttcagtccaaggaagctgaaatcgaaaagctgaaatatgagcatctgaaaatttctgaggaacattgcgatttaatcaaccagaaccataaattaagtgaggaagctgcatatgcaaaagaattggcttcttcggctgccgtcgaactcaagaatttggctgaagaagttacaaagctatctgtgctaaatgcaaagcaggcgaaggagttattagttgctcaggagatggcacattcaagggttcatggtagaaagggtcgtacagctagtaggggtagggatgaggttgggacatggagcctcgatttggaggacatgaaaatggagctacaggccagaagacagagggaggctgctttggaagctgctttggcagagaaggagcttctcgaagaagagtacaagaaaaagtttgacgaggcaaagaaaaaggaactatctctggagaatgatctagcaggcatgtgggttcttgttgctaagttgaaaagaggggctttaggcatatctgatttgaatgttgacgaccgaactgttaacctagctgatataactaacagcacaaaggagaacaaaggtggaaagaattttgctctagttgagaagcaagcatcagaagattctgtgaagtcactgagttcagaagaacatacaagtccggagtttgaaccacttcttgttcgtctgaaggctaaaattcaggagatgaaggaaaaggacattgatcccctgaccgataaagatgggaactcacatgtctgcaaagtttgtttcgaatctgcagccgctgcagtattgcttccttgccggcatttctgcttgtgcaagccttgctcgcttgcctgctcggagtgccctctgtgccgcacaagaatcgcagacaggataatcaccttcacgtgagctgcgttctagcttcaggtcattctgaagcacacatcctcttgtaaaatcttcaatggtatatgtttctctttttccttagcaaagaaggtgccttttatgttccttctgtgttgtatcgccattctttgggttccccttcccctatagcttcacgccttcaccttacgttctttgttgtatcgaggagttacaaatgatgacttctcgctctgcaaatatgtatagatacgcaactcgacgctgtaacacattttgattctctactcctgaagaaaagcagcgaacgacatgatgacgtgtgtatactgtgctcctagtcgtccctgttagcatggaaggctatattctataattgctgagctacgcccctataattatagatgatggccttcacttttattatcatggttgattagttgcctacatttaatcttccatatacataaactctctctat

SEQ ID NO: 48350 - DNA, 2961 bp, Zea Mays
gtctgactgaggtccccgggtccgcgcagcaccagtgccccaccccatttccgcctacggcactacggcagtcggcagcagacggaccagaggctctagcacagtgccgcctcccacctcctgtcgtctcggtctcgctttaaaatcccgcgacgccgtggtcgctcgcctcttttggagcaggccatgtgaagcctctgaccccccgataccttccccttcctcccgtgctgctgctgcaggacagcgcggcgttcgccacacgcggcggcgaagcttcgcgagatccgtgcgcgatgtcgtcgcggccgtcgtcgtcgtcctcgcggcggagtagctcgccgttctccgcggggcaccgccgcccgcccaccgcgtcctcctcctcctcgagctcgtacttcagctccggccgcctcattccgcgctcgtcctcgtcctccgtcagctccagcttctacggcggcgggggtgggggcagcacgaggtccaccaccccgagccgccgcagctcatctgtagcaccggcactgccgccgtcgccagtgccgttcccgagcgcggacgagctcgtcatcgaagacacctcccgatccggcgacagcatctccgtcaccatccgcttccgaccgctcagcgagcgcgagttccagcgcggcgacgagatctcgtggtatccagatggggaccggcttgtgcggtgcgattacaacccgccaacggcttatgcttatgatagagtttttgggccttcgacaagcaccgaggctgtctatgatgttgcagcccgccctgttgtaaaaggtgctatggagggcataaacgggacagtttttgcctatggcgtcacaagtagtgggaagacccacacaatgcatggtgaccagaattgtcctggaataatcccactagccatcaaggatgtcttcagcatgatccaagatttaatcacttcacaagatagttctacacttgtccaaactgagggcaccacaaaagaccccctatcatccgctttgccagactccttagatgagatcaatcagttaagatctggcaccggtgaacaatcttcagttaccggttctgcaacagattcaatgcaggtgggattcacggcatcagatcatatggatctactgattgaacaaattaagatgcttgctggggaggtcgcatttggtaccagttcactgaaaagactaatcgaacagtccatagatgatcctgaagcaacaaaggaccaaatcgagaatttagagcgtgaaatccagcaaaagaggagacatatgcgagccctggaaaaacaaatcatggaaagtggcgaggcatcagttgctaatgcatccatgatggatatgcagcagactatcacgaaactaacagcgcagtgcagtgagaaggctttcgacttagagttaaagtcagctgataatcgtgtactccaggagcagctacatcagaagaatttggaaatctacgatttacaagaaaaagttcttcgcgttgagcaacaactctcagcaaaagtggatatatcccctgagaaggaaactgattgtgcacagcaggagactattgatttgaaatctaaacttcagtccaaggaagctgaaatcgaaaagctgaaatatgagcatctgaaaatttctgaggaacattgcgatttaatcaaccagaaccataaattaagtgaggaagctgcatatgcaaaagaattggcttcttcggctgccgtcgaactcaagaatttggctgaagaagttacaaagctatctgtgctaaatgcaaagcaggcgaaggagttattagttgctcaggagatggcacattcaagggttcatggtagaaagggtcgtacagctagtaggggtagggatgaggttgggacatggagcctcgatttggaggacatgaaaatggagctacaggccagaagacagagggaggctgctttggaagctgctttggcagagaaggagcttctcgaagaagagtacaagaaaaagtttgacgaggcaaagaaaaaggaactatctctggagaatgatctagcaggcatgtgggttcttgttgctaagttgaaaagaggggctttaggcatatctgatttgaatgttgacgaccgaactgttaacctagctgatataactaacagcacaaaggagaacaaaggtggaaagaattttgctctagttgagaagcaagcatcagaagattctgtgaagtcactgagttcagaagaacatacaagtccggagtttgaaccacttcttgttcgtctgaaggctaaaattcaggagatgaaggaaaaggacattgatcccctgaccgataaagatgggaactcacatgtctgcaaagtttgtttcgaatctgcagccgctgcagtattgcttccttgccggcatttctgcttgtgcaagccttgctcgcttgcctgctcggagtgccctctgtgccgcacaagaatcgcagacaggataatcaccttcacgtgagctgcgttctagcttcaggtcattctgaagcacacatcctcttgtaaaatcttcaatggtatatgtttctctttttccttagcaaagaaggtgccttttatgttccttctgtgttgtatcgccattctttgggttccccttcccctatagcttcacgccttcaccttacgttctttgttgtatcgaggagttacaaatgatgacttctcgctctgcaaatatgtatagatacgcaactcgacgctgtaacacattttgattctctactcctgaagaaaagcagcgaacgacatgatgacgtgtgtatactgtgctcctagtcgtccctgttagcatggaaggctatattctataattgctgagctacgcccctataattatagatgatggccttcacttttattatcatggttgattagttgcctacatttaatcttccatatacataaactctctctat

SEQ ID NO: 48351 - DNA, 3853 bp, Zea Mays
gtctgactgaggtccccgggtccgcgcagcaccagtgccccaccccatttccgcctacggcactacggcagtcggcagcagacggaccagaggctctagcacagtgccgcctcccacctcctgtcgtctcggtctcgctttaaaatcccgcgacgccgtggtcgctcgcctcttttggagcaggccatgtgaagcctctgaccccccgataccttccccttcctcccgtgctgctgctgcaggacagcgcggcgttcgccacacgcggcggcgaagcttcgcgagatccgtgcgcgatgtcgtcgcggccgtcgtcgtcgtcctcgcggcggagtagctcgccgttctccgcggggcaccgccgcccgcccaccgcgtcctcctcctcctcgagctcgtacttcagctccggccgcctcattccgcgctcgtcctcgtcctccgtcagctccagcttctacggcggcgggggtgggggcagcacgaggtccaccaccccgagccgccgcagctcatctgtagcaccggcactgccgccgtcgccagtgccgttcccgagcgcggacgagctcgtcatcgaagacacctcccgatccggcgacagcatctccgtcaccatccgcttccgaccgctcagcgagcgcgagttccagcgcggcgacgagatctcgtggtatccagatggggaccggcttgtgcggtgcgattacaacccgccaacggcttatgcttatgatagagtttttgggccttcgacaagcaccgaggctgtctatgatgttgcagcccgccctgttgtaaaaggtgctatggagggcataaacgggtgaccagaattgtcctggaataatcccactagccatcaaggatgtcttcagcatgatccaagatagtcctggaagagaatttttgcttcgtgtgtcgtaccttgaaatctataacgaggttataaatgatctacttgatcctactggccaaaatttgcgtgtgcgggaggatgcacagggaacctatgtagaaggaataaaagaagaagtagttctgtcaccaggacacgctctttcatttattgcagccggtgaagaacatcggcatgttggctctaacaacttcaacttatttagcagccgaagtcatactattttcacattgatgattgaaagcagcgcccgtggtgatgagtatgatggggccatgtattcacagcttaatttgattgatctagctggttctgagagctccaagacagagactacagggttaagaagaagggaagggtcatatattaataagagcctcttaactcttggaacagtcattggaaagctcagtgaagggagggcaacacatataccctatcgtgattctaagttgacccgtctactacagtcatcattgagtggccatggtcatgtctcactaatttgcacaattactccagcatcaagtaacatggaagaaacacataatacattgaagtttgcaagcagagcaaaacgtgttgaaatttacgcctctcgcaaccggataattgatgagaaatcattgatcaagaagtatcagaaagaaatatcctctctaaagcaagaactcgatcagctaaggagaggaatgattggtggtgccagccgggaagaaattttgagtttacgtcagcagttggaggcgggtcaggtcaagatgcagtctcgtctggaggaggaagaggaggcgaaagctgctctaatgagcaggatacaacgtttgaccaagttaatacttgtttccaccaaaaacaatattcctgccttgacagatgggcatcagagtcacaattctctcagtgagcaagataagttaatcacttcacaagatagttctacacttgtccaaactgagggcaccacaaaagaccccctatcatccgctttgccagactccttagatgagatcaatcagttaagatctggcaccggtgaacaatcttcagttaccggttctgcaacagattcaatgcaggtgggattcacggcatcagatcatatggatctactgattgaacaaattaagatgcttgctggggaggtcgcatttggtaccagttcactgaaaagactaatcgaacagtccatagatgatcctgaagcaacaaaggaccaaatcgagaatttagagcgtgaaatccagcaaaagaggagacatatgcgagccctggaaaaacaaatcatggaaagtggcgaggcatcagttgctaatgcatccatgatggatatgcagcagactatcacgaaactaacagcgcagtgcagtgagaaggctttcgacttagagttaaagtcagctgataatcgtgtactccaggagcagctacatcagaagaatttggaaatctacgatttacaagaaaaagttcttcgcgttgagcaacaactctcagcaaaagtggatatatcccctgagaaggaaactgattgtgcacagcaggagactattgatttgaaatctaaacttcagtccaaggaagctgaaatcgaaaagctgaaatatgagcatctgaaaatttctgaggaacattgcgatttaatcaaccagaaccataaattaagtgaggaagctgcatatgcaaaagaattggcttcttcggctgccgtcgaactcaagaatttggctgaagaagttacaaagctatctgtgctaaatgcaaagcaggcgaaggagttattagttgctcaggagatggcacattcaagggttcatggtagaaagggtcgtacagctagtaggggtagggatgaggttgggacatggagcctcgatttggaggacatgaaaatggagctacaggccagaagacagagggaggctgctttggaagctgctttggcagagaaggagcttctcgaagaagagtacaagaaaaagtttgacgaggcaaagaaaaaggaactatctctggagaatgatctagcaggcatgtgggttcttgttgctaagttgaaaagaggggctttaggcatatctgatttgaatgttgacgaccgaactgttaacctagctgatataactaacagcacaaaggagaacaaaggtggaaagaattttgctctagttgagaagcaagcatcagaagattctgtgaagtcactgagttcagaagaacatacaagtccggagtttgaaccacttcttgttcgtctgaaggctaaaattcaggagatgaaggaaaaggacattgatcccctgaccgataaagatgggaactcacatgtctgcaaagtttgtttcgaatctgcagccgctgcagtattgcttccttgccggcatttctgcttgtgcaagccttgctcgcttgcctgctcggagtgccctctgtgccgcacaagaatcgcagacaggataatcaccttcacgtgagctgcgttctagcttcaggtcattctgaagcacacatcctcttgtaaaatcttcaatggtatatgtttctctttttccttagcaaagaaggtgccttttatgttccttctgtgttgtatcgccattctttgggttccccttcccctatagcttcacgccttcaccttacgttctttgttgtatcgaggagttacaaatgatgacttctcgctctgcaaatatgtatagatacgcaactcgacgctgtaacacattttgattctctactcctgaagaaaagcagcgaacgacatgatgacgtgtgtatactgtgctcctagtcgtccctgttagcatggaaggctatattctataattgctgagctacgcccctataattatagatgatggccttcacttttattatcatggttgattagttgcctacatttaatcttccatatacataaactctctctat

SEQ ID NO: 48352 - DNA, 3293 bp, Zea Mays
tgcccattttgttgcttgcaaaggaacatgctggatgtgcacatacttcaactcatgttgcgtatagtgagtagtctggactctggagtatacttcctgaccaatgtcgagtcagcatgaaatggatagagtttttgggccttcgacaagcaccgaggctgtctatgatgttgcagcccgccctgttgtaaaaggtgctatggagggcataaacgggacagtttttgcctatggcgtcacaagtagtgggaagacccacacaatgcatggtgaccagaattgtcctggaataatcccactagccatcaaggatgtcttcagcatgatccaagatagtcctggaagagaatttttgcttcgtgtgtcgtaccttgaaatctataacgaggttataaatgatctacttgatcctactggccaaaatttgcgtgtgcgggaggatgcacagggaacctatgtagaaggaataaaagaagaagtagttctgtcaccaggacacgctctttcatttattgcagccggtgaagaacatcggcatgttggctctaacaacttcaacttatttagcagccgaagtcatactattttcacattgatgattgaaagcagcgcccgtggtgatgagtatgatggggccatgtattcacagcttaatttgattgatctagctggttctgagagctccaagacagagactacagggttaagaagaagggaagggtcatatattaataagagcctcttaactcttggaacagtcattggaaagctcagtgaagggagggcaacacatataccctatcgtgattctaagttgacccgtctactacagtcatcattgagtggccatggtcatgtctcactaatttgcacaattactccagcatcaagtaacatggaagaaacacataatacattgaagtttgcaagcagagcaaaacgtgttgaaatttacgcctctcgcaaccggataattgatgagaaatcattgatcaagaagtatcagaaagaaatatcctctctaaagcaagaactcgatcagctaaggagaggaatgattggtggtgccagccgggaagaaattttgagtttacgtcagcagttggaggcgggtcaggtcaagatgcagtctcgtctggaggaggaagaggaggcgaaagctgctctaatgagcaggatacaacgtttgaccaagttaatacttgtttccaccaaaaacaatattcctgccttgacagatgggcatcagagtcacaattctctcagtgagcaagatttaatcacttcacaagatagttctacacttgtccaaactgagggcaccacaaaagaccccctatcatccgctttgccagactccttagatgagatcaatcagttaagatctggcaccggtgaacaatcttcagttaccggttctgcaacagattcaatgcaggtgggattcacggcatcagatcatatggatctactgattgaacaaattaagatgcttgctggggaggtcgcatttggtaccagttcactgaaaagactaatcgaacagtccatagatgatcctgaagcaacaaaggaccaaatcgagaatttagagcgtgaaatccagcaaaagaggagacatatgcgagccctggaaaaacaaatcatggaaagtggcgaggcatcagttgctaatgcatccatgatggatatgcagcagactatcacgaaactaacagcgcagtgcagtgagaaggctttcgacttagagttaaagtcagctgataatcgtgtactccaggagcagctacatcagaagaatttggaaatctacgatttacaagaaaaagttcttcgcgttgagcaacaactctcagcaaaagtggatatatcccctgagaaggaaactgattgtgcacagcaggagactattgatttgaaatctaaacttcagtccaaggaagctgaaatcgaaaagctgaaatatgagcatctgaaaatttctgaggaacattgcgatttaatcaaccagaaccataaattaagtgaggaagctgcatatgcaaaagaattggcttcttcggctgccgtcgaactcaagaatttggctgaagaagttacaaagctatctgtgctaaatgcaaagcaggcgaaggagttattagttgctcaggagatggcacattcaagggttcatggtagaaagggtcgtacagctagtaggggtagggatgaggttgggacatggagcctcgatttggaggacatgaaaatggagctacaggccagaagacagagggaggctgctttggaagctgctttggcagagaaggagcttctcgaagaagagtacaagaaaaagtttgacgaggcaaagaaaaaggaactatctctggagaatgatctagcaggcatgtgggttcttgttgctaagttgaaaagaggggctttaggcatatctgatttgaatgttgacgaccgaactgttaacctagctgatataactaacagcacaaaggagaacaaaggtggaaagaattttgctctagttgagaagcaagcatcagaagattctgtgaagtcactgagttcagaagaacatacaagtccggagtttgaaccacttcttgttcgtctgaaggctaaaattcaggagatgaaggaaaaggacattgatcccctgaccgataaagatgggaactcacatgtctgcaaagtttgtttcgaatctgcagccgctgcagtattgcttccttgccggcatttctgcttgtgcaagccttgctcgcttgcctgctcggagtgccctctgtgccgcacaagaatcgcagacaggataatcaccttcacgtgagctgcgttctagcttcaggtcattctgaagcacacatcctcttgtaaaatcttcaatggtatatgtttctctttttccttagcaaagaaggtgccttttatgttccttctgtgttgtatcgccattctttgggttccccttcccctatagcttcacgccttcaccttacgttctttgttgtatcgaggagttacaaatgatgacttctcgctctgcaaatatgtatagatacgcaactcgacgctgtaacacattttgattctctactcctgaagaaaagcagcgaacgacatgatgacgtgtgtatactgtgctcctagtcgtccctgttagcatggaaggctatattctataattgctgagctacgcccctataattatagatgatggccttcacttttattatcatggttgattagttgcctacatttaatcttccatatacataaactctctctat

SEQ ID NO: 48353 - DNA, 1544 bp, Zea Mays
cttctcctcctccctggttcagatctctcatcgtcccccgctgcattccatcccgaccccgtttgccactggtcacaccctctccatcgcttcctgccaccgaccacaccctctcgatcgccattcgccaccggccaaatggaggccatccggaagcaggcctcaaagttccgggagcaggtggctcggcagcagcaggcggtgatgaagcagttcgggggcgggtacggcgcagacggcgtgttcgcgaacgaggccgaggcgcaacagcactccaagctcgagaagctctacatctccacgcgcgccgccaagcacttccaaagggatatagttcggggcgtcgagggctacatcgtcacggggtcgaagcaagtcgaaatcggtggacagctgaactcccgtgtctcttttattgaacacatgaaatttgaattcggaattgttagtgtaatgtgctttgtgttgttcagggaacaagttatgtgaggatggcaagaagtacggcaccgagaacacttgtagcagtggaagcacactgtcgaaggcggcgttaagttttgctaaggcacgatccatgatggaaaaggaaaggggtaacctgctgaaagcccttggcacacagaacctctgagggctatggttatgggagctcctttggaggatgctcgccaccttgctcaaaggtacgacagaatgcgtcaagaagctgaagcgcaggctattgaagtttcgaagcgccaaatgaaactaagagaggcgtctggaaatagtgatatggtttcaaggctagaagcagctgagtcaaagctgcaagagttgaaatcgaatatgggggtattgggcaaagaagctgttgcagcaatgactgccgttgaggcccaacagcaaagattgaccttgcagcgtcttattgcattggttgaatcagagagaaactaccaccaaaaggtcctacaaattcttgatcaacttgagagagagatggtatctgagcgccaaagaatcgaaggagcacctccggtggttgagagttccatgcctccaccgcctgcatatgaagaagtcaatggtatattcatgagaaatacagttgcagaattggtcgagactgtggagtatttcttggctgaggcaatccagtcataccaagccgaaagcgataccgagctcaacctttcaactggtgactacatagtggtccgaaaggtgtcgaacaatggatgggccgaaggtgaatgcagggggaaagctggttggttcccctacgactacatcgagaaacgggagcgtgtgcttgcaagtaaagtcgcccaagttttctaagtcttccgctgagccatgtagtatccccggggttgtacaatgtgtgttgtttatgcttgtcatcttcagagaatcagaggagatctgtaatttttgctgaaagctgcctgttgggtggtttgtttctgcctggccgcctcaattgttcaaattcatgtggcaggaactgaatatattcattcttcagttatcctgtctatatatatatatatacatat

SEQ ID NO: 48354 - DNA, 1418 bp, Zea Mays
ccttaatttcttatcccctcgtcctctgcgtcttgttgcacttgaagcttcctccgcggcctcccgtcgagcaaccatggcggcggcggtaaccctcctccgccttcctctcgcccgactctcctaccacctccgctccgtaccttcctctcgtctcccgtccccgcgcctccgtatctttgcctcccatcgccttttctcctccctggaccatggctccgcctctgcttccgcctccgcggccgtggccgaggttgtaggcgtgccggacgcggaggagtcggtagaggaggaatctgcggccgaggccgaggcggaggcgcccaggtcgttcgtgctcccacggctgccgcggccgaagctgagcgtgaaggagcggaaggagctggcctcgtacgctcacggcctcggcaaaaagctcaagtcgcaacaggtcggtaagagcggcgtcacaccgaaccttgtctccgccttcagtgacaacctcgagtccaacgagctcctaaaggcctagcaccagcaagatgaaaaagaagcaacaggttgatgaaaatgctaggaggttttcaagaactgaagaaggaaacgctaggcggtttgcgaaatccgaagaatcatttgaagaacgccctagaaacagaccaggcagaagatctgttggatctggatccacatttaagggggcgcaacagaagagaagaccgatggcatccaaggggtcttcttcatatggccgaggatagcagtggcataaaacactatatgcttgcttttttttcgtgttgtctgtgctccggaccctggagcgttcatgtgaagttctcgacgaactggttggagcacatggcagtgtttagttctagttttgacaagtaagttgtggttccaggtctcatcaactgcacaatgaaataggcacaagatactttgtgtcaactacttgcgattttgtgcaagactagcacaggaacatggagtttcttcagttttgaccgtagacctcgtccatctggtccttgaaatcacagcagaggaccatccattggactgtcatgtttttgcgacttcgttgagcagctgtctgttgatgtttcactgagagtctcaggctggtgcagggtcaagtgcttaacatccatattgcccctgtcatgagttataaccatggttccaagaaccatctcagcaacagcaacattgctaggccgccatagttctactagaagtgtggtggagcttcttagctacaatgtgaactttttctaagccgaacttaaacttctaattttttttaagccggcgagccggttagctccaaagcagtctagacggatgtggtgcgcacatgtgcatttcttcgactgatgtcatgagctccattcctgatagtcaataaatgcccagatatttggtttcat

SEQ ID NO: 48355 - DNA, 1094 bp, Zea Mays
gttcggtaggtgtacttgttatttgtttgtgtcgtcctccttggtgtctggagatcgagtcgattagccagacagaccagacgtagccgcgcacggtcggcttgcttgtgcatggacgtgatgttcggcgggacggagacggtggcgtcggcgatcgagtgggccatggcggagatgatgcacagccccgacgacctgcgccgggtgcagcaggagctcgccgacgtcgtgggcctcgaccgcaacgtgagcgagtcggacctggacaggctccccttcctcaggtgcgtcatcaaggagacgctccggctgcacccgcccatcccgctgctcctccacgagaccgccgacgactgcgtcgtggccgggtactccgtgcccaggggctcccgcgtcatggtcaacgtctgggccatcggccgccaccgcgcctcgtggaaggacgccgacgcgttccgcccgtcgcggttcgcggcgcccgagggggaggccgcggggctcgacttcaagggcgggtgcttcgagttcctgccgttcgggtcgggccgccggtcctgccccgggatggcgctcggcctgtacgcgctggagctcgccgtcgcccagctcgcgcacgccttcaactggtcgctgcccgacggaatgaagccctcggagatggacatgggcgacatcttcggccttaccgcgccgcgcgccacgcggctctacgccgtgcctacgccccggctcaactgccccttgtactgacgccctgcacgtggcgcgcggggactgccattacgcatgcatgcgtttggactttggtgttcatccctggggtggggccgccgtgggggaagttaggagtttggtggctttctagctctgtcttcttgtattctgtttattataaattttcccaacccttccatgcctgatcgatgtgcggtaataattgttagaaaatgtgacattttgtatgtaatcaatctatggggtgcaattgttatctcgtcaaaggacacaccactcgacttgcaccccttcatgtatatatatacatacacgaacatcccctgcaataaagaaatcgctgtcactttctttcgaac

SEQ ID NO: 48356 - DNA, 2546 bp, Zea Mays
gccccctcgtcccttgtctcccgtcacgcgagcccccccgcacccccggccgcgcagcccacacgcgcaggcggcaggcgcagtccgtcaccctcaacgcgtccaatgcggggtctgctgctgccgcaattcattttttccctcttcagttcccgtttggtttcgtcacaccaccctccactgccttccttctcgtcgccccctcgtccactgcattaatactgccactccccgccccccgttcccctctcctcgcacgcttccggagctataaatctcggcgccccccggctaccggaccccgcattcccgtgcgcgagctccggtgatcgccgggaccggccggcggccatggggcagtgctacgcgaggaacgtgcacggcgtcgacgccgacgacggcggcgtgggggcgaccaccatcacggtctcggcggcgggagggccggaggatgcggcgtcggtagggggagggggaggacgaggaggagggaggcggagcgcgcggccgtcgccggcgacctcggtgtccacgccgcgccgattcttccgccgcccgttcccgccgccgtccccggccaagcacatcaaggcgtccctcgcgcgccggctcggccaccggtcgccggcctccgcgtcgcaggtgcccatgccgcccgtcgaggtcccgatccaggagcacggggcgggaggcgccgggggtggcgctgggcagcgggagcttgacaagagcttcggctacgaccgccagttcgccgccaagtacgagctagggaaggaggtgggccgcggccatttcggacacacctgcctcgtgcgtgcccgcaagggagacatgagaggccaggtcctggctgtcaaggtcatctccaaagccaagatgacaacagcaatatctattgaggatgtgcgcagagaggtgaaaattttgaaggcgttatctggacattccaatcttgtcaagttttatgatgcttgtgaggatgcccttaatgtctacataatcatggagctttgtgaaggtggagaattattggataggatcttgtccagatattaaaagtagttgccttttgccatcttcagggtgttgttcaccgtgatctgaagccagagaatttcctattcagcacgagggaagagcattctcctatgaagataattgattttggtctctcagattttataagaccagatgaaaggcttaatgacattgttggaagtgcatactacgttgctccagaagtcttgcataggtcatatagcacagaagcagacatgtggagtattggtgttatcacttatatattgctgtgtggtagcaggccattctgggcacgaactgaatcaggtattttccgctcagtgctgagagctgaccccaattttgaagactcaccatggcaatcagtatctcctgaagccaaagattttgtcaaaagacttcttaacaaggattacagaaaaagaatgactgctgcacaggcactttctcacccctggctgcgagatgagcaacaacaaatacctctggatatgctagtattcaagttggttaaagcataccttgtttctacgcctctcaaacgggcggcattgaaggccttgtcaagagcaataacacaagatgagcttatctacatccgggcacaatataacttgttagaaccaaacagtgcagatggtcgaatatgtatcgataacttcaggatggctcttttacaaaactgtactgatgctatgaaagaatctagaacacttgagatcttgcacgcgctggagccgctcgcatataggagaatggactttgaggagttccgcgcagctacaataagcccttaccagcttgaggctgtgcctcggtgggaagaaatcgccagtactgcattcgggtactttgagcaggaaggaaaccgtgctatcacaatcgaggagctagctcaggagatgaatctttcagcggcggcgtattccgtcgtccgtgactggatcagaccatctgacggcaagcttagcttcctaggctacacgaagttcttgcatgggttgacgatgcgaagtggcaacgcaagacggcaccattgaccctcttgctgcccccggtaattacttgagttggttccattggttttgttgatgtggagttggagagagagagagggtgttttgtctctcttcttctgttggcttagcttcttgtagaatgcttgtagagagaaagggggaaaaaaaggaaaccaaaagtgatagctcaaaattgagttgtagaagaaaaggtcatgttttgctcgtttggttctggtacattgtacagttagtcagtcagttgggccatgctacatggtgctatggcctatggccgaacttggttgctctgttgctggtcgcaacagcctacaggaatggtgctgcggttctgatgaaactgttgaggcagtgtagtcgtcttaatgcctgtgattgcgttgtggtttgccagcatgttactgtcatatggcaaagcaaagcttatcttaatgcaaaagggtggagcagaaacgaaactat

SEQ ID NO: 48357 - DNA, 2444 bp, Zea Mays
gccccctcgtcccttgtctcccgtcacgcgagcccccccgcacccccggccgcgcagcccacacgcgcaggcggcaggcgcagtccgtcaccctcaacgcgtccaatgcggggtctgctgctgccgcaattcattttttccctcttcagttcccgtttggtttcgtcacaccaccctccactgccttccttctcgtcgccccctcgtccactgcattaatactgccactccccgccccccgttcccctctcctcgcacgcttccggagctataaatctcggcgccccccggctaccggaccccgcattcccgtgcgcgagctccggtgatcgccgggaccggccggcggccatggggcagtgctacgcgaggaacgtgcacggcgtcgacgccgacgacggcggcgtgggggcgaccaccatcacggtctcggcggcgggagggccggaggatgcggcgtcggtagggggagggggaggacgaggaggagggaggcggagcgcgcggccgtcgccggcgacctcggtgtccacgccgcgccgattcttccgccgcccgttcccgccgccgtccccggccaagcacatcaaggcgtccctcgcgcgccggctcggccaccggtcgccggcctccgcgtcgcaggtgcccatgccgcccgtcgaggtcccgatccaggagcacggggcgggaggcgccgggggtggcgctgggcagcgggagcttgacaagagcttcggctacgaccgccagttcgccgccaagtacgagctagggaaggaggtgggccgcggccatttcggacacacctgcctcgtgcgtgcccgcaagggagacatgagaggccaggtcctggctgtcaagatgacaacagcaatatctattgaggatgtgcgcagagaggtgaaaattttgaaggcgttatctggacattccaatcttgtcaagttttatgatgcttgtgaggatgcccttaatgtctacataatcatggagctttgtgaaggtggagaattattggataggatcttgtccagaggtggaagatacaatgaaggggatgcaaaaattattgttgaacagatattaaaagtagttgccttttgccatcttcagggtgttgttcaccgtgatctgaagccagagaatttcctattcagcacgagggaagagcattctcctatgaagataattgattttggtctctcagattttataagaccagatgaaaggcttaatgacattgttggaagtgcatactacgttgctccagaagtcttgcatagtgctgagagctgaccccaattttgaagactcaccatggcaatcagtatctcctgaagccaaagattttgtcaaaagacttcttaacaaggattacagaaaaagaatgactgctgcacaggcactttctcacccctggctgcgagatgagcaacaacaaatacctctggatatgctagtattcaagttggttaaagcataccttgtttctacgcctctcaaacgggcggcattgaaggccttgtcaagagcaataacacaagatgagcttatctacatccgggcacaatataacttgttagaaccaaacagtgcagatggtcgaatatgtatcgataacttcaggatggctcttttacaaaactgtactgatgctatgaaagaatctagaacacttgagatcttgcacgcggagaatggactttgaggagttccgcgcagctacaataagcccttaccagcttgaggctgtgcctcggtgggaagaaatcgccagtactgcattcgggtactttgagcaggaaggaaaccgtgctatcacaatcgaggagctagctcaggagatgaatctttcagcggcggcgtattccgtcgtccgtgactggatcagaccatctgacggcaagcttagcttcctaggctacacgaagttcttgcatgggttgacgatgcgaagtggcaacgcaagacggcaccattgaccctcttgctgcccccggtaattacttgagttggttccattggttttgttgatgtggagttggagagagagagagggtgttttgtctctcttcttctgttggcttagcttcttgtagaatgcttgtagagagaaagggggaaaaaaaggaaaccaaaagtgatagctcaaaattgagttgtagaagaaaaggtcatgttttgctcgtttggttctggtacattgtacagttagtcagtcagttgggccatgctacatggtgctatggcctatggccgaacttggttgctctgttgctggtcgcaacagcctacaggaatggtgctgcggttctgatgaaactgttgaggcagtgtagtcgtcttaatgcctgtgattgcgttgtggtttgccagcatgttactgtcatatggcaaagcaaagcttatcttaatgcaaaagggtggagcagaaacgaaactat

SEQ ID NO: 48358 - DNA, 2523 bp, Zea Mays
gccccctcgtcccttgtctcccgtcacgcgagcccccccgcacccccggccgcgcagcccacacgcgcaggcggcaggcgcagtccgtcaccctcaacgcgtccaatgcggggtctgctgctgccgcaattcattttttccctcttcagttcccgtttggtttcgtcacaccaccctccactgccttccttctcgtcgccccctcgtccactgcattaatactgccactccccgccccccgttcccctctcctcgcacgcttccggagctataaatctcggcgccccccggctaccggaccccgcattcccgtgcgcgagctccggtgatcgccgggaccggccggcggccatggggcagtgctacgcgaggaacgtgcacggcgtcgacgccgacgacggcggcgtgggggcgaccaccatcacggtctcggcggcgggagggccggaggatgcggcgtcggtagggggagggggaggacgaggaggagggaggcggagcgcgcggccgtcgccggcgacctcggtgtccacgccgcgccgattcttccgccgcccgttcccgccgccgtccccggccaagcacatcaaggcgtccctcgcgcgccggctcggccaccggtcgccggcctccgcgtcgcaggtgcccatgccgcccgtcgaggtcccgatccaggagcacggggcgggaggcgccgggggtggcgctgggcagcgggagcttgacaagagcttcggctacgaccgccagttcgccgccaagtacgagctagggaaggaggtgggccgcggccatttcggacacacctgcctcgtgcgtgcccgcaagggagacatgagaggccaggtcctggctgtcaaggtcatctccaaagccaagatgacaacagcaatatctattgaggatgtgcgcagagaggtgaaaattttgaaggcgttatctggacattccaatcttgtcaagttttatgatgcttgtgaggatgcccttaatgtctacataatcatggagctttgtgaaggtggagaattattggataggatcttgtccagaggtggaagatacaatgaaggggatgcaaaaattattgttgaacagatattaaaagtagttgccttttgccatcttcagggtgttgttcaccgtgatctgaagccagagaatttcctattcagcacgagggaagagcattctcctatgaagataattgattttggtctctcagattttataagaccagatgaaaggcttaatgacattgttggaagtgcatactacgttgctccagaagtcttgcataggccattctgggcacgaactgaatcaggtattttccgctcagtgctgagagctgaccccaattttgaagactcaccatggcaatcagtatctcctgaagccaaagattttgtcaaaagacttcttaacaaggattacagaaaaagaatgactgctgcacaggcactttctcacccctggctgcgagatgagcaacaacaaatacctctggatatgctagtattcaagttggttaaagcataccttgtttctacgcctctcaaacgggcggcattgaaggccttgtcaagagcaataacacaagatgagcttatctacatccgggcacaatataacttgttagaaccaaacagtgcagatggtcgaatatgtatcgataacttcaggatggctcttttacaaaactgtactgatgctatgaaagaatctagaacacttgagatcttgcacgcgctggagccgctcgcatataggagaatggactttgaggagttccgcgcagctacaataagcccttaccagcttgaggctgtgcctcggtgggaagaaatcgccagtactgcattcgggtactttgagcaggaaggaaaccgtgctatcacaatcgaggagctagctcaggagatgaatctttcagcggcggcgtattccgtcgtccgtgactggatcagaccatctgacggcaagcttagcttcctaggctacacgaagttcttgcatgggttgacgatgcgaagtggcaacgcaagacggcaccattgaccctcttgctgcccccggtaattacttgagttggttccattggttttgttgatgtggagttggagagagagagagggtgttttgtctctcttcttctgttggcttagcttcttgtagaatgcttgtagagagaaagggggaaaaaaaggaaaccaaaagtgatagctcaaaattgagttgtagaagaaaaggtcatgttttgctcgtttggttctggtacattgtacagttagtcagtcagttgggccatgctacatggtgctatggcctatggccgaacttggttgctctgttgctggtcgcaacagcctacaggaatggtgctgcggttctgatgaaactgttgaggcagtgtagtcgtcttaatgcctgtgattgcgttgtggtttgccagcatgttactgtcatatggcaaagcaaagcttatcttaatgcaaaagggtggagcagaaacgaaactat

SEQ ID NO: 48359 - DNA, 2462 bp, Zea Mays
gccccctcgtcccttgtctcccgtcacgcgagcccccccgcacccccggccgcgcagcccacacgcgcaggcggcaggcgcagtccgtcaccctcaacgcgtccaatgcggggtctgctgctgccgcaattcattttttccctcttcagttcccgtttggtttcgtcacaccaccctccactgccttccttctcgtcgccccctcgtccactgcattaatactgccactccccgccccccgttcccctctcctcgcacgcttccggagctataaatctcggcgccccccggctaccggaccccgcattcccgtgcgcgagctccggtgatcgccgggaccggccggcggccatggggcagtgctacgcgaggaacgtgcacggcgtcgacgccgacgacggcggcgtgggggcgaccaccatcacggtctcggcggcgggagggccggaggatgcggcgtcggtagggggagggggaggacgaggaggagggaggcggagcgcgcggccgtcgccggcgacctcggtgtccacgccgcgccgattcttccgccgcccgttcccgccgccgtccccggccaagcacatcaaggcgtccctcgcgcgccggctcggccaccggtcgccggcctccgcgtcgcaggtgcccatgccgcccgtcgaggtcccgatccaggagcacggggcgggaggcgccgggggtggcgctgggcagcgggagcttgacaagagcttcggctacgaccgccagttcgccgccaagtacgagctagggaaggaggtgggccgcggccatttcggacacacctgcctcgtgcgtgcccgcaagggagacatgagaggccaggtcctggctgtcaaggtcatctccaaagccaagatgacaacagcaatatctattgaggatgtgcgcagagaggtgaaaattttgaaggcgttatctggacattccaatcttgtcaagttttatgatgcttgtgaggatgcccttaatgtctacataatcatggagctttgtgaaggtggagaattattggataggatcttgtccagaggtggaagatacaatgaaggggatgcaaaaattattgttgaacagatattaaaagtagttgccttttgccatcttcagggtgttgttcaccgtgatctgaagccagagaatttcctattcagcacgagggaagagcattctcctatgaagataattgattttggtctctcagattttataagaccaggccattctgggcacgaactgaatcaggtattttccgctcagtgctgagagctgaccccaattttgaagactcaccatggcaatcagtatctcctgaagccaaagattttgtcaaaagacttcttaacaaggattacagaaaaagaatgactgctgcacaggcactttctcacccctggctgcgagatgagcaacaacaaatacctctggatatgctagtattcaagttggttaaagcataccttgtttctacgcctctcaaacgggcggcattgaaggccttgtcaagagcaataacacaagatgagcttatctacatccgggcacaatataacttgttagaaccaaacagtgcagatggtcgaatatgtatcgataacttcaggatggctcttttacaaaactgtactgatgctatgaaagaatctagaacacttgagatcttgcacgcgctggagccgctcgcatataggagaatggactttgaggagttccgcgcagctacaataagcccttaccagcttgaggctgtgcctcggtgggaagaaatcgccagtactgcattcgggtactttgagcaggaaggaaaccgtgctatcacaatcgaggagctagctcaggagatgaatctttcagcggcggcgtattccgtcgtccgtgactggatcagaccatctgacggcaagcttagcttcctaggctacacgaagttcttgcatgggttgacgatgcgaagtggcaacgcaagacggcaccattgaccctcttgctgcccccggtaattacttgagttggttccattggttttgttgatgtggagttggagagagagagagggtgttttgtctctcttcttctgttggcttagcttcttgtagaatgcttgtagagagaaagggggaaaaaaaggaaaccaaaagtgatagctcaaaattgagttgtagaagaaaaggtcatgttttgctcgtttggttctggtacattgtacagttagtcagtcagttgggccatgctacatggtgctatggcctatggccgaacttggttgctctgttgctggtcgcaacagcctacaggaatggtgctgcggttctgatgaaactgttgaggcagtgtagtcgtcttaatgcctgtgattgcgttgtggtttgccagcatgttactgtcatatggcaaagcaaagcttatcttaatgcaaaagggtggagcagaaacgaaactat

SEQ ID NO: 48360 - DNA, 789 bp, Zea Mays
cctccctcgctcggcaccgcaaacaaacagaatccacaagggaggcagaggcagacccgacccgaatcaccgccgtcgtcgtcgttgagaagagacaaagtggaggagtaggccatgtccaacgtgcccacctccctccgcgattcctccctcaccgtcttccgcctcgccatctccagctccgacccctggcccttctcttcctgcctgtaaccaccatcagcccccggccggccggcttcttcgtcctccttcctgatcgagcaaccaccacaagcaagcaaaaagaacaccgagctccttcctggtgaccatcatgcccggcaggcatcatcatcatcagcagcagcagcagctggcggcggtggcgcccaaggggtgcgtgacggtgcgcgtgggcctggagggcgaggagcagcgccggttcgcggtcccgctgggccacctcaagcacccgctcttcggcgcgctgctggaggaggccgagcgcgagtacggcttccggcaccagggcgccctcgccatcccctgccgcgtcgaccgcttcgtccaggtggagcacctcatcggccaggacctccgcgggaccagctgcgcccagcacctcgtggacctcgacggcgccctggcaagcggcggcggagcgcaccaccaccaccagcaccaccacctgcacctgccgcgcttcgttggctgcttccgcgcctgatcgacggcgggccgcgcgtcgagcgagcttggtttggtggcgagagacatgggatgggacatccaggtgttgacgatgac

SEQ ID NO: 48361 - DNA, 814 bp, Zea Mays
ctcgctcggcaccgcaaacaaacagaatccacaagggaggcagaggcagacccgacccgaatcaccgccgtcgtcgtcgttgagaagagacaaagtggaggagtaggccatgtccaacgtgcccacctccctccgcgattcctccctcaccgtcttccgcctcgccatctccagctccgacccctggcccttctcttcctgcctgtaaccaccatcagcccccggccggccggcttcttcgtcctccttcctgatcgagcaaccaccacaagcaagcaaaaagaacaccgagctccttcctggtgaccatcatgcccggcaggcatcatcatcatcagcagcagcagcagctggcggcggtggcgcccaaggggtgcgtgacggtgcgcgtgggcctggagggcgaggagcagcgccggttcgcggtcccgctgggccacctcaagcacccgctcttcggcgcgctgctggaggaggccgagcgcgagtacggcttccggcaccagggcgccctcgccatcccctgccgcgtcgaccgcttcgtccaggtggagcacctcatcggccaggacctccgcgggaccagctgcgcccagcacctcgtggacctcgacggcgccctggcaagcggcggcggagcgcaccaccaccaccagcaccaccacctgcacctgccgcgcttcgttggctgcttccgcgcctgatcgacggcgggccgcgcgtcgagcgagataattgatggcggtgtagaacttctggagttaaaaacaaagagaatgggatttgcgcgctgacttgcaagcatcggctattc

SEQ ID NO: 48362 - DNA, 3036 bp, Zea Mays
tgctactcatctgaaaaccacatatatgactctcatcggaagtcttcactcggggtatacttcgtcttccagcgggtcgaccttggagaaactcgaccagctgcactgatgcgcttagatcaagaggattcgaacgtcccttcaatcactgccgcctcgacgatgatgcactgatcgaggagggctagctcgggagtggaatatctactgacccccgactccgcaaggcatgtccaagccagcagcctcaccaccctcttctttgcctttgcccttgtgtccatccaaccaaccagccacagccactagagaggtcgaatccttactttcttgcaaacaatgggcctccttccaatccacagaatcatcttgctgtgtttttgctcgtctagcttattactgcctcctccagtatcatcggacagccgcatccttcccaacaagccgctgactgttggaagcacgctcacctccgatgacggcacttttgccctgggcttcttctccccgtccaacccggacaagaaacactactactatgttggtatatggtacgccaacattcccaaggacaacgtcgtgtgggttgccaaccgtggaaccccaataatcacggacccttcctctgcaacacttgccctgacgaacacgtccgatcttgttttgtccagcgcggacggccagacgctttggatggcaaacaccagcgctgctgcgtcgtcggagccggagaccaccgccggagaagccacgcttgacaacactggaaacttcatcctctggagttcacagggcgccgtcttatggcaaagcttcgattacccggccgacactcttctgcctggcatgaaatttagagtcacccaccgtaggcatgcactgcaacagctggtctcttggaagggcccccaagacccagccccgggcagcttctcctacggcgcagatcctgacgagctcctgcagcgctttgtcaggaatggctcgagaccatactggagaagtccggtgttgaatagttacttggtagccaggtcatatatcggaattctcaagtccactatctacctcacaataagcaaatacgacgacggtgaggtctatatgtcctttggcgtacccggtggctcctcatcgtcaactgccatgaagatcaaaatggactactcaggaaagatagaaatcctaatctggaacaccaacattttggaatggtacgtcctggaggcacagcctatgaatgaatgcagtacatatggatattgtggtccgtttgggtactgtgataacacagagcttaatgcgacatgcaagtgtctcgacagtttcgagccaataagcaacgaaggcaggagcaatggaagttttacagaaggatgccgccgcaaggagacactaagatgcggcgaagaagatactagtttcttaactttggcggacatgaagattcccgacgagttcgtgcatgtcaagaatagaagcttcgacggatgcacggcggaatgcgctagcaactgctcctgcacaggttacgcttatgccaatttcagcaccacggctttcaccggggatgacacaaggtgcctattatggatgggagatttgattgacacagcgaagcgcactggagatggagaaaatctttaccttcgagtaaacagatcaaataaaaagaggaggagcaatatcctgaaaattactctgccagctgtatcaagtttgctaatactcgtattcatgtggtttgtttggatctgttactcccgagtcaaagaaagaaataaaaaaacttggaagaaggtagtatcaggagttttgggcacttctgatgaactcgaggacgcgaaccttccttgtattagcttccgagaaattgtactagcaacgaacaatttttctagctccaacatgcttggacacggaggtttcggacatgtttataagggaacattagaatgtggtaaggcaattgccgtgaaaaggcttagtaagggttctggccagggggtactggagttcagaaacgaagtaattctcatcgcgaagttgcagcacagaaacctagttaaacttcttggtttctgcattcatggagatgagaaactattgatatatgaatacttatcaaacaaaagtttggatgcctttcttttcaattccacaagaaaaccatcgcttgattggtcaaaaagattcaacataatcttagggatagctagaggacttctttatcttcaccaagattcaaggctgaagataatccacagggatctcaaagcaaacaacatattactggatgatgaaatgaaccccaggatatctgattttggtatggcaagaattttttatggcaaccagcaacaaggaaacaccaaccgcgttgttggcacatatggttacatgtcgcctgaatatgctctggaaggtgtgttttctgtcaagtctgatgtgtatagcttcggagttttagttctagagattgtgagtggctcgaagatcacctctacgcacatgacagaacattaccccaaccttatagcctgtgcttggagcttatggaaggatgggaacacaaaagaatttgttgactcgtccattgttgcggatagttgttcgcttgatgagacttcacagtgcatccatatcgggctcttgtgtgttcaagacaacccaaatgctcggccactcatgtcatcagttgtgtctatcctggagaatggagacacatcacttccacctccaaaacagccaatatattttgcagaaagaaactacggaactgacggagcagcagaagctgttgtgaattctgcaaatactatgagtgttacagcgttggagggacgctagacgtatagttcctgcaaataccgatgcaacacatgcatgagaaagcaacatacattgtataggatgaaaacggtcggaaacggtatttattcggtaatcagttttttggtcgtttttatttgattgcgaataaataggatatataatacactatataaatttgtattcttgtttataacattgagc

SEQ ID NO: 48363 - DNA, 3004 bp, Zea Mays
tgctactcatctgaaaaccacatatatgactctcatcggaagtcttcactcggggtatacttcgtcttccagcgggtcgaccttggagaaactcgaccagctgcactgatgcgcttagatcaagaggattcgaacgtcccttcaatcactgccgcctcgacgatgatgcactgatcgaggagggctagctcgggagtggaatatctactgacccccgactccgcaaggcatgtccaagccagcagcctcaccaccctcttctttgcctttgcccttgtgtccatccaaccaaccagccacagccactagagaggtcgaatccttactttcttgcaaacaatgggcctccttccaatccacagaatcatcttgctgtgtttttgctcgtctagcttattactgcctcctccagtatcatcggacagccgcatccttcccaacaagccgctgactgttggaagcacgctcacctccgatgacggcacttttgccctgggcttcttctccccgtccaacccggacaagaaacactactactatgttggtatatggtacgccaacattcccaaggacaacgtcgtgtgggttgccaaccgtggaaccccaataatcacggacccttcctctgcaacacttgccctgacgaacacgtccgatcttgttttgtccagcgcggacggccagacgctttggatggcaaacaccagcgctgctgcgtcgtcggagccggagaccaccgccggagaagccacgcttgacaacactggaaacttcatcctctggagttcacagggcgccgtcttatggcaaagcttcgattacccggccgacactcttctgcctggcatgaaatttagagtcacccaccgtaggcatgcactgcaacagctggtctcttggaagggcccccaagacccagccccgggcagcttctcctacggcgcagatcctgacgagctcctgcagcgctttgtcaggaatggctcgagaccatactggagaagtccggtgttgaatagttacttggtagccaggtcatatatcggaattctcaagtccactatctacctcacaataagcaaatacgacgacggtgaggtctatatgtcctttggcgtacccggtggctcctcatcgtcaactgccatgaagatcaaaatggactactcaggaaagatagaaatcctaatctggaacaccaacattttggaatggtacgtcctggaggcacagcctatgaatgaatgcagtacatatggatattgtggtccgtttgggtactgtgataacacagagcttaatgcgacatgcaagtgtctcgacagtttcgagccaataagcaacgaaggcaggagcaatggaagttttacagaaggatgccgccgcaaggagacactaagatgcggcgaagaagatactagtttcttaactttggcggacatgaagattcccgacgagttcgtgcatgtcaagaatagaagcttcgacggatgcacggcggaatgcgctagcaactgctcctgcacaggttacgcttatgccaatttcagcaccacggctttcaccggggatgacacaaggtgcctattatggatgggagatttgattgacacagcgaagcgcactggagatggagaaaatctttaccttcgagtaaacagatcaaataaaaagaggaggagcaatatcctgaaaattactctgccagctgtatcaagtttgctaatactcgtattcatgtggtttgtttggatctgttactcccgagtcaaagaaagaaataaaaaaacttggaagaaggtagtatcaggagttttgggcacttctgatgaactcgaggacgcgaaccttccttgtattagcttccgagaaattgtactagcaacgaacaatttttctagctccaacatgcttggacacggaggtttcggacatgtttataagggaacattagaatgtggtaaggcaattgccgtgaaaaggcttagtaagggttctggccagggggtactggagttcagaaacgaagtaattctcatcgcgaagttgcagcacagaaacctagttaaacttcttggtttctgcattcatggagatgagaaactattgatatatgaatacttatcaaacaaaagtttggatgcctttcttttcaattccacaagaaaaccatcgcttgattggtcaaaaagattcaacataatcttagggatagctagaggacttctttatcttcaccaagattcaaggctgaagataatccacagggatctcaaagcaaacaacatattactggatgatgaaatgaaccccaggatatctgattttggtatggcaagaattttttatggcaaccagcaacaaggaaacaccaaccgcgttgttggcacatagtgtgttttctgtcaagtctgatgtgtatagcttcggagttttagttctagagattgtgagtggctcgaagatcacctctacgcacatgacagaacattaccccaaccttatagcctgtgcttggagcttatggaaggatgggaacacaaaagaatttgttgactcgtccattgttgcggatagttgttcgcttgatgagacttcacagtgcatccatatcgggctcttgtgtgttcaagacaacccaaatgctcggccactcatgtcatcagttgtgtctatcctggagaatggagacacatcacttccacctccaaaacagccaatatattttgcagaaagaaactacggaactgacggagcagcagaagctgttgtgaattctgcaaatactatgagtgttacagcgttggagggacgctagacgtatagttcctgcaaataccgatgcaacacatgcatgagaaagcaacatacattgtataggatgaaaacggtcggaaacggtatttattcggtaatcagttttttggtcgtttttatttgattgcgaataaataggatatataatacactatataaatttgtattcttgtttataacattgagc

SEQ ID NO: 48364 - DNA, 3033 bp, Zea Mays
tgctactcatctgaaaaccacatatatgactctcatcggaagtcttcactcggggtatacttcgtcttccagcgggtcgaccttggagaaactcgaccagctgcactgatgcgcttagatcaagaggattcgaacgtcccttcaatcactgccgcctcgacgatgatgcactgatcgagggctagctcgggagtggaatatctactgacccccgactccgcaaggcatgtccaagccagcagcctcaccaccctcttctttgcctttgcccttgtgtccatccaaccaaccagccacagccactagagaggtcgaatccttactttcttgcaaacaatgggcctccttccaatccacagaatcatcttgctgtgtttttgctcgtctagcttattactgcctcctccagtatcatcggacagccgcatccttcccaacaagccgctgactgttggaagcacgctcacctccgatgacggcacttttgccctgggcttcttctccccgtccaacccggacaagaaacactactactatgttggtatatggtacgccaacattcccaaggacaacgtcgtgtgggttgccaaccgtggaaccccaataatcacggacccttcctctgcaacacttgccctgacgaacacgtccgatcttgttttgtccagcgcggacggccagacgctttggatggcaaacaccagcgctgctgcgtcgtcggagccggagaccaccgccggagaagccacgcttgacaacactggaaacttcatcctctggagttcacagggcgccgtcttatggcaaagcttcgattacccggccgacactcttctgcctggcatgaaatttagagtcacccaccgtaggcatgcactgcaacagctggtctcttggaagggcccccaagacccagccccgggcagcttctcctacggcgcagatcctgacgagctcctgcagcgctttgtcaggaatggctcgagaccatactggagaagtccggtgttgaatagttacttggtagccaggtcatatatcggaattctcaagtccactatctacctcacaataagcaaatacgacgacggtgaggtctatatgtcctttggcgtacccggtggctcctcatcgtcaactgccatgaagatcaaaatggactactcaggaaagatagaaatcctaatctggaacaccaacattttggaatggtacgtcctggaggcacagcctatgaatgaatgcagtacatatggatattgtggtccgtttgggtactgtgataacacagagcttaatgcgacatgcaagtgtctcgacagtttcgagccaataagcaacgaaggcaggagcaatggaagttttacagaaggatgccgccgcaaggagacactaagatgcggcgaagaagatactagtttcttaactttggcggacatgaagattcccgacgagttcgtgcatgtcaagaatagaagcttcgacggatgcacggcggaatgcgctagcaactgctcctgcacaggttacgcttatgccaatttcagcaccacggctttcaccggggatgacacaaggtgcctattatggatgggagatttgattgacacagcgaagcgcactggagatggagaaaatctttaccttcgagtaaacagatcaaataaaaagaggaggagcaatatcctgaaaattactctgccagctgtatcaagtttgctaatactcgtattcatgtggtttgtttggatctgttactcccgagtcaaagaaagaaataaaaaaacttggaagaaggtagtatcaggagttttgggcacttctgatgaactcgaggacgcgaaccttccttgtattagcttccgagaaattgtactagcaacgaacaatttttctagctccaacatgcttggacacggaggtttcggacatgtttataagggaacattagaatgtggtaaggcaattgccgtgaaaaggcttagtaagggttctggccagggggtactggagttcagaaacgaagtaattctcatcgcgaagttgcagcacagaaacctagttaaacttcttggtttctgcattcatggagatgagaaactattgatatatgaatacttatcaaacaaaagtttggatgcctttcttttcaattccacaagaaaaccatcgcttgattggtcaaaaagattcaacataatcttagggatagctagaggacttctttatcttcaccaagattcaaggctgaagataatccacagggatctcaaagcaaacaacatattactggatgatgaaatgaaccccaggatatctgattttggtatggcaagaattttttatggcaaccagcaacaaggaaacaccaaccgcgttgttggcacatatggttacatgtcgcctgaatatgctctggaaggtgtgttttctgtcaagtctgatgtgtatagcttcggagttttagttctagagattgtgagtggctcgaagatcacctctacgcacatgacagaacattaccccaaccttatagcctgtgcttggagcttatggaaggatgggaacacaaaagaatttgttgactcgtccattgttgcggatagttgttcgcttgatgagacttcacagtgcatccatatcgggctcttgtgtgttcaagacaacccaaatgctcggccactcatgtcatcagttgtgtctatcctggagaatggagacacatcacttccacctccaaaacagccaatatattttgcagaaagaaactacggaactgacggagcagcagaagctgttgtgaattctgcaaatactatgagtgttacagcgttggagggacgctagacgtatagttcctgcaaataccgatgcaacacatgcatgagaaagcaacatacattgtataggatgaaaacggtcggaaacggtatttattcggtaatcagttttttggtcgtttttatttgattgcgaataaataggatatataatacactatataaatttgtattcttgtttataacattgagc

SEQ ID NO: 48365 - DNA, 2506 bp, Zea Mays
atcaccctcggtatacccctctctcccgcgttcttcattcctaggtcagacggacgcgcatccccgcaagcacgttcccgtgctctcgcagctcgcttctccagaggcgactagggtttgaaggctaccgagagggtgctactgggccaactcctccgaccgcccgcaggcgaaggagctctccgccttcccgccctcgtgtcatccttcccatcgcgacccgcgaggccacgagcccacgagctccagctcttgttattcggaagggttctggatttgggagccaagcgactggcgcagcggcagagcccggcggacacgctcccccctgtcgcccattctcttcctccccgagcggcacccccgcgtgttgccgcttgtagcatcggggaggactggtgcggtttctgctggggaccatggtttacaaaatggtggacccaaatcccttgctccaaactccgacactgtagtcaggcatcaactccagggtgcatccttgcacaaagacttagctcttgaagatcctaatactcgtatcatggatcccgagaccaaggaactttactttagatcacaatcacaagaggacgagatcttgttgcttcgcaagaaaattgctgaggcgtctctcaaggagctgagtttgctgagtgaaaaacacattctggagaggaggctcacagacttgaggatggctgttgacgagaagcaggaagaagctatatctggtgctttgaaacaattgaaccagaagaaaacccatctcgaggacaatatgcgactggcaaatgaactaaaagttgaggaagaagagctatacttttttacttcttcattgcttagcatgctagcagaatacaacatccgcccacctcaaataaatgcatctaccattacaattggcacaaagcgcttgtaccaacagatgcattggaagctcaaatctttaaatgacaatttaggtgatatgcctcaacctggaaacatttataactccagtcatcagcaacagcaagtaaccctaccaagaaatgaagcttccccatcttataatatggtttcaaataagaatgctcttcaacaatatgctcaaggtccaagtgaccgacatattgagcaaatgtaccatggatccagttttcagcaggatactggaggtactactccctctaattattttgaagaaggaagagtagacggtggctcacagttatacccatctgatggtgatgctttacctggtattgagggatttcaaattgctggtgaacctagaccaggatgtcaattaacagcatgcggtttccctacaaatggtactaccctttgcaatttccagtgggttcgccatcttgaaaatggtatcaaacagtctatcgaaggtgccacgatgtatgactatgtggttactgcagatgatgttggtactcttcttgctgtagactgtacgcctatggatgacaacggccgccagggtgatttggtgacagaatttgctaataatgggaataagataacatgtgatccagagatgcagagtcatatcgatgcatgtatttctaaagggagagctgaatttgaagtttttgtcctggcttattctcctgaggaatgggaactggctacattggtgctcacacgacctaattatcagattaagttcaaacagaccggtaatgttgtaattgacgagaagtactcacaaagtctacagacaaaaattccaaatgggcgcacaactcagtttgttttaataactgcgggtacaactcttccatttaacacacagggaatatcagagccaaacaatgaggattacgatgttaggttacgtgatctaatcgtattagtcatgagaacttttcagaaaaaggctctagatgctaaaaggaaaggaaaggcttagaattcatgtaaatcttttacaaaagtagaaccgtagaagattttcctatttctgattgttttgtgcagtatttgataatttttgtccttgaggtggaatgagcttctcgatagagcaggaatttcaagagttacctggtgggcacataaatggttagaggaacgtaggatcgattcttatcctaattcttttttccttcgcattgcttactctaagttaagccatgtcactgcggtctttgtaaattctaagcagccagtgctgcaaataaacctatgagatgttcgctgcagctcttggatgacttaacatgcccatatgattgttgattttgtttatcatgttgatcaccatgctgctacttacactatgttcacaaagaatagcggtatgggttctcaatatggccataacccattccttttgcgtttccattaacggtgcttcaaccatacagcacaccgcatgaaagaactagcctgaatagcaatttccaaacgtatgctccgtttgggcttcagcttgcaaatgagcggcaaccactacgaatttcccagatccagaaaaaagggaagaagttaaaaaaaaaagaataaa

SEQ ID NO: 48366 - DNA, 2649 bp, Zea Mays
atcaccctcggtatacccctctctcccgcgttcttcattcctaggtcagacggacgcgcatccccgcaagcacgttcccgtgctctcgcagctcgcttctccagaggcgactagggtttgaaggctaccgagagggtgctactgggccaactcctccgaccgcccgcaggcgaaggagctctccgccttcccgccctcgtgtcatccttcccatcgcgacccgcgaggccacgagcccacgagctccagctcttgttattcggaagggttctggatttgggagccaagcgactggcgcagcggcagagcccggcggacacgctcccccctgtcgcccattctcttcctccccgagcggcacccccgcgtgttgccgcttgtagcatcggggagaaaaatacagaggaaggacatgagggatccatttgatgcaccggttgatctcattaatgtggaccataatggtggctatcaactatccaggactggtgcggtttctgctggggaccatggtttacaaaatggtggacccaaatcccttgctccaaactccgacactgtagtcaggcatcaactccagggtgcatccttgcacaaagacttagctcttgaagatcctaatactcgtatcatggatcccgagaccaaggaactttactttagatcacaatcacaagaggacgagatcttgttgcttcgcaagaaaattgctgaggcgtctctcaaggagctgagtttgctgagtgaaaaacacattctggagaggaggctcacagacttgaggatggctgttgacgagaagcaggaagaagctatatctggtgctttgaaacaattgaaccagaagaaaacccatctcgaggacaatatgcgactggcaaatgaactaaaagttgaggaagaagagctatacttttttacttcttcattgcttagcatgctagcagaatacaacatccgcccacctcaaataaatgcatctaccattacaattggcacaaaggacaatttaggtgatatgcctcaacctggaaacatttataactccagtcatcagcaacagcaagtaaccctaccaagaaatgaagcttccccatcttataatatggtttcaaataagaatgctcttcaacaatatgctcaaggtccaagtgaccgacatattgagcaaatgtaccatggatccagttttcagcaggatactggaggtactactccctctaattattttgaagaaggaagagtagacggtggctcacagttatacccatctgatggtgatgctttacctggtattgagggatttcaaattgctggtgaacctagaccaggatgtcaattaacagcatgcggtttccctacaaatggtactaccctttgcaatttccagtgggttcgccatcttgaaaatggtatcaaacagtctatcgaaggtaaagtggggaatttttcctagatcgtttggcatattattgttcaaggtaatttaattttgctgactggttattcatattttgaaatttaggtgccacgatgtatgactatgtggttactgcagatgatgttggtactcttcttgctgtagactgtacgcctatggatgacaacggccgccagggtgatttggtgacagaatttgctaataatgggaataagataacatgtgatccagagatgcagagtcatatcgatgcatgtatttctaaagggagagctgaatttgaagtttttgtcctgcaggcttattctcctgaggaatgggaactggctacattggtgctcacacgacctaattatcagattaagttcaaacagaccggtaatgttgtaattgacgagaagtactcacaaagtctacagacaaaaattccaaatgggcgcacaactcagtttgttttaataactgcgggtacaactcttccatttaacacacagggaatatcagagccaaacaatgaggattacgatgttaggttacgtgatctaatcgtattagtcatgagaacttttcagaaaaaggctctagatgctaaaaggaaaggaaaggcttagaattcatgtaaatcttttacaaaagtagaaccgtagaagattttcctatttctgattgttttgtgcagtatttgataatttttgtccttgaggtggaatgagcttctcgatagagcaggaatttcaagagttacctggtgggcacataaatggttagaggaacgtaggatcgattcttatcctaattcttttttccttcgcattgcttactctaagttaagccatgtcactgcggtctttgtaaattctaagcagccagtgctgcaaataaacctatgagatgttcgctgcagctcttggatgacttaacatgcccatatgattgttgattttgtttatcatgttgatcaccatgctgctacttacactatgttcacaaagaatagcggtatgggttctcaatatggccataacccattccttttgcgtttccattaacggtgcttcaaccatacagcacaccgcatgaaagaactagcctgaatagcaatttccaaacgtatgctccgtttgggcttcagcttgcaaatgagcggcaaccactacgaatttcccagatccagaaaaaagggaagaagttaaaaaaaaaagaataaa

SEQ ID NO: 48367 - DNA, 2717 bp, Zea Mays
atcaccctcggtatacccctctctcccgcgttcttcattcctaggtcagacggacgcgcatccccgcaagcacgttcccgtgctctcgcagctcgcttctccagaggcgactagggtttgaaggctaccgagagggtgctactgggccaactcctccgaccgcccgcaggcgaaggagctctccgccttcccgccctcgtgtcatccttcccatcgcgacccgcgaggccacgagcccacgagctccagctcttgttattcggaagggttctggatttgggagccaagcgactggcgcagcggcagagcccggcggacacgctcccccctgtcgcccattctcttcctccccgagcggcacccccgcgtgttgccgcttgtagcatcggggagaaaaatacagaggaaggacatgagggatccatttgatgcaccggttgatctcattaatgtggaccataatggtggctatcaactatccaggactggtgcggtttctgctggggaccatggtttacaaaatggtggacccaaatcccttgctccaaactccgacactgtagtcagcaggcatcaactccagggtgcatccttgcacaaagacttagctcttgaagatcctaatactcgtatcatggatcccgagaccaaggaactttactttagatcacaatcacaagaggacgagatcttgttgcttcgcaagaaaattgctgaggcgtctctcaaggagctgagtttgctgagtgaaaaacacattctggagaggaggctcacagacttgaggatggctgttgacgagaagcaggaagaagctatatctggtgctttgaaacaattgaaccagaagaaaacccatctcgaggacaatatgcgactggcaaatgaactaaaagttgaggaagaagagctatacttttttacttcttcattgcttagcatgctagcagaatacaacatccgcccacctcaaataaatgcatctaccattacaattggcacaaagcgcttgtaccaacagatgcattggaagctcaaatctttaaatgtgatatgcctcaacctggaaacatttataactccagtcatcagcaacagcaagtaaccctaccaagaaatgaagcttccccatcttataatatggtttcaaataagaatgctcttcaacaatatgctcaaggtccaagtgaccgacatattgagcaaatgtaccatggatccagttttcagcagtaattcaagatcttccattatctaaatattgtttgtagttatacagcctaacctctgatctgcatgaaaataccttgacatctgtttattatattcctcattctttcagggatactggaggtactactccctctaattattttgaagaaggaagagtagacggtggctcacagttatacccatctgatggtgatgctttacctggtattgagggatttcaaattgctggtgaacctagaccaggatgtcaattaacagcatgcggtttccctacaaatggtactaccctttgcaatttccagtgggttcgccatcttgaaaatggtatcaaacagtctatcgaaggtaaagtggggaatttttcctagatcgtttggcatattattgttcaagatgatgttggtactcttcttgctgtagactgtacgcctatggatgacaacggccgccagggtgatttggtgacagaatttgctaataatgggaataagataacatgtgatccagagatgcagagtcatatcgatgcatgtatttctaaagggagagctgaatttgaagtttttgtcctgcaggcttattctcctgaggaatgggaactggctacattggtgctcacacgacctaattatcagattaagttcaaacagaccggtaatgttgtaattgacgagaagtactcacaaagtctacagacaaaaattccaaatgggcgcacaactcagtttgttttaataactgcgggtacaactcttccatttaacacacagggaatatcagagccaaacaatgaggattacgatgttaggttacgtgatctaatcgtattagtcatgagaacttttcagaaaaaggctctagatgctaaaaggaaaggaaaggcttagaattcatgtaaatcttttacaaaagtagaaccgtagaagattttcctatttctgattgttttgtgcagtatttgataatttttgtccttgaggtggaatgagcttctcgatagagcaggaatttcaagagttacctggtgggcacataaatggttagaggaacgtaggatcgattcttatcctaattcttttttccttcgcattgcttactctaagttaagccatgtcactgcggtctttgtaaattctaagcagccagtgctgcaaataaacctatgagatgttcgctgcagctcttggatgacttaacatgcccatatgattgttgattttgtttatcatgttgatcaccatgctgctacttacactatgttcacaaagaatagcggtatgggttctcaatatggccataacccattccttttgcgtttccattaacggtgcttcaaccatacagcacaccgcatgaaagaactagcctgaatagcaatttccaaacgtatgctccgtttgggcttcagcttgcaaatgagcggcaaccactacgaatttcccagatccagaaaaaagggaagaagttaaaaaaaaaagaataaa

SEQ ID NO: 48368 - DNA, 2729 bp, Zea Mays
atcaccctcggtatacccctctctcccgcgttcttcattcctaggtcagacggacgcgcatccccgcaagcacgttcccgtgctctcgcagctcgcttctccagaggcgactagggtttgaaggctaccgagagggtgctactgggccaactcctccgaccgcccgcaggcgaaggagctctccgccttcccgccctcgtgtcatccttcccatcgcgacccgcgaggccacgagcccacgagctccagctcttgttattcggaagggttctggatttgggagccaagcgactggcgcagcggcagagcccggcggacacgctcccccctgtcgcccattctcttcctccccgagcggcacccccgcgtgttgccgcttgtagcatcggggagaaaaatacagaggaaggacatgagggatccatttgatgcaccggttgatctcattaatgtggaccataatggtggctatcaactatccaggactggtgcggtttctgctggggaccatggtttacaaaatggtggacccaaatcccttgctccaaactccgacactgtagtcaggcatcaactccagggtgcatccttgcacaaagacttagctcttgaagatcctaatactcgtatcatggatcccgagaccaaggaactttactttagatcacaatcacaagaggacgagatcttgttgcttcgcaagaaaattgctgaggcgtctctcaaggagctgagtttgctgagtgaaaaacacattctggagaggaggctcacagacttgaggatggctgttgacgagaagcaggaagaagctatatctggtgctttgaaacaattgaaccagaagaaaacccatctcgaggacaatatgcgactggcaaatgaactaaaagtatggtgctattgtacatttcaagaatgttgaggaagaagagctatacttttttacttcttcattgcttagcatgctagcagaatacaacatccgcccacctcaaataaatgcatctaccattacaattggcacaaagcgcttgtaccaacagatgcattggaagctcaaatctttaaatgtgatatgcctcaacctggaaacatttataactccagtcatcagcaacagcaagtaaccctaccaagaaatgaagcttccccatcttataatatggtttcaaataagaatgctcttcaacaatatgctcaaggtccaagtgaccgacatattgagcaaatgtaccatggatccagttttcagcaggatactggaggtactactccctctaattattttgaagaaggaagagtagacggtggctcacagttatacccatctgatggtgatgctttacctggtattgagggatttcaaattgctggtgaacctagaccaggatgtcaattaacagcatgcggtttccctacaaatggtactaccctttgcaatttccaggtatgttgttttctgctcttttgttatgattttttataattgctataaatgtcaattcttgtaaataaaacctttcaccccattgatgttgctgttttagtgggttcgccatcttgaaaatggtatcaaacagtctatcgaaggtaaagtggggaatttttcctagatcgtttggcatattattgttcaagatgatgttggtactcttcttgctgtagactgtacgcctatggatgacaacggccgccagggtgatttggtgacagaatttgctaataatgggaataagataacatgtgatccagagatgcagagtcatatcgatgcatgtatttctaaagggagagctgaatttgaagtttttgtcctggcttattctcctgaggaatgggaactggctacattggtgctcacacgacctaattatcagattaagttcaaacagaccggtaatgttgtaattgacgagaagtactcacaaagtctacagacaaaaattccaaatgggcgcacaactcagtttgttttaataactgcgggtacaactcttccatttaacacacagggaatatcagagccaaacaatgaggattacgatgttaggttacgtgatctaatcgtattagtcatgagaacttttcagaaaaaggctctagatgctaaaaggaaaggaaaggcttagaattcatgtaaatcttttacaaaagtagaaccgtagaagattttcctatttctgattgttttgtgcagtatttgataatttttgtccttgaggtggaatgagcttctcgatagagcaggaatttcaagagttacctggtgggcacataaatggttagaggaacgtaggatcgattcttatcctaattcttttttccttcgcattgcttactctaagttaagccatgtcactgcggtctttgtaaattctaagcagccagtgctgcaaataaacctatgagatgttcgctgcagctcttggatgacttaacatgcccatatgattgttgattttgtttatcatgttgatcaccatgctgctacttacactatgttcacaaagaatagcggtatgggttctcaatatggccataacccattccttttgcgtttccattaacggtgcttcaaccatacagcacaccgcatgaaagaactagcctgaatagcaatttccaaacgtatgctccgtttgggcttcagcttgcaaatgagcggcaaccactacgaatttcccagatccagaaaaaagggaagaagttaaaaaaaaaagaataaa

SEQ ID NO: 48369 - DNA, 2604 bp, Zea Mays
atcaccctcggtatacccctctctcccgcgttcttcattcctaggtcagacggacgcgcatccccgcaagcacgttcccgtgctctcgcagctcgcttctccagaggcgactagggtttgaaggctaccgagagggtgctactgggccaactcctccgaccgcccgcaggcgaaggagctctccgccttcccgccctcgtgtcatccttcccatcgcgacccgcgaggccacgagcccacgagctccagctcttgttattcggaagggttctggatttgggagccaagcgactggcgcagcggcagagcccggcggacacgctcccccctgtcgcccattctcttcctccccgagcggcacccccgcgtgttgccgcttgtagcatcggggagaaaaatacagaggaaggacatgagggatccatttgatgcaccggttgatctcattaatgtggaccataatggtggctatcaactatccaggactggtgcggtttctgctggggaccatggtttacaaaatggtggacccaaatcccttgctccaaactccgacactgtagtcaggcatcaactccagggtgcatccttgcacaaagacttagctcttgaagatcctaatactcgtatcatggatcccgagaccaaggaactttactttagatcacaatcacaagaggacgagatcttgttgcttcgcaagaaaattgctgaggcgtctctcaaggagctgagtttgctgagtgaaaaacacattctggagaggaggctcacagacttgaggatggctgttgacgagaagcaggaagaagctatatctggtgctttgaaacaattgaaccagaagaaaacccatctcgaggacaatatgcgactggcaaatgaactaaaagttgaggaagaagagctatacttttttacttcttcattgcttagcatgctagcagaatacaacatccgcccacctcaaataaatgcatctaccattacaattggcacaaagcgcttgtaccaacagatgcattggaagctcaaatctttaaatgtgatatgcctcaacctggaaacatttataactccagtcatcagcaacagcaagtaaccctaccaagaaatgaagcttccccatcttataatatggtttcaaataagaatgctcttcaacaatatgctcaaggtccaagtgaccgacatattgagcaaatgtaccatggatccagttttcagcaggatactggaggtactactccctctaattattttgaagaaggaagagtagacggtggctcacagttatacccatctgatggtgatgctttacctggtattgagggatttcaaattgctggtgaacctagaccaggatgtcaattaacagcatgcggtttccctacaaatggtactaccctttgcaatttccagtgggttcgccatcttgaaaatggtatcaaacagtctatcgaaggtaaagtggggaatttttcctagatcgtttggcatattattgttcaagatgatgttggtactcttcttgctgtagactgtacgcctatggatgacaacggccgccagggtgatttggtgacagaatttgctaataatgggaataagataacatgtgatccagagatgcagagtcatatcgatgcatgtatttctaaagggagagctgaatttgaagtttttgtcctgcaggcttattctcctgaggaatgggaactggctacattggtgctcacacgacctaattatcagattaagttcaaacagaccggtaatgttgtaattgacgagaagtactcacaaagtctacagacaaaaattccaaatgggcgcacaactcagtttgttttaataactgcgggtacaactcttccatttaacacacagggaatatcagagccaaacaatgaggattacgatgttaggttacgtgatctaatcgtattagtcatgagaacttttcagaaaaaggctctagatgctaaaaggaaaggaaaggcttagaattcatgtaaatcttttacaaaagtagaaccgtagaagattttcctatttctgattgttttgtgcagtatttgataatttttgtccttgaggtggaatgagcttctcgatagagcaggaatttcaagagttacctggtgggcacataaatggttagaggaacgtaggatcgattcttatcctaattcttttttccttcgcattgcttactctaagttaagccatgtcactgcggtctttgtaaattctaagcagccagtgctgcaaataaacctatgagatgttcgctgcagctcttggatgacttaacatgcccatatgattgttgattttgtttatcatgttgatcaccatgctgctacttacactatgttcacaaagaatagcggtatgggttctcaatatggccataacccattccttttgcgtttccattaacggtgcttcaaccatacagcacaccgcatgaaagaactagcctgaatagcaatttccaaacgtatgctccgtttgggcttcagcttgcaaatgagcggcaaccactacgaatttcccagatccagaaaaaagggaagaagttaaaaaaaaaagaataaa

SEQ ID NO: 48370 - DNA, 2431 bp, Zea Mays
cttctagtctatttaatgatttaatgaatgttgatattattactgaaccaattaggagaagccaattgaattgtaccatttcggtagcccctgatgggagttctttgatctgaaaaaatacagaggaaggacatgagggatccatttgatgcaccggttgatctcattaatgtggaccataatggtggctatcaactatccaggactggtgcggtttctgctggggaccatggtttacaaaatggtggacccaaatcccttgctccaaactccgacactgtagtcaggcatcaactccagggtgcatccttgcacaaagacttagctcttgaagatcctaatactcgtatcatggatcccgagaccaaggaactttactttagatcacaatcacaagaggacgagatcttgttgcttcgcaagaaaattgctgaggcgtctctcaaggagctgagtttgctgagtgaaaaacacattctggagaggaggctcacagacttgaggatggctgttgacgagaagcaggaagaagctatatctggtgctttgaaacaattgaaccagaagaaaacccatctcgaggacaatatgcgactggcaaatgaactaaaagttgaggaagaagagctatacttttttacttcttcattgcttagcatgctagcagaatacaacatccgcccacctcaaataaatgcatctaccattacaattggcacaaagcgcttgtaccaacagatgcattggaagctcaaatctttaaatgtgatatgcctcaacctggaaacatttataactccagtcatcagcaacagcaagtaaccctaccaagaaatgaagcttccccatcttataatatggtttcaaataagaatgctcttcaacaatatgctcaaggtccaagtgaccgacatattgagcaaatgtaccatggatccagttttcagcaggatactggaggtactactccctctaattattttgaagaaggaagagtagacggtggctcacagttatacccatctgatggtgatgctttacctggtattgagggatttcaaattgctggtgaacctagaccaggatgtcaattaacagcatgcggtttccctacaaatggtactaccctttgcaatttccagtgggttcgccatcttgaaaatggtatcaaacagtctatcgaaggtaaagtggggaatttttcctagatcgtttggcatattattgttcaagatgatgttggtactcttcttgctgtagactgtacgcctatggatgacaacggccgccagggtgatttggtgacagaatttgctaataatgggaataagataacatgtgatccagagatgcagagtcatatcgatgcatgtatttctaaagggagagctgaatttgaagtttttgtcctggcttattctcctgaggaatgggaactggctacattggtgctcacacgacctaattatcagattaagttcaaacagaccggtaatgttgtaattgacgagaagtactcacaaagtctacagacaaaaattccaaatgggcgcacaactcagtttgttttaataactgcgggtacaactcttccatttaacacacagggaatatcagagccaaacaatgaggattacgatgttaggtaccaactgttacacttcattatcagtcttatctgtggcatagttttctttccatttttgcaaataaaatgaaaaaccccatatatctgattatcagactcttttttaggttacgtgatctaatcgtattagtcatgagaacttttcagaaaaaggctctagatgctaaaaggaaaggaaaggcttagaattcatgtaaatcttttacaaaagtagaaccgtagaagattttcctatttctgattgttttgtgcagtatttgataatttttgtccttgaggtggaatgagcttctcgatagagcaggaatttcaagagttacctggtgggcacataaatggttagaggaacgtaggatcgattcttatcctaattcttttttccttcgcattgcttactctaagttaagccatgtcactgcggtctttgtaaattctaagcagccagtgctgcaaataaacctatgagatgttcgctgcagctcttggatgacttaacatgcccatatgattgttgattttgtttatcatgttgatcaccatgctgctacttacactatgttcacaaagaatagcggtatgggttctcaatatggccataacccattccttttgcgtttccattaacggtgcttcaaccatacagcacaccgcatgaaagaactagcctgaatagcaatttccaaacgtatgctccgtttgggcttcagcttgcaaatgagcggcaaccactacgaatttcccagatccagaaaaaagggaagaagttaaaaaaaaaagaataaa

SEQ ID NO: 48371 - DNA, 2212 bp, Zea Mays
aatgatttaatgaatgttgatattattactgaaccaattaggagaagccaattgaattgtaccatttcggtagcccctgatgggagttctttgatctgagactggtgcggtttctgctggggaccatggtttacaaaatggtggacccaaatcccttgctccaaactccgacactgtagtcaggcatcaactccagggtgcatccttgcacaaagacttagctcttgaagatcctaatactcgtatcatggatcccgagaccaaggaactttactttagatcacaatcacaagaggacgagatcttgttgcttcgcaagaaaattgctgaggcgtctctcaaggagctgagtttgctgagtgaaaaacacattctggagaggaggctcacagacttgaggatggctgttgacgagaagcaggaagaagctatatctggtgctttgaaacaattgaaccagaagaaaacccatctcgaggacaatatgcgactggcaaatgaactaaaagttgaggaagaagagctatacttttttacttcttcattgcttagcatgctagcagaatacaacatccgcccacctcaaataaatgcatctaccattacaattggcacaaagcgcttgtaccaacagatgcattggaagctcaaatctttaaatgacaatttaggtgatatgcctcaacctggaaacatttataactccagtcatcagcaacagcaagtaaccctaccaagaaatgaagcttccccatcttataatatggtttcaaataagaatgctcttcaacaatatgctcaaggtccaagtgaccgacatattgagcaaatgtaccatggatccagttttcagcaggatactggaggtactactccctctaattattttgaagaaggaagagtagacggtggctcacagttatacccatctgatggtgatgctttacctggtattgagggatttcaaattgctggtgaacctagaccaggatgtcaattaacagcatgcggtttccctacaaatggtactaccctttgcaatttccagtgggttcgccatcttgaaaatggtatcaaacagtctatcgaaggtgccacgatgtatgactatgtggttactgcagatgatgttggtactcttcttgctgtagactgtacgcctatggatgacaacggccgccagggtgatttggtgacagaatttgctaataatgggaataagataacatgtgatccagagatgcagagtcatatcgatgcatgtatttctaaagggagagctgaatttgaagtttttgtcctggcttattctcctgaggaatgggaactggctacattggtgctcacacgacctaattatcagattaagttcaaacagaccggtaatgttgtaattgacgagaagtactcacaaagtctacagacaaaaattccaaatgggcgcacaactcagtttgttttaataactgcgggtacaactcttccatttaacacacagggaatatcagagccaaacaatgaggattacgatgttaggttacgtgatctaatcgtattagtcatgagaacttttcagaaaaaggctctagatgctaaaaggaaaggaaaggcttagaattcatgtaaatcttttacaaaagtagaaccgtagaagattttcctatttctgattgttttgtgcagtatttgataatttttgtccttgaggtggaatgagcttctcgatagagcaggaatttcaagagttacctggtgggcacataaatggttagaggaacgtaggatcgattcttatcctaattcttttttccttcgcattgcttactctaagttaagccatgtcactgcggtctttgtaaattctaagcagccagtgctgcaaataaacctatgagatgttcgctgcagctcttggatgacttaacatgcccatatgattgttgattttgtttatcatgttgatcaccatgctgctacttacactatgttcacaaagaatagcggtatgggttctcaatatggccataacccattccttttgcgtttccattaacggtgcttcaaccatacagcacaccgcatgaaagaactagcctgaatagcaatttccaaacgtatgctccgtttgggcttcagcttgcaaatgagcggcaaccactacgaatttcccagatccagaaaaaagggaagaagttaaaaaaaaaagaataaa

SEQ ID NO: 48372 - DNA, 2261 bp, Zea Mays
agccaattgaattgtaccatttcggtagcccctgatgggagttctttgatctgaaaaaatacagaggaaggacatgagggatccatttgatgcaccggttgatctcattaatgtggaccataatggtggctatcaactatccaggactggtgcggtttctgctggggaccatggtttacaaaatggtggacccaaatcccttgctccaaactccgacactgtagtcaggcatcaactccagggtgcatccttgcacaaagacttagctcttgaagatcctaatactcgtatcatggatcccgagaccaaggaactttactttagatcacaatcacaagaggacgagatcttgttgcttcgcaagaaaattgctgaggcgtctctcaaggagctgagtttgctgagtgaaaaacacattctggagaggaggctcacagacttgaggatggctgttgacgagaagcaggaagaagctatatctggtgctttgaaacaattgaaccagaagaaaacccatctcgaggacaatatgcgactggcaaatgaactaaaagtatggtgctattgtacatttcaagaatgttgaggaagaagagctatacttttttacttcttcattgcttagcatgctagcagaatacaacatccgcccacctcaaataaatgcatctaccattacaattggcacaaagcgcttgtaccaacagatgcattggaagctcaaatctttaaatgacaatttaggtgatatgcctcaacctggaaacatttataactccagtcatcagcaacagcaagtaaccctaccaagaaatgaagcttccccatcttataatatggtttcaaataagaatgctcttcaacaatatgctcaaggtccaagtgaccgacatattgagcaaatggatactggaggtactactccctctaattattttgaagaaggaagagtagacggtggctcacagttatacccatctgatggtgatgctttacctggtattgagggatttcaaattgctggtgaacctagaccaggatgtcaattaacagcatgcggtttccctacaaatggtactaccctttgcaatttccagtgggttcgccatcttgaaaatggtatcaaacagtctatcgaaggtgccacgatgtatgactatgtggttactgcagatgatgttggtactcttcttgctgtagactgtacgcctatggatgacaacggccgccagggtgatttggtgacagaatttgctaataatgggaataagataacatgtgatccagagatgcagagtcatatcgatgcatgtatttctaaagggagagctgaatttgaagtttttgtcctggcttattctcctgaggaatgggaactggctacattggtgctcacacgacctaattatcagattaagttcaaacagaccggtaatgttgtaattgacgagaagtactcacaaagtctacagacaaaaattccaaatgggcgcacaactcagtttgttttaataactgcgggtacaactcttccatttaacacacagggaatatcagagccaaacaatgaggattacgatgttaggttacgtgatctaatcgtattagtcatgagaacttttcagaaaaaggctctagatgctaaaaggaaaggaaaggcttagaattcatgtaaatcttttacaaaagtagaaccgtagaagattttcctatttctgattgttttgtgcagtatttgataatttttgtccttgaggtggaatgagcttctcgatagagcaggaatttcaagagttacctggtgggcacataaatggttagaggaacgtaggatcgattcttatcctaattcttttttccttcgcattgcttactctaagttaagccatgtcactgcggtctttgtaaattctaagcagccagtgctgcaaataaacctatgagatgttcgctgcagctcttggatgacttaacatgcccatatgattgttgattttgtttatcatgttgatcaccatgctgctacttacactatgttcacaaagaatagcggtatgggttctcaatatggccataacccattccttttgcgtttccattaacggtgcttcaaccatacagcacaccgcatgaaagaactagcctgaatagcaatttccaaacgtatgctccgtttgggcttcagcttgcaaatgagcggcaaccactacgaatttcccagatccagaaaaaagggaagaagttaaaaaaaaaagaataaa

SEQ ID NO: 48373 - DNA, 2227 bp, Zea Mays
gatgggagttctttgatctgaaaaaatacagaggaaggacatgagggatccatttgatgcaccggttgatctcattaatgtggaccataatggtggctatcaactatccaggactggtgcggtttctgctggggaccatggtttacaaaatggtggacccaaatcccttgctccaaactccgacactgtagtcaggcatcaactccagggtgcatccttgcacaaagacttagctcttgaagatcctaatactcgtatcatggatcccgagaccaaggaactttactttagatcacaatcacaagaggacgagatcttgttgcttcgcaagaaaattgctgaggcgtctctcaaggagctgagtttgctgagtgaaaaacacattctggagaggaggctcacagacttgaggatggctgttgacgagaagcaggaagaagctatatctggtgctttgaaacaattgaaccagaagaaaacccatctcgaggacaatatgcgactggcaaatgaactaaaagttgaggaagaagagctatacttttttacttcttcattgcttagcatgctagcagaatacaacatccgcccacctcaaataaatgcatctaccattacaattggcacaaagcgcttgtaccaacagatgcattggaagctcaaatctttaaatgacaatttaggtgatatgcctcaacctggaaacatttataactccagtcatcagcaacagcaagtaaccctaccaagaaatgaagcttccccatcttataatatggtttcaaataagaatgctcttcaacaatatgctcaaggtccaagtgaccgacatattgagcaaatgtaccatggatccagttttcagcaggatactggaggtactactccctctaattattttgaagaaggaagagtagacggtggctcacagttatacccatctgatggtgatgctttacctggtattgagggatttcaaattgctggtgaacctagaccaggatgtcaattaacagcatgcggtttccctacaaatggtactaccctttgcaatttccagtgggttcgccatcttgaaaatggtatcaaacagtctatcgaaggtgccacgatgtatgactatgtggttactgcagatgatgttggtactcttcttgctgtagactgtacgcctatggatgacaacggccgccagggtgatttggtgacagaatttgctaataatgggaataagataacatgtgatccagagatgcagagtcatatcgatgcatgtatttctaaagggagagctgaatttgaagtttttgtcctgcaggcttattctcctgaggaatgggaactggctacattggtgctcacacgacctaattatcagattaagttcaaacagaccggtaatgttgtaattgacgagaagtactcacaaagtctacagacaaaaattccaaatgggcgcacaactcagtttgttttaataactgcgggtacaactcttccatttaacacacagggaatatcagagccaaacaatgaggattacgatgttaggttacgtgatctaatcgtattagtcatgagaacttttcagaaaaaggctctagatgctaaaaggaaaggaaaggcttagaattcatgtaaatcttttacaaaagtagaaccgtagaagattttcctatttctgattgttttgtgcagtatttgataatttttgtccttgaggtggaatgagcttctcgatagagcaggaatttcaagagttacctggtgggcacataaatggttagaggaacgtaggatcgattcttatcctaattcttttttccttcgcattgcttactctaagttaagccatgtcactgcggtctttgtaaattctaagcagccagtgctgcaaataaacctatgagatgttcgctgcagctcttggatgacttaacatgcccatatgattgttgattttgtttatcatgttgatcaccatgctgctacttacactatgttcacaaagaatagcggtatgggttctcaatatggccataacccattccttttgcgtttccattaacggtgcttcaaccatacagcacaccgcatgaaagaactagcctgaatagcaatttccaaacgtatgctccgtttgggcttcagcttgcaaatgagcggcaaccactacgaatttcccagatccagaaaaaagggaagaagttaaaaaaaaaagaataaa

SEQ ID NO: 48374 - DNA, 1870 bp, Zea Mays
gctgctgtttttagtttctattaatttcttaaggtgctgccttgcctcatgctttagtcgcctagggcggtagtcgtcactatgtcttgccttactgccttgataaccatgaaagcatcacctctagttttcagcatttgctgttctcatttttgttgttgtcaattttttttataagatagattacatgcttttcgtctgtctttctgtgaacttctagacttactatggaattcttctaggttgaggaagaagagctatacttttttacttcttcattgcttagcatgctagcagaatacaacatccgcccacctcaaataaatgcatctaccattacaattggcacaaagcgcttgtaccaacagatgcattggaagctcaaatctttaaatgacaatttaggtgatatgcctcaacctggaaacatttataactccagtcatcagcaacagcaagtaaccctaccaagaaatgaagcttccccatcttataatatggtttcaaataagaatgctcttcaacaatatgctcaaggtccaagtgaccgacatattgagcaaatgtaccatggatccagttttcagcaggatactggaggtactactccctctaattattttgaagaaggaagagtagacggtggctcacagttatacccatctgatggtgatgctttacctggtattgagggatttcaaattgctggtgaacctagaccaggatgtcaattaacagcatgcggtttccctacaaatggtactaccctttgcaatttccagatgatgttggtactcttcttgctgtagactgtacgcctatggatgacaacggccgccagggtgatttggtgacagaatttgctaataatgggaataagataacatgtgatccagagatgcagagtcatatcgatgcatgtatttctaaagggagagctgaatttgaagtttttgtcctggcttattctcctgaggaatgggaactggctacattggtgctcacacgacctaattatcagattaagttcaaacagaccggtaatgttgtaattgacgagaagtactcacaaagtctacagacaaaaattccaaatgggcgcacaactcagtttgttttaataactgcgggtacaactcttccatttaacacacagggaatatcagagccaaacaatgaggattacgatgttaggttacgtgatctaatcgtattagtcatgagaacttttcagaaaaaggctctagatgctaaaaggaaaggaaaggcttagaattcatgtaaatcttttacaaaagtagaaccgtagaagattttcctatttctgattgttttgtgcagtatttgataatttttgtccttgaggtggaatgagcttctcgatagagcaggaatttcaagagttacctggtgggcacataaatggttagaggaacgtaggatcgattcttatcctaattcttttttccttcgcattgcttactctaagttaagccatgtcactgcggtctttgtaaattctaagcagccagtgctgcaaataaacctatgagatgttcgctgcagctcttggatgacttaacatgcccatatgattgttgattttgtttatcatgttgatcaccatgctgctacttacactatgttcacaaagaatagcggtatgggttctcaatatggccataacccattccttttgcgtttccattaacggtgcttcaaccatacagcacaccgcatgaaagaactagcctgaatagcaatttccaaacgtatgctccgtttgggcttcagcttgcaaatgagcggcaaccactacgaatttcccagatccagaaaaaagggaagaagttaaaaaaaaaagaataaa

SEQ ID NO: 48375 - DNA, 1925 bp, Zea Mays
gctgctgtttttagtttctattaatttcttaaggtgctgccttgcctcatgctttagtcgcctagggcggtagtcgtcactatgtcttgccttactgccttgataaccatgaaagcatcacctctagttttcagcatttgctgttctcatttttgttgttgtcaattttttttataagatagattacatgcttttcgtctgtctttctgtgaacttctagacttactatggaattcttctaggttgaggaagaagagctatacttttttacttcttcattgcttagcatgctagcagaatacaacatccgcccacctcaaataaatgcatctaccattacaattggcacaaagcgcttgtaccaacagatgcattggaagctcaaatctttaaatgacaatttaggtgatatgcctcaacctggaaacatttataactccagtcatcagcaacagcaagtaaccctaccaagaaatgaagcttccccatcttataatatggtttcaaataagaatgctcttcaacaatatgctcaaggtccaagtgaccgacatattgagcaaatggatactggaggtactactccctctaattattttgaagaaggaagagtagacggtggctcacagttatacccatctgatggtgatgctttacctggtattgagggatttcaaattgctggtgaacctagaccaggatgtcaattaacagcatgcggtttccctacaaatggtactaccctttgcaatttccagtgggttcgccatcttgaaaatggtatcaaacagtctatcgaaggtgccacgatgtatgactatgtggttactgcagatgatgttggtactcttcttgctgtagactgtacgcctatggatgacaacggccgccagggtgatttggtgacagaatttgctaataatgggaataagataacatgtgatccagagatgcagagtcatatcgatgcatgtatttctaaagggagagctgaatttgaagtttttgtcctgcaggcttattctcctgaggaatgggaactggctacattggtgctcacacgacctaattatcagattaagttcaaacagaccggtaatgttgtaattgacgagaagtactcacaaagtctacagacaaaaattccaaatgggcgcacaactcagtttgttttaataactgcgggtacaactcttccatttaacacacagggaatatcagagccaaacaatgaggattacgatgttaggttacgtgatctaatcgtattagtcatgagaacttttcagaaaaaggctctagatgctaaaaggaaaggaaaggcttagaattcatgtaaatcttttacaaaagtagaaccgtagaagattttcctatttctgattgttttgtgcagtatttgataatttttgtccttgaggtggaatgagcttctcgatagagcaggaatttcaagagttacctggtgggcacataaatggttagaggaacgtaggatcgattcttatcctaattcttttttccttcgcattgcttactctaagttaagccatgtcactgcggtctttgtaaattctaagcagccagtgctgcaaataaacctatgagatgttcgctgcagctcttggatgacttaacatgcccatatgattgttgattttgtttatcatgttgatcaccatgctgctacttacactatgttcacaaagaatagcggtatgggttctcaatatggccataacccattccttttgcgtttccattaacggtgcttcaaccatacagcacaccgcatgaaagaactagcctgaatagcaatttccaaacgtatgctccgtttgggcttcagcttgcaaatgagcggcaaccactacgaatttcccagatccagaaaaaagggaagaagttaaaaaaaaaagaataaa

SEQ ID NO: 48376 - DNA, 1939 bp, Zea Mays
gctgctgtttttagtttctattaatttcttaaggtgctgccttgcctcatgctttagtcgcctagggcggtagtcgtcactatgtcttgccttactgccttgataaccatgaaagcatcacctctagttttcagcatttgctgttctcatttttgttgttgtcaattttttttataagatagattacatgcttttcgtctgtctttctgtgaacttctagacttactatggaattcttctaggttgaggaagaagagctatacttttttacttcttcattgcttagcatgctagcagaatacaacatccgcccacctcaaataaatgcatctaccattacaattggcacaaagcgcttgtaccaacagatgcattggaagctcaaatctttaaatgtgatatgcctcaacctggaaacatttataactccagtcatcagcaacagcaagtaaccctaccaagaaatgaagcttccccatcttataatatggtttcaaataagaatgctcttcaacaatatgctcaaggtccaagtgaccgacatattgagcaaatgtaccatggatccagttttcagcaggatactggaggtactactccctctaattattttgaagaaggaagagtagacggtggctcacagttatacccatctgatggtgatgctttacctggtattgagggatttcaaattgctggtgaacctagaccaggatgtcaattaacagcatgcggtttccctacaaatggtactaccctttgcaatttccagtgggttcgccatcttgaaaatggtatcaaacagtctatcgaaggtgccacgatgtatgactatgtggttactgcagatgatgttggtactcttcttgctgtagactgtacgcctatggatgacaacggccgccagggtgatttggtgacagaatttgctaataatgggaataagataacatgtgatccagagatgcagagtcatatcgatgcatgtatttctaaagggagagctgaatttgaagtttttgtcctgcaggcttattctcctgaggaatgggaactggctacattggtgctcacacgacctaattatcagattaagttcaaacagaccggtaatgttgtaattgacgagaagtactcacaaagtctacagacaaaaattccaaatgggcgcacaactcagtttgttttaataactgcgggtacaactcttccatttaacacacagggaatatcagagccaaacaatgaggattacgatgttaggttacgtgatctaatcgtattagtcatgagaacttttcagaaaaaggctctagatgctaaaaggaaaggaaaggcttagaattcatgtaaatcttttacaaaagtagaaccgtagaagattttcctatttctgattgttttgtgcagtatttgataatttttgtccttgaggtggaatgagcttctcgatagagcaggaatttcaagagttacctggtgggcacataaatggttagaggaacgtaggatcgattcttatcctaattcttttttccttcgcattgcttactctaagttaagccatgtcactgcggtctttgtaaattctaagcagccagtgctgcaaataaacctatgagatgttcgctgcagctcttggatgacttaacatgcccatatgattgttgattttgtttatcatgttgatcaccatgctgctacttacactatgttcacaaagaatagcggtatgggttctcaatatggccataacccattccttttgcgtttccattaacggtgcttcaaccatacagcacaccgcatgaaagaactagcctgaatagcaatttccaaacgtatgctccgtttgggcttcagcttgcaaatgagcggcaaccactacgaatttcccagatccagaaaaaagggaagaagttaaaaaaaaaagaataaa

SEQ ID NO: 48377 - DNA, 1964 bp, Zea Mays
gctgctgtttttagtttctattaatttcttaaggtgctgccttgcctcatgctttagtcgcctagggcggtagtcgtcactatgtcttgccttactgccttgataaccatgaaagcatcacctctagttttcagcatttgctgttctcatttttgttgttgtcaattttttttataagatagattacatgcttttcgtctgtctttctgtgaacttctagacttactatggaattcttctaggttgaggaagaagagctatacttttttacttcttcattgcttagcatgctagcagaatacaacatccgcccacctcaaataaatgcatctaccattacaattggcacaaagcgcttgtaccaacagatgcattggaagctcaaatctttaaatgacaatttaggtgatatgcctcaacctggaaacatttataactccagtcatcagcaacagcaagtaaccctaccaagaaatgaagcttccccatcttataatatggtttcaaataagaatgctcttcaacaatatgctcaaggtccaagtgaccgacatattgagcaaatgtaccatggatccagttttcagcaggatactggaggtactactccctctaattattttgaagaaggaagagtagacggtggctcacagttatacccatctgatggtgatgctttacctggtattgagggatttcaaattgctggtgaacctagaccaggatgtcaattaacagcatgcggtttccctacaaatggtactaccctttgcaatttccagtgggttcgccatcttgaaaatggtatcaaacagtctatcgaaggtaaagtggggaatttttcctagatcgtttggcatattattgttcaagatgatgttggtactcttcttgctgtagactgtacgcctatggatgacaacggccgccagggtgatttggtgacagaatttgctaataatgggaataagataacatgtgatccagagatgcagagtcatatcgatgcatgtatttctaaagggagagctgaatttgaagtttttgtcctgcaggcttattctcctgaggaatgggaactggctacattggtgctcacacgacctaattatcagattaagttcaaacagaccggtaatgttgtaattgacgagaagtactcacaaagtctacagacaaaaattccaaatgggcgcacaactcagtttgttttaataactgcgggtacaactcttccatttaacacacagggaatatcagagccaaacaatgaggattacgatgttaggttacgtgatctaatcgtattagtcatgagaacttttcagaaaaaggctctagatgctaaaaggaaaggaaaggcttagaattcatgtaaatcttttacaaaagtagaaccgtagaagattttcctatttctgattgttttgtgcagtatttgataatttttgtccttgaggtggaatgagcttctcgatagagcaggaatttcaagagttacctggtgggcacataaatggttagaggaacgtaggatcgattcttatcctaattcttttttccttcgcattgcttactctaagttaagccatgtcactgcggtctttgtaaattctaagcagccagtgctgcaaataaacctatgagatgttcgctgcagctcttggatgacttaacatgcccatatgattgttgattttgtttatcatgttgatcaccatgctgctacttacactatgttcacaaagaatagcggtatgggttctcaatatggccataacccattccttttgcgtttccattaacggtgcttcaaccatacagcacaccgcatgaaagaactagcctgaatagcaatttccaaacgtatgctccgtttgggcttcagcttgcaaatgagcggcaaccactacgaatttcccagatccagaaaaaagggaagaagttaaaaaaaaaagaataaa

SEQ ID NO: 48378 - DNA, 1949 bp, Zea Mays
gctgctgtttttagtttctattaatttcttaaggtgctgccttgcctcatgctttagtcgcctagggcggtagtcgtcactatgtcttgccttactgccttgataaccatgaaagcatcacctctagttttcagcatttgctgttctcatttttgttgttgtcaattttttttataagatagattacatgcttttcgtctgtctttctgtgaacttctagacttactatggaattcttctaggttgaggaagaagagctatacttttttacttcttcattgcttagcatgctagcagaatacaacatccgcccacctcaaataaatgcatctaccattacaattggcacaaagcgcttgtaccaacagatgcattggaagctcaaatctttaaatgacaatttaggtgatatgcctcaacctggaaacatttataactccagtcatcagcaacagcaagtaaccctaccaagaaatgaagcttccccatcttataatatggtttcaaataagaatgctcttcaacaatatgctcaaggtccaagtgaccgacatattgagcaaatgtaccatggatccagttttcagcaggatactggaggtactactccctctaattattttgaagaaggaagagtagacggtggctcacagttatacccatctgatggtgatgctttacctggtattgagggatttcaaattgctggtgaacctagaccaggatgtcaattaacagcatgcggtttccctacaaatggtactaccctttgcaatttccagtgggttcgccatcttgaaaatggtatcaaacagtctatcgaaggtgccacgatgtatgactatgtggttactgcagatgatgttggtactcttcttgctgtagactgtacgcctatggatgacaacggccgccagggtgatttggtgacagaatttgctaataatgggaataagataacatgtgatccagagatgcagagtcatatcgatgcatgtatttctaaagggagagctgaatttgaagtttttgtcctgcaggcttattctcctgaggaatgggaactggctacattggtgctcacacgacctaattatcagattaagttcaaacagaccggtaatgttgtaattgacgagaagtactcacaaagtctacagacaaaaattccaaatgggcgcacaactcagtttgttttaataactgcgggtacaactcttccatttaacacacagggaatatcagagccaaacaatgaggattacgatgttaggttacgtgatctaatcgtattagtcatgagaacttttcagaaaaaggctctagatgctaaaaggaaaggaaaggcttagaattcatgtaaatcttttacaaaagtagaaccgtagaagattttcctatttctgattgttttgtgcagtatttgataatttttgtccttgaggtggaatgagcttctcgatagagcaggaatttcaagagttacctggtgggcacataaatggttagaggaacgtaggatcgattcttatcctaattcttttttccttcgcattgcttactctaagttaagccatgtcactgcggtctttgtaaattctaagcagccagtgctgcaaataaacctatgagatgttcgctgcagctcttggatgacttaacatgcccatatgattgttgattttgtttatcatgttgatcaccatgctgctacttacactatgttcacaaagaatagcggtatgggttctcaatatggccataacccattccttttgcgtttccattaacggtgcttcaaccatacagcacaccgcatgaaagaactagcctgaatagcaatttccaaacgtatgctccgtttgggcttcagcttgcaaatgagcggcaaccactacgaatttcccagatccagaaaaaagggaagaagttaaaaaaaaaagaataaa

SEQ ID NO: 48379 - DNA, 2236 bp, Zea Mays
gaaatgcggacgggcgaataccgaaagacgccttgtgacagcaaacacggaaactgagaacacgagcagaaggcactcgatcgcataggtacagacgtacagtagcacagccgcgcacactaccaccagtcggacacccgccccgagctccggctatggaggaagccgccgccgccgccgctgcttgggcgtctaatgccgccacgcccgtcccatccgagcccatgagatcccctcctgatgctgaagcctccgttgatcctaccgctgttggtgacgatgagcacgactccaaggaggtcgttctgcgcaggtacttcctccaggagtgggagctggtctcagcgatcctccaccgtgtcgtcgccggcggcggcgttgccgaatccgccgatgtccataggatccgctctatcatggacaaatatcaagaagagggtcaactattagagccataccttgagaacattgtttcaccacttatgtcgttggttcggtcaaagacaatggaacttggtgctagtactgatgaacttcttgacattatcaagcctctgtgtatcatcatctacacccttgtcacagtgtgcgggtacaagagtgtcatcagattcttccctcaccaggtttcagatcttgagctcgcagttgctcttcttgagaagtgtcatacaatgagttcagctactgctcttaggcaagagagcacaggagaaatggagactaaatgtgttgttctattgtggctttatatactggtcctgatcccatttgacatatccactgtggatacaagcattgctactgctgataacgtcgatgggcctgaggtcgttccactggtgacaagaatactggacatctgtaaggattatctctccagttctggtccaatgagaaggatgtcaggattattgcttgcaaggctcttgactcgtcctgacatggcaaaagctttcagcagttttatggactgggcacacaagatgttactgtctgtatcagatgactttgttgatcaatttagatccattggtatagtggaagctttagcatcaatatttaagattggtaaccgtagagcactgcatgatgctgtttctggtacttggagtgattgttcacttgtgatgaagactaatgtctcagccaggagtccacttcttagaaaattcctggtgaaactggcccagagagttggtctcatcagcttgcctccacgtttaccatcatggcagtataagtcaattagcagttcgttgggtgcaaacctttcaagttatacagctggagaagtgtattcaagtggatcaagggaacaagttaacattgatcaaataggcatgtgttttttggaagaagatatggatgttccagaaatagcagaagagattatcgacttgctattgactggtttgagggattcagatacaattgtaaggtggtctgctgccaagggaattggtaggataactgcatgtttaacacctgcattgtcggaagatgtgctatcatcaatattgcaacttttttctcctggagagggtgatggctcctggcatggaggctgtttagccttggctgaacttgctcggagagggttattgttaccttctagctttcctgatgttgttcctgttataataaaggctttacactatgatgtaagaagaggtccacatagcattgggtcacatgtaagagatgcagcagcatatgtatgttgggcatttggtcgagcttataccaattatgatatgaaggctgttttggaacaacttgctccccaccttctaaccgttgcttgttatgatcgagaggttaattgtagaagagctgcttctgctgcctttcaagagaatgttggaagacagggaactttcccacatggcattgatattgtgaatacgacagattactttgcactggcttcccgatcaaactcttatctgaatgttgctgtttctgttgctcagtgcaaggagtatctttatccctttgcagatgagctgctttgcaataaaataactcactgggtatataattctctgcaattgtttatggtttaaatgagattgcatctttagtgtttctggtttccacactttttgcctgtgctgcaattgctattaacttcctgagttctacactccttacctggaccgagttctgcactccttaactggaactggtagctgacttgggaaactgaagttaaaatcattagcaatgtaaa

SEQ ID NO: 48380 - DNA, 2353 bp, Zea Mays
cgaataccgaaagacgccttgtgacagcaaacacggaaactgagaacacgagcagaaggcactcgatcgcataggtacagacgtacagtagcacagccgcgcacactaccaccagtcggacacccgccccgagctccggctatggaggaagccgccgccgccgccgctgcttgggcgtctaatgccgccacgcccgtcccatccgagcccatgagatcccctcctgatgctgaagcctccgttgatcctaccgctgttggtgacgatgagcacgactccaaggaggtcgttctgcgcaggtacttcctccaggagtgggagctggtctcagcgatcctccaccgtgtcgtcgccggcggcggcgttgccgaatccgccgatgtccataggatccgctctatcatggacaaatatcaagaagagggtcaactattagagccataccttgagaacattgtttcaccacttatgtcgttggttcggtcaaagacaatggaacttggtgctagtactgatgaacttcttgacattatcaagcctctgtgtatcatcatctacacccttgtcacagtgtgcgggtacaagagtgtcatcagattcttccctcaccaggtttcagatcttgagctcgcagttgctcttcttgagaagtgtcatacaatgagttcagctactgctcttaggcaagagagcacaggagaaatggagactaaatgtgttgttctattgtggctttatatactggtcctgatcccatttgacatatccactgtggatacaagcattgctactgctgataacgtcgatgggcctgaggtcgttccactggtgacaagaatactggacatctgtaaggattatctctccagttctggtccaatgagaaggatgtcaggattattgcttgcaaggctcttgactcgtcctgacatggcaaaagctttcagcagttttatggactgggcacacaagatgttactgtctgtatcagatgactttgttgatcaatttagatccattggtatagtggaagctttagcatcaatatttaaggagctttttgcacacacaattattttttgtggttatcaacagggaatgggatgtgagcatttggtttcacaattacataccgctaatttagtttgatgtcttccttttggttcctcttgttgcagattggtaaccgtagagcactgcatgatgctgtttctggtacttggagtgattgttcacttgtgatgaagactaatgtctcagccaggagtccacttcttagaaaattcctggtgaaactggcccagagagttggtctcatcagcttgcctccacgtttaccatcatggcagtataagtcaattagcagttcgttgggtgcaaacctttcaagttatacagctggagaagtgtattcaagtggatcaagggaacaagttaacattgatcaaataggcatgtgttttttggaagaagatatggatgttccagaaatagcagaagagattatcgacttgctattgactggtttgagggattcagtatgttcttatccttatattatgctgtgaagttttgacttgttctccagaacgtggatacaattgtaaggtggtctgctgccaagggaattggtaggataactgcatgtttaacacctgcattgtcggaagatgtgctatcatcaatattgcaacttttttctcctggagagggtgatggctcctggcatggaggctgtttagccttggctgaacttgctcggagagggttattgttaccttctagctttcctgatgttgttcctgttataataaaggagaactgcacatcatattatattaagaagagaaaggggggaggcaaatagatccaggatacaacaaccatctcatggaggccaaaaacagagacaaaaaactattcataagaaaactataaaactaccacatcctgttattctcaagcggggcaaggagataggagatccctttatccctagcttattgccagagacgacgctcatctctagcctgagtaagagcaagggtgagatttggtgcaagtccgtcaaacacgcaccggttatggtagttctagataatccaagcgcccatgatgataagagacttaatccttgttgtgcttgcccgttaaccgcaactgaaacagacctccaccactccaagaagcttggagcatcaggctgagataaggactggagacgaacaaaacaaggccaatttgctgctgaaattagatattacaagggcttttgattctgtttcttggccttttttgattgaggtcatgaagaagctgggttttaggcaaatttggagagctttgatatgtg

SEQ ID NO: 48381 - DNA, 2126 bp, Zea Mays
cacgagcagaaggcactcgatcgcataggtacagacgtacagtagcacagccgcgcacactaccaccagtcggacacccgccccgagctccggctatggaggaagccgccgccgccgccgctgcttgggcgtctaatgccgccacgcccgtcccatccgagcccatgagatcccctcctgatgctgaagcctccgttgatcctaccgctgttggtgacgatgagcacgactccaaggaggtcgttctgcgcaggtacttcctccaggagtgggagctggtctcagcgatcctccaccgtgtcgtcgccggcggcggcgttgccgaatccgccgatgtccataggatccgctctatcatggacaaatatcaagaagagggtcaactattagagccataccttgagaacattgtttcaccacttatgtcgttggttcggtcaaagacaatggaacttggtgctagtactgatgaacttcttgacattatcaagcctctgtgtatcatcatctacacccttgtcacagtgtgcgggtacaagagtgtcatcagattcttccctcaccaggtttcagatcttgagctcgcagttgctcttcttgagaagtgtcatacaatgagttcagctactgctcttaggcaagagagcacaggagaaatggagactaaatgtgttgttctattgtggctttatatactggtcctgatcccatttgacatatccactgtggatacaagcattgctactgctgataacgtcgatgggcctgaggtcgttccactggtgacaagaatactggacatctgtaaggattatctctccagttctggtccaatgagaaggatgtcaggattattgcttgcaaggctcttgactcgtcctgacatggcaaaagctttcagcagttttatggactgggcacacaagatgttactgtctgtatcagatgactttgttgatcaatttagatccattggtatagtggaagctttagcatcaatatttaagattggtaaccgtagagcactgcatgatgctgtttctggtacttggagtgattgttcacttgtgatgaagactaatgtctcagccaggagtccacttcttagaaaattcctggtgaaactggcccagagagttggtctcatcagcttgcctccacgtttaccatcatggcagtataagtcaattagcagttcgttgggtgcaaacctttcaagttatacagctggagaagtgtattcaagtggatcaagggaacaagttaacattgatcaaataggcatgtgttttttggaagaagatatggatgttccagaaatagcagaagagattatcgacttgctattgactggtttgagggattcagatacaattgtaaggtggtctgctgccaagggaattggtaggataactgcatgtttaacacctgcattgtcggaagatgtgctatcatcaatattgcaacttttttctcctggagagggtgatggctcctggcatggaggctgtttagccttggctgaacttgctcggagagggttattgttaccttctagctttcctgatgttgttcctgttataataaaggagaactgcacatcatattatattaagaagagaaaggggggaggcaaatagatccaggatacaacaaccatctcatggaggccaaaaacagagacaaaaaactattcataagaaaactataaaactaccacatcctgttattctcaagcggggcaaggagataggagatccctttatccctagcttattgccagagacgacgctcatctctagcctgagtaagagcaagggtgagatttggtgcaagtccgtcaaacacgcaccggttatggtagttctagataatccaagcgcccatgatgataagagacttaatccttgttgtgcttgcccgttaaccgcaactgaaacagacctccaccactccaagaagcttggagcatcaggctgagataaggactggagacgaacaaaacaaggccaatttgctgctgaaattagatattacaagggcttttgattctgtttcttggccttttttgattgaggtcatgaagaagctgggttttaggcaaatttggagagctttgatatgtg

SEQ ID NO: 48382 - DNA, 1952 bp, Zea Mays
cacgagcagaaggcactcgatcgcataggtacagacgtacagtagcacagccgcgcacactaccaccagtcggacacccgccccgagctccggctatggaggaagccgccgccgccgccgctgcttgggcgtctaatgccgccacgcccgtcccatccgagcccatgagatcccctcctgatgctgaagcctccgttgatcctaccgctgttggtgacgatgagcacgactccaaggaggtcgttctgcgcaggtacttcctccaggagtgggagctggtctcagcgatcctccaccgtgtcgtcgccggcggcggcgttgccgaatccgccgatgtccataggatccgctctatcatggacaaatatcaagaagagggtcaactattagagccataccttgagaacattgtttcaccacttatgtcgttggttcggtcaaagacaatggaacttggtgctagtactgatgaacttcttgacattatcaagcctctgtgtatcatcatctacacccttgtcacagtgtgcgggtacaagagtgtcatcagattcttccctcaccaggtttcagatcttgagctcgcagttgctcttcttgagaagtgtcatacaatgagttcagctactgctcttaggcaagagagcacaggagaaatggagactaaatgtgttgttctattgtggctttatatactggtcctgatcccatttgacatatccactgtggatacaagcattgctactgctgataacgtcgatgggcctgaggtcgttccactggtgacaagaatactggacatctgtaaggattatctctccagttctggtccaatgagaaggatgtcaggattattgcttgcaaggctcttgactcgtcctgacatggcaaaagctttcagcagtcaattagcagttcgttgggtgcaaacctttcaagttatacagctggagaagtgtattcaagtggatcaagggaacaagttaacattgatcaaataggcatgtgttttttggaagaagatatggatgttccagaaatagcagaagagattatcgacttgctattgactggtttgagggattcagtatgttcttatccttatattatgctgtgaagttttgacttgttctccagaacgtggatacaattgtaaggtggtctgctgccaagggaattggtaggataactgcatgtttaacacctgcattgtcggaagatgtgctatcatcaatattgcaacttttttctcctggagagggtgatggctcctggcatggaggctgtttagccttggctgaacttgctcggagagggttattgttaccttctagctttcctgatgttgttcctgttataataaaggctttacactatgatgtaagaagaggtccacatagcattgggtcacatgtaagagatgcagcagcatatgtatgttgggcatttggtcgagcttataccaattatgatatgaaggctgttttggaacaacttgctccccaccttctaaccgttgcttgttatgatcgagaggttaattgtagaagagctgcttctgctgcctttcaagagaatgttggaagacagggaactttcccacatggcattgatattgtgaatacgacagattactttgcactggcttcccgatcaaactcttatctgaatgttgctgtttctgttgctcagtgcaaggagtatctttatccctttgcagatgagctgctttgcaataaaataactcactgggtatataattctctgcaattgtttatggtttaaatgagattgcatctttagtgtttctggtttccacactttttgcctgtgctgcaattgctattaacttcctgagttctacactccttacctggaccgagttctgcactccttaactggaactggtagctgacttgggaaactgaagttaaaatcattagcaatgtaaa

SEQ ID NO: 48383 - DNA, 2548 bp, Zea Mays
cacgagcagaaggcactcgatcgcataggtacagacgtacagtagcacagccgcgcacactaccaccagtcggacacccgccccgagctccggctatggaggaagccgccgccgccgccgctgcttgggcgtctaatgccgccacgcccgtcccatccgagcccatgagatcccctcctgatgctgaagcctccgttgatcctaccgctgttggtgacgatgagcacgactccaaggaggtcgttctgcgcaggtacttcctccaggagtgggagctggtctcagcgatcctccaccgtgtcgtcgccggcggcggcgttgccgaatccgccgatgtccataggatccgctctatcatggacaaatatcaagaagagggtcaactattagagccataccttgagaacattgtttcaccacttatgtcgttggttcggtcaaagacaatggaacttggtgctagtactgatgaacttcttgacattatcaagcctctgtgtatcatcatctacacccttgtcacagtgtgcgggtacaagagtgtcatcagattcttccctcaccaggtttcagatcttgagctcgcagttgctcttcttgagaagtgtcatacaatgagttcagctactgctcttaggcaagagagcacaggagaaatggagactaaatgtgttgttctattgtggctttatatactggtcctgatcccatttgacatatccactgtggatacaagcattgctactgctgataacgtcgatgggcctgaggtcgttccactggtgacaagaatactggacatctgtaaggattatctctccagttctggtccaatgagaaggatgtcaggattattgcttgcaaggctcttgactcgtcctgacatggcaaaagctttcagcagttttatggactgggcacacaagatgttactgtctgtatcagatgactttgttgatcaatttagatccattggtatagtggaagctttagcatcaatatttaagattggtaaccgtagagcactgcatgatgctgtttctggtacttggagtgattgttcacttgtgatgaagactaatgtctcagccaggagtccacttcttagaaaattcctggtgaaactggcccagagagttggtctcatcagcttgcctccacgtttaccatcatggcagtataagtcaattagcagttcgttgggtgcaaacctttcaagttatacagctggagaagtgtattcaagtggatcaagggaacaagttaacattgatcaaataggcatgtgttttttggaagaagatatggatgttccagaaatagcagaagagattatcgacttgctattgactggtttgagggattcagtatgttcttatccttatattatgctgtgaagttttgacttgttctccagaacgattaatggtggtatctgaattgaaataagctctcctgactgtgtatatgagaaactatgtacacaatttgaagtcatgattcactgcttcatgtacttaggaaaacagtagggagtctggtctttgtacttgctattatgtttttttttgcatgttaaaataccaaagtattattgggccatgaaatgcaaatactatcatttgtcttcccagatgaagttatactaagagataagttttttagttattcatctttcccatttatagcctcaaacactgctgtttttgaaaggcgaacactctttgattctgtgtcaggatacaattgtaaggtggtctgctgccaagggaattggtaggataactgcatgtttaacacctgcattgtcggaagatgtgctatcatcaatattgcaacttttttctcctggagagggtgatggctcctggcatggaggctgtttagccttggctgaacttgctcggagagggttattgttaccttctagctttcctgatgttgttcctgttataataaaggctttacactatgatgtaagaagaggtccacatagcattgggtcacatgtaagagatgcagcagcatatgtatgttgggcatttggtcgagcttataccaattatgatatgaaggctgttttggaacaacttgctccccaccttctaaccgttgcttgttatgatcgagaggttaattgtagaagagctgcttctgctgcctttcaagagaatgttggaagacagggaactttcccacatggcattgatattgtgaatacgacagattactttgcactggcttcccgatcaaactcttatctgaatgttgctgtttctgttgctcagtgcaaggagtatctttatccctttgcagatgagctgctttgcaataaaataactcactgggtatataattctctgcaattgtttatggtttaaatgagattgcatctttagtgtttctggtttccacactttttgcctgtgctgcaattgctattaacttcctgagttctacactccttacctggaccgagttctgcactccttaactggaactggtagctgacttgggaaactgaagttaaaatcattagcaatgtaaa

SEQ ID NO: 48384 - DNA, 2073 bp, Zea Mays
cacgagcagaaggcactcgatcgcataggtacagacgtacagtagcacagccgcgcacactaccaccagtcggacacccgccccgagctccggctatggaggaagccgccgccgccgccgctgcttgggcgtctaatgccgccacgcccgtcccatccgagcccatgagatcccctcctgatgctgaagcctccgttgatcctaccgctgttggtgacgatgagcacgactccaaggaggtcgttctgcgcaggtacttcctccaggagtgggagctggtctcagcgatcctccaccgtgtcgtcgccggcggcggcgttgccgaatccgccgatgtccataggatccgctctatcatggacaaatatcaagaagagggtcaactattagagccataccttgagaacattgtttcaccacttatgtcgttggttcggtcaaagacaatggaacttggtgctagtactgatgaacttcttgacattatcaagcctctgtgtatcatcatctacacccttgtcacagtgtgcgggtacaagagtgtcatcagattcttccctcaccaggtttcagatcttgagctcgcagttgctcttcttgagaagtgtcatacaatgagttcagctactgctcttaggcaagagagcacaggagaaatggagactaaatgtgttgttctattgtggctttatatactggtcctgatcccatttgacatatccactgtggatacaagcattgctactgctgataacgtcgatgggcctgaggtcgttccactggtgacaagaatactggacatctgtaaggattatctctccagttctggtccaatgagaaggatgtcaggattattgcttgcaaggctcttgactcgtcctgacatggcaaaagctttcagcagattggtaaccgtagagcactgcatgatgctgtttctggtacttggagtgattgttcacttgtgatgaagactaatgtctcagccaggagtccacttcttagaaaattcctggtgaaactggcccagagagttggtctcatcagcttgcctccacgtttaccatcatggcagtataagtcaattagcagttcgttgggtgcaaacctttcaagttatacagctggagaagtgtattcaagtggatcaagggaacaagttaacattgatcaaataggcatgtgttttttggaagaagatatggatgttccagaaatagcagaagagattatcgacttgctattgactggtttgagggattcagatacaattgtaaggtggtctgctgccaagggaattggtaggataactgcatgtttaacacctgcattgtcggaagatgtgctatcatcaatattgcaacttttttctcctggagagggtgatggctcctggcatggaggctgtttagccttggctgaacttgctcggagagggttattgttaccttctagctttcctgatgttgttcctgttataataaaggctttacactatgatgtaagaagaggtccacatagcattgggtcacatgtaagagatgcagcagcatatgtatgttgggcatttggtcgagcttataccaattatgatatgaaggctgttttggaacaacttgctccccaccttctaaccgttgcttgttatgatcgagaggttaattgtagaagagctgcttctgctgcctttcaagagaatgttggaagacagggaactttcccacatggcattgatattgtgaatacgacagattactttgcactggcttcccgatcaaactcttatctgaatgttgctgtttctgttgctcagtgcaaggagtatctttatccctttgcagatgagctgctttgcaataaaataactcactgggtatataattctctgcaattgtttatggtttaaatgagattgcatctttagtgtttctggtttccacactttttgcctgtgctgcaattgctattaacttcctgagttctacactccttacctggaccgagttctgcactccttaactggaactggtagctgacttgggaaactgaagttaaaatcattagcaatgtaaa

SEQ ID NO: 48385 - DNA, 2945 bp, Zea Mays
cacgagcagaaggcactcgatcgcataggtacagacgtacagtagcacagccgcgcacactaccaccagtcggacacccgccccgagctccggctatggaggaagccgccgccgccgccgctgcttgggcgtctaatgccgccacgcccgtcccatccgagcccatgagatcccctcctgatgctgaagcctccgttgatcctaccgctgttggtgacgatgagcacgactccaaggaggtcgttctgcgcaggtacttcctccaggagtgggagctggtctcagcgatcctccaccgtgtcgtcgccggcggcggcgttgccgaatccgccgatgtccataggatccgctctatcatggacaaatatcaagaagagggtcaactattagagccataccttgagaacattgtttcaccacttatgtcgttggttcggtcaaagacaatggaacttggtgctagtactgatgaacttcttgacattatcaagcctctgtgtatcatcatctacacccttgtcacagtgtgcgggtacaagagtgtcatcagattcttccctcaccaggtttcagatcttgagctcgcagttgctcttcttgagaagtgtcatacaatgagttcagctactgctcttaggcaagagagcacaggagaaatggagactaaatgtgttgttctattgtggctttatatactggtcctgatcccatttgacatatccactgtggatacaagcattgctactgctgataacgtcgatgggcctgaggtcgttccactggtgacaagaatactggacatctgtaaggattatctctccagttctggtccaatgagaaggatgtcaggattattgcttgcaaggctcttgactcgtcctgacatggcaaaagctttcagcagttttatggactgggcacacaagatgttactgtctgtatcagatgactttgttgatcaatttagatccattggtatagtggaagctttagcatcaatatttaagattggtaaccgtagagcactgcatgatgctgtttctggtacttggagtgattgttcacttgtgatgaagactaatgtctcagccaggagtccacttcttagaaaattcctggtgaaactggcccagagagttggtctcatcagcttgcctccacgtttaccatcatggcagtataagtcaattagcagttcgttgggtgcaaacctttcaagttatacagctggagaagtgtattcaagtggatcaagggaacaagttaacattgatcaaataggcatgtgttttttggaagaagatatggatgttccagaaatagcagaagagattatcgacttgctattgactggtttgagggattcagtatgttcttatccttatattatgctgtgaagttttgacttgttctccagaacgtggtagtaatatttacccagttatatgatcttttatattgtaccccatttttattttctttctctttgcttgccggctaatatcttcttttccccacaagggccttcacctgccagtctacctccactgcatttcatatcttaataaatacataacattgcctagattgtcctgtactggagcaaaaacacacacagccttttattgtttggatttctagaattattcgacaatataactgaactttaaatccattaatcaattagtggtttgattgctaaaaatcgagttggtgaaatttttctgtgtagattcctgtatgctactatggtttgtgaacatggttgcttcatacaatcaacacaactgcctctaactctaaggacataaatgcaggattaatggtggtatctgaattgaaataagctctcctgactgtgtatatgagaaactatgtacacaatttgaagtcatgattcactgcttcatgtacttaggaaaacagtagggagtctggtctttgtacttgctattatgtttttttttgcatgttaaaataccaaagtattattgggccatgaaatgcaaatactatcatttgtcttcccagatgaagttatactaagagataagttttttagttattcatctttcccatttatagcctcaaacactgctgtttttgaaaggcgaacactctttgattctgtgtcaggatacaattgtaaggtggtctgctgccaagggaattggtaggataactgcatgtttaacacctgcattgtcggaagatgtgctatcatcaatattgcaacttttttctcctggagagggtgatggctcctggcatggaggctgtttagccttggctgaacttgctcggagagggttattgttaccttctagctttcctgatgttgttcctgttataataaaggctttacactatgatgtaagaagaggtccacatagcattgggtcacatgtaagagatgcagcagcatatgtatgttgggcatttggtcgagcttataccaattatgatatgaaggctgttttggaacaacttgctccccaccttctaaccgttgcttgttatgatcgagaggttaattgtagaagagctgcttctgctgcctttcaagagaatgttggaagacagggaactttcccacatggcattgatattgtgaatacgacagattactttgcactggcttcccgatcaaactcttatctgaatgttgctgtttctgttgctcagtgcaaggagtatctttatccctttgcagatgagctgctttgcaataaaataactcactgggtatataattctctgcaattgtttatggtttaaatgagattgcatctttagtgtttctggtttccacactttttgcctgtgctgcaattgctattaacttcctgagttctacactccttacctggaccgagttctgcactccttaactggaactggtagctgacttgggaaactgaagttaaaatcattagcaatgtaaa

SEQ ID NO: 48386 - DNA, 2968 bp, Zea Mays
cacgagcagaaggcactcgatcgcataggtacagacgtacagtagcacagccgcgcacactaccaccagtcggacacccgccccgagctccggctatggaggaagccgccgccgccgccgctgcttgggcgtctaatgccgccacgcccgtcccatccgagcccatgagatcccctcctgatgctgaagcctccgttgatcctaccgctgttggtgacgatgagcacgactccaaggaggtcgttctgcgcaggtacttcctccaggagtgggagctggtctcagcgatcctccaccgtgtcgtcgccggcggcggcgttgccgaatccgccgatgtccataggatccgctctatcatggacaaatatcaagaagagggtcaactattagagccataccttgagaacattgtttcaccacttatgtcgttggttcggtcaaagacaatggaacttggtgctagtactgatgaacttcttgacattatcaagcctctgtgtatcatcatctacacccttgtcacagtgtgcgggtacaagagtgtcatcagattcttccctcaccaggtttcagatcttgagctcgcagttgctcttcttgagaagtgtcatacaatgagttcagctactgctcttaggcaagagagcacaggagaaatggagactaaatgtgttgttctattgtggctttatatactggtcctgatcccatttgacatatccactgtggatacaagcattgctactgctgataacgtcgatgggcctgaggtcgttccactggtgacaagaatactggacatctgtaaggattatctctccagttctggtccaatgagaaggatgtcaggattattgcttgcaaggctcttgactcgtcctgacatggcaaaagctttcagcagttttatggactgggcacacaagatgttactgtctgtatcagatgactttgttgatcaatttagatccattggtatagtggaagctttagcatcaatatttaagattggtaaccgtagagcactgcatgatgctgtttctggtacttggagtgattgttcacttgtgatgaagactaatgtctcagccaggagtccacttcttagaaaattcctggtgaaactggcccagagagttggtctcatcagcttgcctccacgtttaccatcatggcagtataagtgtgctgctgttgaggcattaaagcattttattccaacatacctggtatcttctggtgaaaagattgctagtgatattatctcaaaatatgtggcacttctagatgacccaaatgtggctgcaagacgaggagctgcactggcccttggaatattaccattcaaattcttgatgttgaaatggatgcctgtcatgagtaaactctgtagctcatgcaccattgaggataagcctgatgaccctgatgctgaagcacgtgtgaactctgttagggggctaatttcggtttgcgaaacactaacagcatcttttgatcagctctcaaatggagattctctatatgcatacataaaagattatgtcatgcgagctttatttagagcactcgatgattatgctgtggacaacagaggagatgtgggttcttgggtacgtgaagcagcaatggatgcgctagtacgatgcatgttcatcctctgcaagagagatattgttgctttgagagcagtgtcagccactggccatgactctgaactgggtgatatggaagtaaatgcaagtagtactgcataccggctatttgattctggtattgcacaggatctggtagcaggcattgcaaaacaagcagttgagaaaatagataagataagagaaatagctatcaaaaccctgcagagaattctgtaccaccaggaacacctcatcccatttatacctcacagggagttgcttgaagaaattattcccaacagcagagatttggagtgggcggttcctactgtgtcatatccacgattggtgaaacttcttcaggttagctattatagcaagtctgtgctctcagggctcgtgatttctacaggtggtttgcaggagtctttgaagaaagcttcaatgtcagctttggtagggtatctccaagattcagacatcaatactaattgtgaagggaaaagtagagagtatctattgagttgtgatcttctatggggcctccagcactaccagaaatgtgaccgtgtaattactcccatgttcaagactattgaggctctcttcagtaaaaaggttttcttgaacaaggaggggtacagtgagttctacagtggactggtagattccgtgagctctgaactgaagggatccaaggattttacaaagttatgtgcaggtctctcgatccttgggtacatttcttccgagtcagatggaacttgcaccaaggcattttcccaactcctcacattcctaggccacagataccccaagatccgaaaagctgcagccgaccaggtgtaccttgtgctgctgcaaaatgatgaccttattgtgtcggagaatatggataaagcccaggaattacttgcggagacgtgctgggaaggggatgtggaggaagcaaggcgtaggaggtcagaaatcaacgagatggctggttttagggtcaccacttcacagaagtctggaaagcaagaaactagaacggtcgccgcttcgacggatgagaacagatcttattcgtcattggtcgatttcagcggatactaaagatcgccttacatcctattttcgacgaaaggtgtcgattgtactagtgcacaatgccgaatatcactaaacgtttgaatgagcggggttgcttgtggattttcttttttttttttttgtggtgggtgttttctttcttttcttctttttgtgtgtgagtagaagagttaggctgttttcagcaacgtcctctaaatttcatcctctaaagaaatattctttgtcctttacag

SEQ ID NO: 48387 - DNA, 1758 bp, Zea Mays
ccttgaatgacaggacaaagaaatgtttgttggaaacccttaatgagaatttgcgtcatcccaattctcaaatacagatgacccaaatgtggctgcaagacgaggagctgcactggcccttggaatattaccattcaaattcttgatgttgaaatggatgcctgtcatgagtaaactctgtagctcatgcaccattgaggataagcctgatgaccctgatgctgaagcacgtgtgaactctgttagggggctaatttcggtttgcgaaacactaacagcatcttttgatcagctctcaaatggagattctctatatgcatacataaaagattatgtcatgcgagctttatttagagcactcgatgattatgctgtggacaacagaggagatgtgggttcttgggtacgtgaagcagcaatggatgcgctagtacgatgcatgttcatcctctgcaagagagatattgttgctttgagagcagtgtcagccactggccatgactctgaactgggtgatatggaagtaaatgcaagtagtactgcataccggctatttgattctggtattgcacaggatctggtagcaggcattgcaaaacaagcagttgagaaaatagataagataagagaaatagctatcaaaaccctgcagagaattctgtaccaccaggaacacctcatcccatttatacctcacagggagttgcttgaagaaattattcccaacagcagagatttggagtgggcggttcctactgtgtcatatccacgattggtgaaacttcttcaggttagctattatagcaagtctgtgctctcagggctcgtgatttctacaggtggtttgcaggagtctttgaagaaagcttcaatgtcagctttggtagggtatctccaagattcagacatcaatactaattgtgaagggaaaagtagagagtatctattgagttgtgatcttctatggggcctccagcactaccagaaatgtgaccgtgtaattactcccatgttcaagactattgaggctctcttcagtaaaaaggttttcttgaacaaggaggggtacagtgagttctacagtggactggtagattccgtgagctctgaactgaagggatccaaggattttacaaagttatgtgcaggtctctcgatccttgggtacatttcttccgagtcagatggaacttgcaccaaggcattttcccaactcctcacattcctaggccacagataccccaagatccgaaaagctgcagccgaccaggtgtaccttgtgctgctgcaaaatgatgaccttattgtgtcggagaatatggataaagcccaggaattacttgcggagacgtgctgggaaggggatgtggaggaagcaaggcgtaggaggtcagaaatcaacgagatggctggttttagggtcaccacttcacagaagtctggaaagcaagaaactagaacggtcgccgcttcgacggatgagaacagatcttattcgtcattggtcgatttcagcggatactaaagatcgccttacatcctattttcgacgaaaggtgtcgattgtactagtgcacaatgccgaatatcactaaacgtttgaatgagcggggttgcttgtggattttcttttttttttttttgtggtgggtgttttctttcttttcttctttttgtgtgtgagtagaagagttaggctgttttcagcaacgtcctctaaatttcatcctctaaagaaatattctttgtcctttacag

SEQ ID NO: 48388 - DNA, 1770 bp, Zea Mays
ccttgaatgacaggacaaagaaatgtttgttggaaacccttaatgagaatttgcgtcatcccaattctcaaatacagtgtgctgctgttgaggcattaaagcattttattccaacatacctggtatcttctggtgaaaagattgctagtgatattatctcaaaatatgtggcacttctagatgacccaaatgtggctgcaagacgaggagctgcactggcccttggaatattaccattcaaattcttgatgttgaaatggatgcctgtcatgagtaaactctgtagctcatgcaccattgaggataagcctgatgaccctgatgctgaagcacgtgtgaactctgttagggggctaatttcggtttgcgaaacactaacagcatcttttgatcagctctcaaatggagattctctatatgcatacataaaagattatgtcatgcgagctttatttagagcactcgatgattatgctgtggacaacagaggagatgtgggttcttgggtacgtgaagcagcaatggatgcgctagtacgatgcatgttcatcctctgcaagagagatattgttgctttgagagcagtgtcagccactggccatgactctgaactgggtgatatggaagtaaatgcaagtagtactgcataccggctatttgattctggtattgcacaggatctggtagcaggcattgcaaaacaagcagttgagaaaatagataagataagagaaatagctatcaaaaccctgcagagaattctgtaccaccaggaacacctcatcccatttatacctcacagggagttgcttgaagaaattattcccaacagcagagatttggagtgggcggtggtttgcaggagtctttgaagaaagcttcaatgtcagctttggtagggtatctccaagattcagacatcaatactaattgtgaagggaaaagtagagagtatctattgagttgtgatcttctatggggcctccagcactaccagaaatgtgaccgtgtaattactcccatgttcaagactattgaggctctcttcagtaaaaaggttttcttgaacaaggaggggtacagtgagttctacagtggactggtagattccgtgagctctgaactgaagggatccaaggattttacaaagttatgtgcaggtctctcgatccttgggtacatttcttccgagtcagatggaacttgcaccaaggcattttcccaactcctcacattcctaggccacagataccccaagatccgaaaagctgcagccgaccaggtgtaccttgtgctgctgcaaaatgatgaccttattgtgtcggagaatatggataaagcccaggaattacttgcggagacgtgctgggaaggggatgtggaggaagcaaggcgtaggaggtcagaaatcaacgagatggctggttttagggtcaccacttcacagaagtctggaaagcaagaaactagaacggtcgccgcttcgacggatgagaacagatcttattcgtcattggtcgatttcagcggatactaaagatcgccttacatcctattttcgacgaaaggtgtcgattgtactagtgcacaatgccgaatatcactaaacgtttgaatgagcggggttgcttgtggattttcttttttttttttttgtggtgggtgttttctttcttttcttctttttgtgtgtgagtagaagagttaggctgttttcagcaacgtcctctaaatttcatcctctaaagaaatattctttgtcctttacag

SEQ ID NO: 48389 - DNA, 1725 bp, Zea Mays
ccttgaatgacaggacaaagaaatgtttgttggaaacccttaatgagaatttgcgtcatcccaattctcaaatacagtgtgctgctgttgaggcattaaagcattttattccaacatacctggtatcttctggtgaaaagattgctagtgatattatctcaaaatatgtggcacttctagatgacccaaatgtggctgcaagacgaggagctgcactggcccttggaatattaccattcaaattcttgatgttgaaatggatgcctgtcatgagtaaactctgtagctcatgcaccattgaggataagcctgatgaccctgatgctgaagcacgtgtgaactctgttagggggctaatttcggtttgcgaaacactaacagcatcttttgatcagctctcaaatggagattctctatatgcatacataaaagattatgtcatgcgagctttatttagagcactcgatgattatgctgtggacaacagaggagatgtgggttcttgggtacgtgaagcagcaatggatgcgctagtacgatgcatgttcatcctctgcaagagagatattgttgctttgagagcagtgtcagccactggccatgactctgaactgggtgatatggaagtaaatgcaagtagtactgcataccggctatttgattctggtattgcacaggatctggtagcaggcattgcaaaacaagcagttgagaaaatagataagataagagaaatagctatcaaaaccctgcagagaattctgtaccaccaggaacacctcatcccatttatacctcacagggagttgcttgaagaaattattcccaacagcagagatttggagtgggcggtggtttgcaggagtctttgaagaaagcttcaatgtcagctttggtagggtatctccaagattcagacatcaatactaattgtgaagggaaaagtagagagtatctattgagttgtgatcttctatggggcctccagcactaccagaaatgtgaccgtgtaattactcccatgttcaaggggtacagtgagttctacagtggactggtagattccgtgagctctgaactgaagggatccaaggattttacaaagttatgtgcaggtctctcgatccttgggtacatttcttccgagtcagatggaacttgcaccaaggcattttcccaactcctcacattcctaggccacagataccccaagatccgaaaagctgcagccgaccaggtgtaccttgtgctgctgcaaaatgatgaccttattgtgtcggagaatatggataaagcccaggaattacttgcggagacgtgctgggaaggggatgtggaggaagcaaggcgtaggaggtcagaaatcaacgagatggctggttttagggtcaccacttcacagaagtctggaaagcaagaaactagaacggtcgccgcttcgacggatgagaacagatcttattcgtcattggtcgatttcagcggatactaaagatcgccttacatcctattttcgacgaaaggtgtcgattgtactagtgcacaatgccgaatatcactaaacgtttgaatgagcggggttgcttgtggattttcttttttttttttttgtggtgggtgttttctttcttttcttctttttgtgtgtgagtagaagagttaggctgttttcagcaacgtcctctaaatttcatcctctaaagaaatattctttgtcctttacag

SEQ ID NO: 48390 - DNA, 2183 bp, Zea Mays
atagccttcccattggaaagcgaacgctcacagctcacagctcacgcacccatccacctccaaagtccaaaagcggaacccacgcctgccgcaacggcgaaaccgtcggaaccctagatctctctcgcccgcgctccgaaaccccagatccgccatgcaccagcctagagctcgctacccacccggctatggctccggcggtggaggcggagccggacgtggcggtggaggcggaaatggaggaggtggcggaaaccacaactactacggccgaaacccgcagcaacaccactaccaccagcagcagcagtcgcagcactctcataggaactcttcgtaccagcaacagtggctgcggcgagaccaggcccccgccgttgcgggggcagcgtccggaaacgctgtggccaagacggcgtctcagcttgacgccgtaggctcgagctcccaagactggaaggctcaactaaatataccagctccagatacacgctacaggacagaggatgtcactgcaacaaaaggcaatgagtttgaagattatttcttgaaacgtgaactgcttatgggaatctacgaaaagggatttgaaagaccatctcctattcaagaagaaagcattcctattgcgctgactggaagtgatattcttgcaagggcaaaaaatggcactggaaagactgctgccttttgcattccggcacttgaaaaaattgatcctgaaaaaaatgctattcaagttgttatactagtaccaacaagggaactggctctgcaaacttcgcaagtctgtaaagagctcgggaagtaccttaacattcaagttatggttagcactggaggaactagcttgaaggatgacatcatgcgtttataccaacctgttcatttacttgttgggactcctggccgaatacttgatcttaccaggaagggcatttgtgtgttgaaagactgttcaatgcttgtcatggatgaggcagacaagctattagctccagagttccagccttctgtggaggcacttattcctttcctgtaactgtcaaggaattcaaagataaatatctgcctagaccttatgtgattaatctaatggatgaactgaccctgaaaggaatcacacaatattatgcttttgtcgaagaaaggcaaaaagttcattgcctgaatacacttttctcaaagcttcaaattaatcaatccattatattctgcaactctgttaatagagttgagctactggctaagaaaataactgaactcggttattcatgcttctacattcatgctaagatgttgcaagaccacagaaaccgagtgtttcatgattttcgtaatggtgcttgcagaaaccttgtgtgcacagatctgtttaccagaggaattgatatccaggctgttaatgtggtcattaattttgacttccctaagacatctgagacatacttacacagggttggccgttctgggagatatggacaccttggtttggcagtgaacttgatcacttatgaagaccgtttcaacttatataggattgagcaagaacttggaacggaaattaagacaatacccccacagattgacctgtccatatactgccaatgatatgtgacagtttcaatgagcatcggacacattttatttattttgagaacatctgtacatagcaacccatcaagtgagttctccaactaaggcgcaactatttcagaagctacctaaatggctacattcctttgtcgtcacacatcaatttctcccccattctcgtcgggttttgttttaatgccttgatgtcgtttgtaagcttacttggattagtagaggaagtgtttcctgtaggctctgatctggtactaacctgtttagctgaggacatgcacattgggtgggctgcttggggcccaaaaactatgatgagatgagacattatcttacctcgcttgacattttcaatttacctgtttgccaatctcagtagagcctcagttctactggagttgcctgtgttattatttgattagttttccatttccatctccctaatgttatgatgcataatatagtgatgcctatctgtagccgtatttgttgattttgatttttcatggtgtgttacggtttaacttgaaattatttctgtatcaacttcgttgcgagaatacccatcttgtact

SEQ ID NO: 48391 - DNA, 712 bp, Zea Mays
tctgcctagaccttatgtgattaatctaatggatgaactgaccctgaaaggaatcacacaatattatgcttttgtcgaagaaaggcaaaaagttcattgcctgaatacacttttctcaaagcttcaaattaatcaatccattatattctgcaactctgttaatagagttgagctactggctaagaaaataactgaactcggttattcatgcttctacattcatgctaagatgttgcaagaccacagaaaccgagtgtttcatgattttcgtaatggtgcttgcagaaaccttgtgtgcacagatctgtttaccagaggaattgatatccaggctgttaatgtggtcattaattttgacttccctaagacatctgagacatacttacacagggttggccgttctgggagatatggacaccttggtttggcagtgaacttgatcacttatgaagaccgtttcaacttatataggattgagcaagaacttggaacggaaattaagacaatacccccacagattgacctgtccatatactgccaatgatatgtgacagtttcaatgagcatcggacacattttatttattttgagaacatctgtacatagcaacccatcaagacagaaactccggcgccttatattacaataatgatgaaaaatacggttcccgtggcagtatgaagctcaacggttcaaaactgagtgtcccctg

SEQ ID NO: 48392 - DNA, 3311 bp, Zea Mays
ctcgctccctctctgcctcagtctctgtctgttaccgatgtctccagtcctctggctcacctcactcctcttcctcgtccactcggccgccgccgacaccaggcgggcgctgcacgagccgctcttccccatcgaatggaccccgccgccgtccactacggcgccaccagcaccgggattcgcctccgatccctccacacccgtcccacccgtcgacaacggcgggccggcgctactccccgctcctccgccaccgaacactgtcgccgcggacgcctcttcatcccgcacaggcccgggcccgcgcccccacggcggcggcggaacacccaaggccgccattgtcgtcgcctccgccgccgcggcggccgtcctcgcgctgctggccttcgccgccgcgtttctcctcacgggccgtctcgcgcggcaccccgcgtgggcgcacaaaccccccggcctcgccgccgccgcgcaccctgggcctgcctccgcactcgtgctgcacgctgacgcggtgggcacctcggcggcggcggcggcctcgtcgtcgggtgccactgccacaccgcaccggaaggcccgctcggagcgcgcgaggcggggcatgtgccgcgacgtcgacaccgtcccgagcccagaactcaggccgctcccgccgcttcggcgcgcgggatcgtccgacgaggacgccgcgtactacacaccgggccagcgctcggcggtgtccgccggcggcgagggcgccgggacgtggagccaggcgagcgcgtccagcccacgaaccaccactccctcccgccaaagcctccccagcctcaccagcgattttttcccaccgacgccggccgccgccacggccgttccagctgcaaccgtggcgcctcctccgcccgcacctcctgcgccacgctcccgacgcactctgccgcggacccgcttttccgccggctccgcctcggatatgaatatgatcaagcaaattgtctcgccatcctccaacctaccaccgccacctcctcctcctccaccgccgccgccgccagcgccaagacgcaccaacgcaatcccaaagcctctgacaaccgctacaccattatcaacgcgtcggcttctcaaacaagagcaaacagaggggccaagtgtcgctgtgccgagagcacccgtcgtggcggtgaacaaggacaatgacggcatgccaattcggacgaacgatgatcatgccggtgacgaagcccgtcccaagctgaagccgctgcactgggacaaggtccgggcgtgctccgaccgcgacatggtctgggaccggctcaagtctaattcgttccagttggatgaggacatgatcgaggtgcttttcacgaacaatgctgcaaatgcacctcctagggacacactgagaaaacctggagtgctgcaatgtagtgccaaagagaaggtccttgatcctaagaaggcacagaacattgccatcctgctgcgcgcgctgaatgtcactccggaagaggtctccgatgcactgctagatggcaatgctgaatgcctgggtgcggatttgttggaaaccttggtaaagatggctcctacgaaagaggaagaactgaagcttcgaaactttaccggggactcatcgaagcttggttccgcagagcggtttctcaaggcagtgcttgacatacctttttctttcaaaagagttgatgctatgctctatcgagcaaattttgagagcgaaatcaattacctcaggaaatctttcgaaacattagaggtatgctggttcactttgcatagtacgtactgtagtttctattatcagtggcttgcacatgaatcagtaattgtttcacataactgtcatagcgtggaacaaagtaattgtttctcaacaaactcttcattcactgtcgtagatttgaacagctcattgcacatcggtcacagccattgccagttcggcacttatgacttatgtgcatctgagatctgacagtggcacccatgcaacagggagggaggcgtacgtaatgatgtaatagcatgactagttatcagcaaaatcataagcctttctgatttccgtgcctttctgacaatgatggcattcatttttgccattcaaaatatgtagtgatcttgttcctcctacccccacccacccaaaaaaaaacgatagccctgctctgaattatagtgcaaaaaaggagttgccattattgtcggcatggttttgcagggagcttgtgatgatttaaaaagcagtagattgttcctgaagctacttgaagctgtcctgcgaactgggaaccgaatgaatgtcggcacaaaccgcggtcaggcaaaagctttcaagctggacactctactcaagctcgcagacgtcaaaggggccgatggtaaaaccaccttgctgcacttcgttgtccaggaaatcgtgcggtcggaagatgcaaaatccgagaaagccgtagaagacgaaaccagaagcatcgtgaaagacgaaacgttccgtaagcaaggattgaaggttgtatctgggctgagcaatgagctcggcaacgtcaagaaagcagcgggcatggatttcgatgtgctgcacagctatgtatccaagctccaggccggccttagcaggatcaagtcggtcctcctgctcgaggagcagtgcgcccaaggccacggttttttcgcgaggatgcgtggttttctcgaggaagctgagatggagatccaacaggtgaggtgcgacgaggagagggctctgggaagggtgaaagagatcaccgagtatttccatggcgatgccggaaaggaggaagcgcaccctctgaggatcttcatggtggtgagggacttcctgtccatgctggaccatgtatgcaaggaggtcggccagcaggacaggacggttgttgttggatccgcaaggtccttccgcatgtcagcgaccacggcaatggcgaacctcaaagtgtacggccagcacgcaagagacaacgacgacgacgaagagagttggtcgctgtaggaaatcggggtcagggaccacggagccaaacgaacagaaccaaccacaagaaccctatatagatgagtattattgtttcatcttaccatatagcgcacatatgtaacttttgataagtacgaagataggatcaaattacgttgtataattatggatgcaccggattctttcttgtacgaagataggatgattttttgagcctagagcacccgaaaaaccattcaaaactgactaggggtcaagattgaatggttttgatagttgacatacaaaagttagataaaag

SEQ ID NO: 48393 - DNA, 2773 bp, Zea Mays
ctcgctccctctctgcctcagtctctgtctgttaccgatgtctccagtcctctggctcacctcactcctcttcctcgtccactcggccgccgccgacaccaggcgggcgctgcacgagccgctcttccccatcgaatggaccccgccgccgtccactacggcgccaccagcaccgggattcgcctccgatccctccacacccgtcccacccgtcgacaacggcgggccggcgctactccccgctcctccgccaccgaacactgtcgccgcggacgcctcttcatcccgcacaggcccgggcccgcgcccccacggcggcggcggaacacccaaggccgccattgtcgtcgcctccgccgccgcggcggccgtcctcgcgctgctggccttcgccgccgcgtttctcctcacgggccgtctcgcgcggcaccccgcgtgggcgcacaaaccccccggcctcgccgccgccgcgcaccctgggcctgcctccgcactcgtgctgcacgctgacgcggtgggcacctcggcggcggcggcggcctcgtcgtcgggtgccactgccacaccgcaccggaaggcccgctcggagcgcgcgaggcggggcatgtgccgcgacgtcgacaccgtcccgagcccagaactcaggccgctcccgccgcttcggcgcgcgggatcgtccgacgaggacgccgcgtactacacaccgggccagcgctcggcggtgtccgccggcggcgagggcgccgggacgtggagccaggcgagcgcgtccagcccacgaaccaccactccctcccgccaaagcctccccagcctcaccagcgattttttcccaccgacgccggccgccgccacggccgttccagctgcaaccgtggcgcctcctccgcccgcacctcctgcgccacgctcccgacgcactctgccgcggacccgcttttccgccggctccgcctcggatatgaatatgatcaagcaaattgtctcgccatcctccaacctaccaccgccacctcctcctcctccaccgccgccgccgccagcgccaagacgcaccaacgcaatcccaaagcctctgacaaccgctacaccattatcaacgcgtcggcttctcaaacaagagcaaacagaggggccaagtgtcgctgtgccgagagcacccgtcgtggcggtgaacaaggacaatgacggcatgccaattcggacgaacgatgatcatgccggtgacgaagcccgtcccaagctgaagccgctgcactgggacaaggtccgggcgtgctccgaccgcgacatggtctgggaccggctcaagtctaattcgttccagttggatgaggacatgatcgaggtgcttttcacgaacaatgctgcaaatgcacctcctagggacacactgagaaaacctggagtgctgcaatgtagtgccaaagagaaggtccttgatcctaagaaggcaatgctgaatgcctgggtgcggatttgttggaaaccttggtaaagatggctcctacgaaagaggaagaactgaagcttcgaaactttaccggggactcatcgaagcttggttccgcagagcggtttctcaaggcagtgcttgacatacctttttctttcaaaagagttgatgctatgctctatcgagcaaattttgagagcgaaatcaattacctcaggaaatctttcgaaacattagagggagcttgtgatgatttaaaaagcagtagattgttcctgaagctacttgaagctgtcctgcgaactgggaaccgaatgaatgtcggcacaaaccgcggtcaggcaaaagctttcaagctggacactctactcaagctcgcagacgtcaaaggggccgatggtaaaaccaccttgctgcacttcgttgtccaggaaatcgtgcggtcggaagatgcaaaatccgagaaagccgtagaagacgaaaccagaagcatcgtgaaagacgaaacgttccgtaagcaaggattgaaggttgtatctgggctgagcaatgagctcggcaacgtcaagaaagcagcgggcatggatttcgatgtgctgcacagctatgtatccaagctccaggccggccttagcaggatcaagtcggtcctcctgctcgaggagcagtgcgcccaaggccacggttttttcgcgaggatgcgtggttttctcgaggaagctgagatggagatccaacaggtgaggtgcgacgaggagagggctctgggaagggtgaaagagatcaccgagtatttccatggcgatgccggaaaggaggaagcgcaccctctgaggatcttcatggtggtgagggacttcctgtccatgctggaccatgtatgcaaggaggtcggccagcaggacaggacggttgttgttggatccgcaaggtccttccgcatgtcagcgaccacggcaatggcgaacctcaaagtgtacggccagcacgcaagagacaacgacgacgacgaagagagttggtcgctgtaggaaatcggggtcagggaccacggagccaaacgaacagaaccaaccacaagaaccctatatagatgagtattattgtttcatcttaccatatagcgcacatatgtaacttttgataagtacgaagataggatcaaattacgttgtataattatggatgcaccggattctttcttgtacgaagataggatgattttttgagcctagagcacccgaaaaaccattcaaaactgactaggggtcaagattgaatggttttgatagttgacatacaaaagttagataaaag

SEQ ID NO: 48394 - DNA, 2721 bp, Zea Mays
gttaccgatgtctccagtcctctggctcacctcactcctcttcctcgtccactcggccgccgccgacaccaggcgggcgctgcacgagccgctcttccccatcgaatggaccccgccgccgtccactacggcgccaccagcaccgggattcgcctccgatccctccacacccgtcccacccgtcgacaacggcgggccggcgctactccccgctcctccgccaccgaacactgtcgccgcggacgcctcttcatcccgcacaggcccgggcccgcgcccccacggcggcggcggaacacccaaggccgccattgtcgtcgcctccgccgccgcggcggccgtcctcgcgctgctggccttcgccgccgcgtttctcctcacgggccgtctcgcgcggcaccccgcgtgggcgcacaaaccccccggcctcgccgccgccgcgcaccctgggcctgcctccgcactcgtgctgcacgctgacgcggtgggcacctcggcggcggcggcggcctcgtcgtcgggtgccactgccacaccgcaccggaaggcccgctcggagcgcgcgaggcggggcatgtgccgcgacgtcgacaccgtcccgagcccagaactcaggccgctcccgccgcttcggcgcgcgggatcgtccgacgaggacgccgcgtactacacaccgggccagcgctcggcggtgtccgccggcggcgagggcgccgggacgtggagccaggcgagcgcgtccagcccacgaaccaccactccctcccgccaaagcctccccagcctcaccagcgattttttcccaccgacgccggccgccgccacggccgttccagctgcaaccgtggcgcctcctccgcccgcacctcctgcgccacgctcccgacgcactctgccgcggacccgcttttccgccggctccgcctcggatatgaatatgatcaagcaaattgtctcgccatcctccaacctaccaccgccacctcctcctcctccaccgccgccgccgccagcgccaagacgcaccaacgcaatcccaaagcctctgacaaccgctacaccattatcaacgcgtcggcttctcaaacaagagcaaacagaggggccaagtgtcgctgtgccgagagcacccgtcgtggcggtgaacaaggacaatgacggcatgccaattcggacgaacgatgatcatgccggtgacgaagcccgtcccaagctgaagccgctgcactgggacaaggtccgggcgtgctccgaccgcgacatggtctgggaccggctcaagtctaattcgttccagttggatgaggacatgatcgaggtgcttttcacgaacaatgctgcaaatgcacctcctagggacacactgagaaaacctggagtgctgcaatgtagtgccaaagagaaggtccttgatcctaagaaggcacagaacattgccatcctgctgcgcgcgctgaatgtcactccggaagaggtctccgatgcactgctagatggcaatgctgaatgcctgggtgcggatttgttggaaaccttggtaaagatggctcctacgaaagaggaagaactgaagcttcgaaactttaccggggactcatcgaagcttggttccgcagagcggtttctcaaggcagtgcttgacatacctttttctttcaaaagagttgatgctatgctctatcgagcaaattttgagagcgaaatcaattacctcaggaaatctttcgaaacattagagggagcttgtgatgatttaaaaagcagtagattgttcctgaagctacttgaagctgtcctgcgaactgggaaccgaatgaatgtcggcacaaaccgcggaaatcgtgcggtcggaagatgcaaaatccgagaaagccgtagaagacgaaaccagaagcatcgtgaaagacgaaacgttccgtaagcaaggattgaaggttgtatctgggctgagcaatgagctcggcaacgtcaagaaagcagcgggcatggatttcgatgtgctgcacagctatgtatccaagctccaggccggccttagcaggatcaagtcggtcctcctgctcgaggagcagtgcgcccaaggccacggttttttcgcgaggatgcgtggttttctcgaggaagctgagatggagatccaacaggtgaggtgcgacgaggagagggctctgggaagggtgaaagagatcaccgagtatttccatggcgatgccggaaaggaggaagcgcaccctctgaggatcttcatggtggtgagggacttcctgtccatgctggaccatgtatgcaaggaggtcggccagcaggacaggacggttgttgttggatccgcaaggtccttccgcatgtcagcgaccacggcaatggcgaacctcaaagtgtacggccagcacgcaagagacaacgacgacgacgaagagagttggtcgctgtaggaaatcggggtcagggaccacggagccaaacgaacagaaccaaccacaagaaccctatatagatgagtattattgtttcatcttaccatatagcgcacatatgtaacttttgataagtacgaagataggatcaaattacgttgtataattatggatgcaccggattctttcttgtacgaagataggatgattttttgagcctagagcacccgaaaaaccattcaaaactgactaggggtcaagattgaatggttttgatagttgacatacaaaagttagataaaag

SEQ ID NO: 48395 - DNA, 2736 bp, Zea Mays
gcccaaacgagcaagccttaagcccttaactgacgcttgtgagggcgtcggcagttcgcgacaccccgtgcagccgtgctcttccgcttgaactagggcgcctccgcctccgcgcccgcgccgccgccggctgtagccatgtccgacgaatacgtggacttgcccgtctcggacgaggatgaagaagagctcgaagatgagatggatgatggtgatggggagagtggtggtggaagctcgaagaaaaaggccaagcagcacgtggagcagctcaagcggctgcagcaaaaggatcctgatttctataaatatttagaagagtttgataaagatttgttgggatttgatgatgatgatgatgaaatcgagaacgaccgggagactggggttgaggagaaagagcaatatgtatctaaagaggaactgaagcatgtgaaaccgattacaatggaaatggttgattcctggtgcaacggagtagagaatgaaaagataggttctatccgttctattcttcaagcttttcgcagagcctgccattatggtgaagatcatggggacaattcaactccgaagctcagtgtcatgtctggcagcgtacttgataaagttatgcactttgttttgaaacacatggataaagtcctccgtcaattacttggtgccccaagctatggagggaagaaagaggtaatcagtgagctgatgctgagtaagtcatggaagaggcatggtaatcttatgaggatctatcttgccaatgcgcttcatatgataacagagatgaccgatgagcaaatgatagcatttactgtacaccgtgtcagagcatcagctgtttttctggcagctttcccatcgctcctgaggaagtatgttaaggctctgctccatacctgggctagaggacgaggtgcaatgcctcttgtttcttttatgttccttcgagacttgtgcattcaagtaggttcagattgccttgatacttgcctcaagggtatctataaggcttatttggtgaactgcaaactgtccaaatctatcagcggatcaaaacaacaacacattcaattccttggaaattgtgtcagagaattgtatagtctggatccacaaagtgcgtatcagcatgcttttgttttcatccgtcaactgggggttatcctaagaggagctcttactgaaagggggccaaagtcagtgaaggacaaaaggcagaaagaaagtagcaaatcatcgaaaaaacaagcggagaaatcttaccaaaaaatttatgattggcaatacatattctgccttgagctttggaccagtgttgtgtgcggatgtagttctgaggaagaattccgacctctagcttatccgttgacacaaataatacatggtgtggcatgcctcgtacctagcgcacgttacttccctgtgcgctttaggtgtgtcagaatgcttaattgtattgccgaagccactggtaccttcattcccgtgtcctccctgctgcttgatatgcttgaaatgaaagaacttagaggacgtccagatggtgttggcaaagccgtgaatttgttcagtgttaaacaggttgacaagaaaacagtaaagacacgtgcctttcaggaagcttgcatttattctgtggtcgatgagctggctaaacatttgacccaatggagctactccattgccttctttgagatgtcctttattccacttgttcggctccgaagtttttgcaaaaccattaaagcggacagatttaggaaagagatgaaggatcttatctatcagatagaggccaatgtcgagttcattaagtcaaaacgagtggggattgcattttcacccaatgacccagctgtagagtcatttctgcagaccgaaaaggaagaacgttgcagccctctctcaaaatttgttgctactttacaccagagagcgcaagacaggatggatgctctggatgagaccagtgtgattgtgggtgccgagtcctcaaccttctcacggaggttatcagaagcgcagaagcaacaggatgagcaggacgatgatgaaggcactatcgctttcagtaagaactggctgtctgaaaataagaaacccaaaaccccaaaggaggataaaaagcgaccccgggaggatgatgatgtcgcgactgaggaggatcgggttgaggatttggtcttgagctcagatgaagaggatggcaacaatgaggaagcagacgatggttttgttccggttgaaggtgatagtgatgaagactttgtagaccctgacagcgaatataagaaacaaaagaaggcgaagctgaagaagaggaacaagcgccagccatttctgcacaaggcgccctctagaacaaaaagtaattcagggcccaagaagaaggccagacattagttatgcctgatagggcttggcaaatatgctgccgttgtgatgtatgcttctgagttccgaccgataaaaacattgtcccttgagtggaaaaattattatattttttcaagaaaaatttcaagtctttttttgaccccaacaggactgagatagaatttccaatctgagttttcatttcagtgctcaagggtttacatgattcaaatgtaaagggtttacattgccatggaaaaaattgtacaccaaacatcacaaatatctacctgttcctggtagtgtttatatacgtctagcatgggcgaatgtccatattattgtctgatttgattcatg

SEQ ID NO: 48396 - DNA, 2779 bp, Zea Mays
tgacgcttgtgagggcgtcggcagttcgcgacaccccgtgcagccgtgctcttccgcttgaactagggcgcctccgcctccgcgcccgcgccgccgccggctgtagccatgtccgacgaatacgtggacttgcccgtctcggacgaggatgaagaagagctcgaagatgagatggatgatggtgatggggagagtggtggtggaagctcgaagaaaaaggccaagcagcacgtggagcagctcaagcggctgcagcaaaaggatcctgatttctataaatatttagaagagtttgataaagatttgttgggatttgatgatgatgatgatgaaatcgagaacgaccgggagactggggttgaggagaaagagcaatatgtatctaaagaggaactgaagcatgtgaaaccgattacaatggaaatggttgattcctggtgcaacggagtagagaatgaaaagataggttctatccgttctattcttcaagcttttcgcagagcctgccattatggtgaagatcatggggacaattcaactccgaagctcagtgtcatgtctggcagcgtacttgataaagttatgcactttgttttgaaacacatggataaagtcctccgtcaattacttggtgccccaagctatggagggaagaaagaggtaatcagtgagctgatgctgagtaagtcatggaagaggcatggtaatcttatgaggatctatcttgccaatgcgcttcatatgataacagagatgaccgatgagcaaatgatagcatttactgtacaccgtgtcagagcatcagctgtttttctggcagctttcccatcgctcctgaggaagtatgttaaggctctgctccatacctgggctagaggacgaggtgcaatgcctcttgtttcttttatgttccttcgagacttgtgcattcaagtaggttcagattgccttgatacttgcctcaagggtatctataaggcttatttggtgaactgcaaactgtccaaatctatcagcggatcaaaacaacaacacattcaattccttggaaattgtgtcagagaattgtatagtctggatccacaaagtgcgtatcagcatgcttttgttttcatccgtcaactgggggttatcctaagaggagctcttactgaaagggggccaaagtgaaggacaaaaggcagaaagaaagtagcaaatcatcgaaaaaacaagcggagaaatcttaccaaaaaatttatgattggcaatacatattctgccttgagctttggaccagtgttgtgtgcggatgtagttctgaggaagaattccgacctctagcttatccgttgacacaaataatacatggtgtggcatgcctcgtacctagcgcacgttacttccctgtgcgctttaggtgtgtcagaatgcttaattgtattgccgaagccactggtaccttcattcccgtgtcctccctgctgcttgatatgcttgaaatgaaagaacttagaggacgtccagatggtgttggcaaagccgtgaatttgttcagtgttaaacaggttgacaagaaaacagtaaagacacgtgcctttcaggaagcttgcatttattctgtggtcgatgagctggctaaacatttgacccaatggagctactccattgccttctttgagatgtcctttattccacttgttcggctccgaagtttttgcaaaaccattaaagcggacagatttaggaaagagatgaaggatcttatctatcagatagaggccaatgtcgagttcattaagtcaaaacgagtggggattgcattttcacccaatgacccagctgtagagtcatttctgcagaccgaaaaggaagaacgttgcagccctctctcaaaatttgttgctactttacaccagagagcgcaagacaggatggatgctctggatgagaccagtgtgattgtgggtgccgagtcctcaaccttctcacggaggttatcagaagcgcagaagcaacaggatgagcaggacgatgatgaaggcactatcgctttcagtaagaactggctgtctgaaaataagaaacccaagtatgttctggcttacctctttttttttcccattacttggcgtggaaaacacaatcatactgttgttcggtgtgcagaaccccaaaggaggataaaaagcgaccccgggaggatgatgatgtcgcgactgaggaggatcgggttgaggatttggtcttgagctcagatgaagaggatggcaacaatgaggaagcagacgatggttttgttccggttgaaggtgatagtgatgaagactttgtagaccctgacagcgaatataagaaacaaaagaaggcgaagctgaagaagaggaacaagcgccagccatttctgcacaaggcgccctctagaacaaaaagtaattcagggcccaagaagaaggccagacattagttatgcctgatagggcttggcaaatatgctgccgttgtgatgtatgcttctgagttccgaccgataaaaacattgtcccttgagtggaaaaattattatattttttcaagaaaaatttcaagtctttttttgaccccaacaggactgagatagaatttccaatctgagttttcatttcagtgctcaagggtttacatgattcaaatgtaaagggtttacattgccatggaaaaaattgtacaccaaacatcacaaatatctacctgttcctggtagtgtttatatacgtctagcatgggcgaatgtccatattattgtctgatttgattcatg

SEQ ID NO: 48397 - DNA, 2544 bp, Zea Mays
tcgcgacaccccgtgcagccgtgctcttccgcttgaactagggcgcctccgcctccgcgcccgcgccgccgccggctgtagccatgtccgacgaatacggtgggctcctcatccatccacatttctgtgggttactctatgctctattgctattgcgcttgtttaacttgggattttgattggttttcttcccctttcgctgtggttttggcgggggattagtggacttgcccgtctcggacgaggatgaagaagagctcgaagatgagatggatgatggtgatggggagagtggtggtggaagctcgaagaaaaaggccaagcagcacgtggagcagctcaagcggctgcagcaaaaggatcctgatttctataaatatttagaagagtttgataaagatttgttgggatttgatgatgatgatgatgaaatcgaggtaagctggtccctttttgtgagttttctatactagaatgatgagtggtcattgttctacattacatttagaacgaccgggagactggggttgaggagaaagagcaatatgtatctaaagaggaactgaagcatgtgaaaccgattacaatggaaatggttgattcctggtgcaacggagtagagaatgaaaagataggttctatccgttctattcttcaagcttttcgcagagcctgccattatggtgaagatcatggggacaattcaactccgaagctcagtgtcatgtctggcagcgtacttgataaagttatgcactttgttttgaaacacatggataaagtcctccgtcaattacttggtgccccaagctatggagggaagaaagaggtaatcagtgagctgatgctgagtaagtcatggaagaggcatggtaatcttatgaggatctatcttgccaatgcgcttcatatgataacagagatgaccgatgagcaaatgatagcatttactgtacaccgtgtcagagcatcagctgtttttctggcagctttcccatcgctcctgaggaagtatgttaaggctctgctccatacctgggctagaggacgaggtgcaatgcctcttgtttcttttatgttccttcgagacttgtgcattcaagtaggttcagattgccttgatacttgcctcaagggtatctataaggcttatttggtgaactgcaaactgtccaaatctatcagcggatcaaaacaacaacacattcaattccttggaaattgtgtcagagaattgtatagtctggatccacaaagtgcgtatcagcatgcttttgttttcatccgtcaactgggggttatcctaagaggagctcttactgaaagggggccaaagtgaaggacaaaaggcagaaagaaagtagcaaatcatcgaaaaaacaagcggaggttgacaagaaaacagtaaagacacgtgcctttcaggaagcttgcatttattctgtggtcgatgagctggctaaacatttgacccaatggagctactccattgccttctttgagatgtcctttattccacttgttcggctccgaagtttttgcaaaaccattaaagcggacagatttaggaaagagatgaaggatcttatctatcagatagaggccaatgtcgagttcattaagtcaaaacgagtggggattgcattttcacccaatgacccagctgtagagtcatttctgcagaccgaaaaggaagaacgttgcagccctctctcaaaatttgttgctactttacaccagagagcgcaagacaggatggatgctctggatgagaccagtgtgattgtgggtgccgagtcctcaaccttctcacggaggttatcagaagcgcagaagcaacaggatgagcaggacgatgatgaaggcactatcgctttcagtaagaactggctgtctgaaaataagaaacccaaaaccccaaaggaggataaaaagcgaccccgggaggatgatgatgtcgcgactgaggaggatcgggttgaggatttggtcttgagctcagatgaagaggatggcaacaatgaggaagcagacgatggttttgttccggttgaaggtgatagtgatgaagactttgtagaccctgacagcgaatataagaaacaaaagaaggcgaagctgaagaagaggaacaagcgccagccatttctgcacaaggcgccctctagaacaaaaagtaattcagggcccaagaagaaggccagacattagttatgcctgatagggcttggcaaatatgctgccgttgtgatgtatgcttctgagttccgaccgataaaaacattgtcccttgagtggaaaaattattatattttttcaagaaaaatttcaagtctttttttgaccccaacaggactgagatagaatttccaatctgagttttcatttcagtgctcaagggtttacatgattcaaatgtaaagggtttacattgccatggaaaaaattgtacaccaaacatcacaaatatctacctgttcctggtagtgtttatatacgtctagcatgggcgaatgtccatattattgtctgatttgattcatg

SEQ ID NO: 48398 - DNA, 2560 bp, Zea Mays
ggcgtctctcactgccacttctgttccagcacacgcatgagaaagctgcggagccagaaagcaggcccgccggccgccgccgcctccctccgcttcgccgcgctcctccagtcgtgcggccgcaccggagacatccgccgaggccgcgccctacacgcgcgcctcctgctcaccggcgcggccgccgcgtccaccttcctcgccaaccacctcatcaccatgtactcccactgcgccgacgcggtctccgccgtccgcgtgttcggcgtcgtgccccgccccaacctcgtctcctggacgacgctcgtctcgggtctcgtccagaactccatgcaccacgacgcgctcgccgccttcgccgccatgcgccgtgcgcatatcgcccccactcagttcgcgctctccagcgccgcgcgcgccgcggccgcactctccgccccgcgccccggcacgcagctgcactgcatcggcatcaggcttggcttcgacaatgagctcttcgtcgcgagcaacctcgcggacatgtactccaagtgcggcctccttcacgaggcgtgtagggtgttcgatcaaatgccgcaaaaggatgctgtcacctggactaccatgatcgatggctacgcgaagaacgggagcctagaggccgccattctgatttttcgggatatgaaatgtgagggcctggttggagctgaccaacatgtcttctgcagtgcattgagtgcatcgggagggctcaaggatggatggtttggtcgaagcctgcactgttgtataattaaggctgggtttgaactggagactgttgtgaggaatgcgttactggacatgtatgctaagtctggggatttggagaatgcctctcgtgtggtgagtattgatcctggaggttggaatgttgtgtcagctacctcactgattgacggttacgttgaggcaggtcgtattgaggaggctcttgagacatatactgagttggggaggcaaggtgttgagcccaatgaattcacttttgcgagcatgattaagggctgtgccatgcatgatctgctcgaacaaggtgcccagctgcatgctcaagtgctcaagacaaatttgatcagtgactcatttgttggttccacccttgtgtatatgtatggaaattgtggcctcattagtttgtcccttcagttatttaatgagattggataccgtactgagattgcctggaatgcggttataaatgtttatgcgcagcacggtcatgggtggggagcaatccaagcttttgataggatgacctcaagtggtatcaggccaaatcacattacatttgtctgcctgctgactgcatgcagtcatgctggattagtggacgaaggactgggatatttccactccatgaaggatgcacatggtattgagcctaaagcagaacattattcatgtatcattgatatgtatggtcgagctgggagactagatgaagcagaaaaattcataagtgagatgccagtcaaacccagtgcttatgcttggtgctccttgcttggagcatgccgtatgcaaggaaacaaggagttgggagaggttgctgctcagaatcttatgaaacttgatccaaataacaccggtattcacatatccctttctgggatatacacatcattgggccaatgggaggatgtgaaggcagtcaagaagtcaatgaaggatatcagtattaaaaagctgcctggttttagctaggtcgatgctaacaagaaaacacgtgtgtttggatctgaggtttagtcacactcactcacagcaagagcagatatataaaaaacttgagaaactctccaaaaggataaaggaggaaggttatgtggcagacataatctccttgccactttaccttgaagatagaaaaaaaaacgagaggcttctgcactatcacagtgagagaatggccgttacttttgcttggattagcatgccagctacaaaaccaatcattgtgaagaagaatttgcagatttgtgtagactgccattctgcattgaagttcatttctaaggtagaaagcaggtatattattgttagacataattctaaggttccaccattttgtgaatgtgaggtgttcctgtggagattactgatgattaactcttatccaccacttctttcttccatcggcatagagaggatacagttcacattcttgccagctggttgtttcacaatgcttatactttacttcgatgtcacattgcaactgtatgtgaacgtacagttaccagatataacacttttgatgttgcagacaaaatatacagtaaccagatataacaatctcaaggacaaaaaatggaaaatgagaccaagtgttgaagaattcaatctgatccttgagaattaatgtacaaacttacaaaactacgtcagctatctgttttatggctcagtttgttcatccgatgaatgaaggaactcttcttatctgtatcatcgaaaggatatcaaaacaggaagattttccttgtctttcctcatcggcatatgcaaacgaagtcaatggaattccaatgac

SEQ ID NO: 48399 - DNA, 2199 bp, Zea Mays
ctcactgccacttctgttccagcacacgcatgagaaagctgcggagccagaaagcaggcccgccggccgccgccgcctccctccgcttcgccgcgctcctccagtcgtgcggccgcaccggagacatccgccgaggccgcgccctacacgcgcgcctcctgctcaccggcgcggccgccgcgtccaccttcctcgccaaccacctcatcaccatgtactcccactgcgccgacgcggtctccgccgtccgcgtgttcggcgtcgtgccccgccccaacctcgtctcctggacgacgctcgtctcgggtctcgtccagaactccatgcaccacgacgcgctcgccgccttcgccgccatgcgccgtgcgcatatcgcccccactcagttcgcgctctccagcgccgcgcgcgccgcggccgcactctccgccccgcgccccggcacgcagctgcactgcatcggcatcaggcttggcttcgacaatgagctcttcgtcgcgagcaacctcgcggacatgtactccaagtgcggcctccttcacgaggcgtgtagggtgttcgatcaaatgccgcaaaaggatgctgtcacctggactaccatgatcgatggctacgcgaagaacgggagcctagaggccgccattctgatttttcgggatatgaaatgtgagggcctggttggagctgaccaacatgtcttctgcagtgcattgagtgcatcgggagggctcaaggatggatggtttggtcgaagcctgcactgttgtataattaaggctgggtttgaactggagactgttgtgaggaatgcgttactggacatgtatgctaagtctggggatttggagaatgcctctcgtgtggtgagtattgatcctggaggttggaatgttgtgtcagctacctcactgattgacggttacgttgaggcaggtcgtattgaggaggctcttgagacatatactgagttggggaggcaaggtgttgagcccaatgaattcacttttgcgagcatgattaagggctgtgccatgcatgatctgctcgaacaaggtgcccagctgcatgctcaagtgctcaagacaaatttgatcagtgactcatttgttggttccacccttgtgtatatgtatggaaattgtggcctcattagtttgtcccttcagttatttaatgagattggataccgtactgagattgcctggaatgcggttataaatgtttatgcgcagcacggtcatgggtggggagcaatccaagcttttgataggatgacctcaagtggtatcaggccaaatcacattacatttgtctgcctgctgactgcatgcagtcatgctggattagtggacgaaggactgggatatttccactccatgaaggatgcacatggtattgagcctaaagcagaacattattcatgtatcattgatatgtatggtcgagctgggagactagatgaagcagaaaaattcataagtgagatgccagtcaaacccagtgcttatgcttggtgctccttgcttggagcatgccgtatgcaaggaaacaaggagttgggagaggttgctgctcagaatcttatgaaacttgatccaaataacaccggtattcacatatccctttctgggatatacacatcattgggccaatgggaggatgtgaaggcagtcaagaagtcaatgaaggatatcagtattaaaaagctgcctggttttagctaggtcgatgctaacaagaaaacacgtgtgtttggatctgaggtttagtcacactcactcacagcaagagcagatatataaaaaacttgagaaactctccaaaaggataaaggaggaaggttatgtggcagacataatctccttgccactttaccttgaagatagaaaaaaaaacgagaggcttctgcactatcacagtgagagaatggccgttacttttgcttggattagcatgccagctacaaaaccaatcattgtgaagaagaatttgcagatttgtgtagactgccattctgcattgaagttcatttctaaggtagaaagcagacaaaatatacagtaaccagatataacaatctcaaggacaaaaaatggaaaatgagaccaagtgttgaagaattcaatctgatccttgagaattaatgtacaaacttacaaaactacgtcagctatctgttttatggctcagtttgttcat

SEQ ID NO: 48400 - DNA, 3265 bp, Zea Mays
cacttctgttccagcacacgcatgagaaagctgcggagccagaaagcaggcccgccggccgccgccgcctccctccgcttcgccgcgctcctccagtcgtgcggccgcaccggagacatccgccgaggccgcgccctacacgcgcgcctcctgctcaccggcgcggccgccgcgtccaccttcctcgccaaccacctcatcaccatgtactcccactgcgccgacgcggtctccgccgtccgcgtgttcggcgtcgtgccccgccccaacctcgtctcctggacgacgctcgtctcgggtctcgtccagaactccatgcaccacgacgcgctcgccgccttcgccgccatgcgccgtgcgcatatcgcccccactcagttcgcgctctccagcgccgcgcgcgccgcggccgcactctccgccccgcgccccggcacgcagctgcactgcatcggcatcaggcttggcttcgacaatgagctcttcgtcgcgagcaacctcgcggacatgtactccaagtgcggcctccttcacgaggcgtgtagggtgttcgatcaaatgccgcaaaaggatgctgtcacctggactaccatgatcgatggctacgcgaagaacgggagcctagaggccgccattctgatttttcgggatatgaaatgtgagggcctggttggagctgaccaacatgtcttctgcagtgcattgagtgcatcgggagggctcaaggatggatggtttggtcgaagcctgcactgttgtataattaaggctgggtttgaactggagactgttgtgaggaatgcgttactggacatgtatgctaagtctggggatttggagaatgcctctcgtgtggtgagtattgatcctggaggttggaatgttgtgtcagctacctcactgattgacggttacgttgaggcaggtcgtattgaggaggctcttgagacatatactgagttggggaggcaaggtgttgagcccaatgaattcacttttgcgagcatgattaagggctgtgccatgcatgatctgctcgaacaaggtgcccagctgcatgctcaagtgctcaagacaaatttgatcagtgactcatttgttggttccacccttgtgtatatgtatggaaattgtggcctcattagtttgtcccttcagttatttaatgagattggataccgtactgagattgcctggaatgcggttataaatgtttatgcgcagcacggtcatgggtggggagcaatccaagcttttgataggatgacctcaagtggtatcaggccaaatcacattacatttgtctgcctgctgactgcatgcagtcatgctggattagtggacgaaggactgggatatttccactccatgaaggatgcacatggtattgagcctaaagcagaacattattcatgtatcattgatatgtatggtcgagctgggagactagatgaagcagaaaaattcataagtgagatgccagtcaaacccagtgcttatgcttggtgctccttgcttggagcatgccgtatgcaaggaaacaaggagttgggagaggttgctgctcagaatcttatgaaacttgatccaaataacaccggtattcacatatccctttctgggatatacacatcattgggccaatgggaggatgtgaaggcagtcaagaagtcaatgaaggatatcagtattaaaaagctgcctggttttagctaggtcgatgctaacaagaaaacacgtgtgtttggatctgaggtttagtcacactcactcacagcaagagcagatatataaaaaacttgagaaactctccaaaaggataaaggaggaaggttatgtggcagacataatctccttgccactttaccttgaagatagaaaaaaaaacgagaggcttctgcactatcacagtgagagaatggccgttacttttgcttggattagcatgccagctacaaaaccaatcattgtgaagaagaatttgcagatttgtgtagactgccattctgcattgaagttcatttctaaggtagaaagcaggtatattattgttagacataattctaaggttccaccattttgtgaatgtgaggtgttcctgtggagattactgatgattaactcttatccaccacttctttcttccatcggcatagagaggatacagttcacattcttgccagctggttgtttcacaatgcttatactttacttcgatgtcacattgcaactgtatgtgaacgtacagttaccagatataacacttttgatgttgcagacaaaatatacagtaaccagatataacaatctcaaggacaaaaaatggaaaatgagaccaagtgttgaagaattcaatctgatccttgagaattaatgtacaaacttacaaaactacgtcaggtaagcttcaggtgcctgatgaaattgaaccctagtgtctctctctctctctcttattctataacataactcgattaattgatatttgaaaacctttagtgctcagttaactaacatatttggcttaacactccagtaagactagctatgggaggttactggaaaatgagaccaagtggaactgagttatttaatacattttgccaaaaagttttttttatgaaaagtccaatttggacaaaaaatcaaaattttgtctgaccatatgggaacgtgtatttggagtgagccaccagagtcgactaagctctagcttggccctgttggaaatcactccctctcctttcttcagtgtttatcgcaaacacacactatgaaatcactccctgtcttcagtttttatcacaaatactacctccgttctcgaatatttgtcgtccactagttcaattttgaactaaaacacgacaaataaaaaagaacggagggagtactagggagtcgctccctctgtctttggtatcaacaccagggaatcactccctctgtcttttatgtttatcacaagcacctaggaaatcccctcctctctctccctcggttgatgcagctctctgtcctcaccattttatcatatatatagctaatacacctgcccatggtatcctcctaattactgcagtcataactcctatcattgcctattattatcattaggtacgagctgaaaatctagtagcattaaaaactgaacctagacacaatgaacatgaacacacaggatagctaacaggcccttggctggaactgtcatatccttgaattagaaaagctgtttgcacgctttacttagggtgagaccttt

SEQ ID NO: 48401 - DNA, 2434 bp, Zea Mays
cacttctgttccagcacacgcatgagaaagctgcggagccagaaagcaggcccgccggccgccgccgcctccctccgcttcgccgcgctcctccagtcgtgcggccgcaccggagacatccgccgaggccgcgccctacacgcgcgcctcctgctcaccggcgcggccgccgcgtccaccttcctcgccaaccacctcatcaccatgtactcccactgcgccgacgcggtctccgccgtccgcgtgttcggcgtcgtgccccgccccaacctcgtctcctggacgacgctcgtctcgggtctcgtccagaactccatgcaccacgacgcgctcgccgccttcgccgccatgcgccgtgcgcatatcgcccccactcagttcgcgctctccagcgccgcgcgcgccgcggccgcactctccgccccgcgccccggcacgcagctgcactgcatcggcatcaggcttggcttcgacaatgagctcttcgtcgcgagcaacctcgcggacatgtactccaagtgcggcctccttcacgaggcgtgtagggtgttcgatcaaatgccgcaaaaggatgctgtcacctggactaccatgatcgatggctacgcgaagaacgggagcctagaggccgccattctgatttttcgggatatgaaatgtgagggcctggttggagctgaccaacatgtcttctgcagtgcattgagtgcatcgggagggctcaaggatggatggtttggtcgaagcctgcactgttgtataattaaggctgggtttgaactggagactgttgtgaggaatgcgttactggacatgtatgctaagtctggggatttggagaatgcctctcgtgtggtgagtattgatcctggaggttggaatgttgtgtcagctacctcactgattgacggttacgttgaggcaggtcgtattgaggaggctcttgagacatatactgagttggggaggcaaggtgttgagcccaatgaattcacttttgcgagcatgattaagggctgtgccatgcatgatctgctcgaacaaggtgcccagctgcatgctcaagtgctcaagacaaatttgatcagtgactcatttgttggttccacccttgtgtatatgtatggaaattgtggcctcattagtttgtcccttcagttatttaatgagattggataccgtactgagattgcctggaatgcggttataaatgtttatgcgcagcacggtcatgggtggggagcaatccaagcttttgataggatgacctcaagtggtatcaggccaaatcacattacatttgtctgcctgctgactgcatgcagtcatgctggattagtggacgaaggactgggatatttccactccatgaaggatgcacatggtattgagcctaaagcagaacattattcatgtatcattgatatgtatggtcgagctgggagactagatgaagcagaaaaattcataagtgagatgccagtcaaacccagtgcttatgcttggtgctccttgcttggagcatgccgtatgcaaggaaacaaggagttgggagaggttgctgctcagaatcttatgaaacttgatccaaataacaccggtattcacatatccctttctgggatatacacatcattgggccaatgggaggatgtgaaggcagtcaagaagtcaatgaaggatatcagtattaaaaagctgcctggttttagctaggtcgatgctaacaagaaaacacgtgtgtttggatctgaggtttagtcacactcactcacagcaagagcagatatataaaaaacttgagaaactctccaaaaggataaaggaggaaggttatgtggcagacataatctccttgccactttaccttgaagatagaaaaaaaaacgagaggcttctgcactatcacagtgagagaatggccgttacttttgcttggattagcatgccagctacaaaaccaatcattgtgaagaagaatttgcagatttgtgtagactgccattctgcattgaagttcatttctaaggtagaaagcaggtatattattgttagacataattctaaggttccaccattttgtgaatgtgaggtgttcctgtggagattactgatgattaactcttatccaccacttctttcttccatcggcatagagaggatacagttcacattcttgccagctggttgtttcacaatgcttatactttacttcgatgtcacattgcaactgtatgtgaacgtacagttaccagatataacacttttgatgttgcagacaaaatatacagtaaccagatataacaatctcaaggacaaaaaatggaaaatgagaccaagtgttgaagaattcaatctgatccttgagaattaatgtacaaacttacaaaactacgtcaggtatgcatattgacgaagagattttgcttcaatt

SEQ ID NO: 48402 - DNA, 2196 bp, Zea Mays
cacttctgttccagcacacgcatgagaaagctgcggagccagaaagcaggcccgccggccgccgccgcctccctccgcttcgccgcgctcctccagtcgtgcggccgcaccggagacatccgccgaggccgcgccctacacgcgcgcctcctgctcaccggcgcggccgccgcgtccaccttcctcgccaaccacctcatcaccatgtactcccactgcgccgacgcggtctccgccgtccgcgtgttcggcgtcgtgccccgccccaacctcgtctcctggacgacgctcgtctcgggtctcgtccagaactccatgcaccacgacgcgctcgccgccttcgccgccatgcgccgtgcgcatatcgcccccactcagttcgcgctctccagcgccgcgcgcgccgcggccgcactctccgccccgcgccccggcacgcagctgcactgcatcggcatcaggcttggcttcgacaatgagctcttcgtcgcgagcaacctcgcggacatgtactccaagtgcggcctccttcacgaggcgtgtagggtgttcgatcaaatgccgcaaaaggatgctgtcacctggactaccatgatcgatggctacgcgaagaacgggagcctagaggccgccattctgatttttcgggatatgaaatgtgagggcctggttggagctgaccaacatgtcttctgcagtgcattgagtgcatcgggagggctcaaggatggatggtttggtcgaagcctgcactgttgtataattaaggctgggtttgaactggagactgttgtgaggaatgcgttactggacatgtatgctaagtctggggatttggagaatgcctctcgtgtggtgagtattgatcctggaggttggaatgttgtgtcagctacctcactgattgacggttacgttgaggcaggtcgtattgaggaggctcttgagacatatactgagttggggaggcaaggtgttgagcccaatgaattcacttttgcgagcatgattaagggctgtgccatgcatgatctgctcgaacaaggtgcccagctgcatgctcaagtgctcaagacaaatttgatcagtgactcatttgttggttccacccttgtgtatatgtatggaaattgtggcctcattagtttgtcccttcagttatttaatgagattggataccgtactgagattgcctggaatgcggttataaatgtttatgcgcagcacggtcatgggtggggagcaatccaagcttttgataggatgacctcaagtggtatcaggccaaatcacattacatttgtctgcctgctgactgcatgcagtcatgctggattagtggacgaaggactgggatatttccactccatgaaggatgcacatggtattgagcctaaagcagaacattattcatgtatcattgatatgtatggtcgagctgggagactagatgaagcagaaaaattcataagtgagatgccagtcaaacccagtgcttatgcttggtgctccttgcttggagcatgccgtatgcaaggaaacaaggagttgggagaggttgctgctcagaatcttatgaaacttgatccaaataacaccggtattcacatatccctttctgggatatacacatcattgggccaatgggaggatgtgaaggcagtcaagaagtcaatgaaggatatcagtattaaaaagctgcctggttttagctaggtcgatgctaacaagaaaacacgtgtgtttggatctgaggtttagtcacactcactcacagcaagagcagatatataaaaaacttgagaaactctccaaaaggataaaggaggaaggttatgtggcagacataatctccttgccactttaccttgaagatagaaaaaaaaacgagaggcttctgcactatcacagtgagagaatggccgttacttttgcttggattagcatgccagctacaaaaccaatcattgtgaagaagaatttgcagatttgtgtagactgccattctgcattgaagttcatttctaaggtagaaagcagacaaaatatacagtaaccagatataacaatctcaaggacaaaaaatggaaaatgagaccaagtgttgaagaattcaatctgatccttgagaattaatgtacaaacttacaaaactacgtcaggtatgcatattgacgaagagattttgcttcaatt

SEQ ID NO: 48403 - DNA, 869 bp, Zea Mays
catatggggggcatttatagggtgaagccaccaaaaaggcaactttattccagggaacaatgtggtgtaaccgaatcagcacttgatgctgcatactcatcatcgcctcatcggggacaaaagcaagtcccgctttcttgacaaaggaatgggcatgagcagaacagctggagctttcagcgcagccaatgaggaggaaataggttcatggagagtggggacgaagaaagtaaaaaaaccacgtggctagttcaaacctgaaaccaaactaccggtatacacttggttccgctatggtacatgtttccctttcatgcatacttgtgaaggatgttttggaatctcaactattctaggaaaatgtgcacatggttagtttatatgacaagatgaatggcatccgtgtgttgaaaatgtgggtttgatagtctgctacttaggtcctgtttgtttctcttctagattatataagttggattatggtggaaggataggagggtaaaatatcaattttaggccacaaataagctgaaataagttagcattggttagcttatttcagcttatttatgattccaaagtgatattttacctttctactattccacaataattcagcttatataatttaggagtgaaacaaacagggtcgggtcttattagtgtggagcagaaaagtagcaggaactaaaagatgctttctgctgtgtactcatcgacacatatttgtgtaattatattcagaatcaaaccatacttactgacgctgtgagggagaaacacagatgctttaatgttttcagtactgctaatgtagtaatttgacctttttgagttcagtatggccttgctgatccatgatatgtgaa

SEQ ID NO: 48404 - DNA, 1166 bp, Zea Mays
attatattttaggacggagaaaggttttgtaaattttattccgctagggctttgttcttgtttgccgccgccggcaccaccctcagtccccacatggccgccgcctgccttcgccgcctccaccgcatccctcatcctgtccttaagctcgccgcagccactcactggcccttgccattccccggtgccaagttggctccggtcacacagtcgtgcccatccgccgaccgcgtcgaagtacagctgagcgcccgctgccccggttttgcaagtaatggtaacttcaaacatcgatggcatcacaagctgggttcatcagttggtgctgtactgattggacatgcagccttttttcttggtttgagcaatggctctgcatttgcccaggaagattcagttagcccagctgcagctagtgagcatgctgagggaaatgctcctggtttacaaccgattgaagatggatcagtggtctcaaacgaacacacggtcaaatggagaatttacactgataatgcgcgggagtttttccagaaaagacaattggatgaggctgagaagttattccaggcagccctactagaagctaaggaaggatttggacttagagatccacatgtcgcgtcagcccttaacaatctggcagaattttataggctaaagaaagagcatgtgaaagctgaaccactatatttggaagcaattgagatcctggaggaatcatttggacctgatgatatacgggttggaagaactgtgcatagtcttggaatatgctatcatcttcaactcaagcttgctcaagcccagacatgttatgagcgtgctttgaagatagaaggacgtgttctgggggttggtcacccagagtattcaagtacaatgtacagtctagccaaggtgctcagtctacaaggaaaaagaaaaaatgcagaatgccttattgaagagtctattagaatacttgaggaagctgggcttggcgattcactaacatgtttacgaagaatggtctctctctctagagagttaataaaatcaagacgatttgctgaagctgaaatctggcaaaggaagatattacatgttctggagctttcagagcgaaaatggcactggatacatggcaatgcaatgactcagcaggaattggctaaggaaccact

SEQ ID NO: 48405 - DNA, 2533 bp, Zea Mays
attatattttaggacggagaaaggttttgtaaattttattccgctagggctttgttcttgtttgccgccgccggcaccaccctcagtccccacatggccgccgcctgccttcgccgcctccaccgcatccctcatcctgtccttaagctcgccgcagccactcactggcccttgccattccccggtgccaagttggctccggtcacacagtcgtgcccatccgccgaccgcgtcgaagtacagctgagcgcccgctgccccggttttgcaagtaatggtaacttcaaacatcgatggcatcacaagctgggttcatcagttggtgctgtactgattggacatgcagccttttttcttggtttgagcaatggctctgcatttgcccaggaagattcagttagcccagctgcagctagtgagcatgctgagggaaatgctcctggtttacaaccgattgaagatggatcagtggtctcaaacgaacacacggtcaaatggagaatttacactgataatgcgcgggagtttttccagaaagcaagtaacacattatccctagcttggtttcagacaacttttgggatctgtgatgtttctgagagaaactacctttttatagagacaattggatgaggctgagaagttattccaggcagccctactagaagctaaggaaggatttggacttagagatccacatgtcgcgtcagcccttaacaatctggcagaattttataggctaaagaaagagcatgtgaaagctgaaccactatatttggaagcaattgagatcctggaggaatcatttggacctgatgatatacgggttggaagaactgtgcatagtcttggaatatgctatcatcttcaactcaagcttgctcaagcccagacatgttatgagtgccatctgtagatagaaggacgtgttctgggggttggtcacccagagtattcaagtacaatgtacagtctagccaaggagttaataaaatcaagacgatttgctgaagctgaaatctggcaaaggaagatattacatgttctggagctttcagagggatgggattcattggtcactgcacgtgcagctgaactcctaagtttaaatcttgaaaccatggagaagttgaaggaatcagaagagctattggaacgatgccttgcagtcaagaaaaagattctacctgaagatcatcttcaggtagcttatacgttggtacacctggcaaggttaacattgcacagagttgtaaaggatcgggatgtaaacagcgatgtaactgcatattacctcgcaaaagcaaaacagttcagcaatgattcaatcaggattacagaaggacaattaaattcttcaagaaaagatcagaataaaattaacaacacatcaactgcagatacagataagagtgcagcaataattctttttcaagcacttcatgtttttggactcattgatattgcagcgaagcagttgctagggcaagggttggtactgttgctaaggcttccactggaacatttgaagcatggattcttcaaaattgaagctgtacatataccaggcacacctcggccatttatatggaccgacacatataccatatatgcccgatatagcgcactgcaaatccattttaaaaataagtttggaaaggagcaagactataattctgttcaagatgctctgcagaagtgtgtttcactttacaaagagcctcatacacgaaggttggtgaaaaatgctgccaagcaggactacatgatatgcctgacgagcctgatcgatatggttcagagcttgtttcccattccacacataccggggttgcaggagttgctttgcgaggccgaacaaattttaggagagctagaagaagagagtactaggaagaagcaatgatacgtaggaaccaacacccatatgggtggaagcatttgttaattgcaagttgtgagccatatattttttcagttggtcgagatcgcccacctatatgggtggaagcatttgtttgacgaggtgctgaatcgagtgacgggttaaagagtttaatgcttgtttgcgcagtggtgttatgacgtggtcttcaacatagagtcctagtttctcggtggtggtggtccacaagatagatcatgttgctgaaatcttggatgctttctaaatcaaaatccttgacattggcgaccaaaaaaaaagatccctatcaatggcggatggccaaactgaaccaaggattggttttggcatagaagctcttcctaaaagttgtgctggctgtttgcgtaattcttttagatattgtggtcttagactatctctagcaacttactcatctttatctctatatttaaactccacattataaacaatgcactttacaatacaaaacaatattttgcatggctattgtttttaaacttagctttagatatttttttggagaggatagttttaagtggctaaaaaatttgggagcattttttttgccatttttaaaatctcgtttttgcatcataaatccta

SEQ ID NO: 48406 - DNA, 2451 bp, Zea Mays
attatattttaggacggagaaaggttttgtaaattttattccgctagggctttgttcttgtttgccgccgccggcaccaccctcagtccccacatggccgccgcctgccttcgccgcctccaccgcatccctcatcctgtccttaagctcgccgcagccactcactggcccttgccattccccggtgccaagttggctccggtcacacagtcgtgcccatccgccgaccgcgtcgaagtacagctgagcgcccgctgccccggttttgcaagtaatggtaacttcaaacatcgatggcatcacaagctgggttcatcagttggtgctgtactgattggacatgcagccttttttcttggtttgagcaatggctctgcatttgcccaggaagattcagttagcccagctgcagctagtgagcatgctgagggaaatgctcctggtttacaaccgattgaagatggatcagtggtctcaaacgaacacacggtcaaatggagaatttacactgataatgcgcgggagtttttccagaaaagacaattggatgaggctgagaagttattccaggcagccctactagaagctaaggaaggatttggacttagagatccacatgtcgcgtcagcccttaacaatctggcagaattttataggctaaagaaagagcatgtgaaagctgaaccactatatttggaagcaattgagatcctggaggaatcatttggacctgatgatatacgggttggaagaactgtgcatagtcttggaatatgctatcatcttcaactcaagcttgctcaagcccagacatgttatgagcgtgctttgaagatagaaggacgtgttctgggggttggtcacccagagtattcaagtacaatgtacagtctagccaaggagttaataaaatcaagacgatttgctgaagctgaaatctggcaaaggaagatattacatgttctggagctttcagagggatgggattcattggtcactgcacgtgcagctgaactcctaagtttaaatcttgaaaccatggagaagttgaaggaatcagaagagctattggaacgatgccttgcagtcaagaaaaagattctacctgaagatcatcttcaggtagcttatacgttggtacacctggcaaggttaacattgcacagagttgtaaaggatcgggatgtaaacagcgatgtaactgcatattacctcgcaaaagcaaaacagttcagcaatgattcaatcaggattacagaaggacaattaaattcttcaagaaaagatcagaataaaattaacaacacatcaactgcagatacagataagagtgcagcaataattctttttcaagcacttcatgtttttggactcattgatattgcagcgaagcagttgctagggcaagggttggtactgttgctaaggcttccactggaacatttgaagcatggattcttcaaaattgaagctgtacatataccaggcacacctcggccatttatatggaccgacacatataccatatatgcccgatatagcgcactgcaaatccattttaaaaataagtttggaaaggagcaagactataattctgttcaagatgctctgcagaagtgtgtttcactttacaaagagcctcatacacgaaggttggtgaaaaatgctgccaagcaggactacatgatatgcctgacgagcctgatcgatatggttcagagcttgtttcccattccacacataccggggttgcaggagttgctttgcgaggccgaacaaattttaggagagctagaagaagagagtactaggaagaagcaatgatacgtaggaaccaacacccatatgggtggaagcatttgttaattgcaagttgtgagccatatattttttcagttggtcgagatcgcccacctatatgggtggaagcatttgtttgacgaggtgctgaatcgagtgacgggttaaagagtttaatgcttgtttgcgcagtggtgttatgacgtggtcttcaacatagagtcctagtttctcggtggtggtggtccacaagatagatcatgttgctgaaatcttggatgctttctaaatcaaaatccttgacattggcgaccaaaaaaaaagatccctatcaatggcggatggccaaactgaaccaaggattggttttggcatagaagctcttcctaaaagttgtgctggctgtttgcgtaattcttttagatattgtggtcttagactatctctagcaacttactcatctttatctctatatttaaactccacattataaacaatgcactttacaatacaaaacaatattttgcatggctattgtttttaaacttagctttagatatttttttggagaggatagttttaagtggctaaaaaatttgggagcattttttttgccatttttaaaatctcgtttttgcatcataaatccta

SEQ ID NO: 48407 - DNA, 2283 bp, Zea Mays
attatattttaggacggagaaaggttttgtaaattttattccgctagggctttgttcttgtttgccgccgccggcaccaccctcagtccccacatggccgccgcctgccttcgccgcctccaccgcatccctcatcctgtccttaagctcgccgcagccactcactggcccttgccattccccggtgccaagttggctccggtcacacagtcgtgcccatccgccgaccgcgtcgaagtacagctgagcgcccgctgccccggttttgcaagtaatggtaacttcaaacatcgatggcatcacaagctgggttcatcagttggtgctgtactgattggacatgcagccttttttcttggtttgagcaatggctctgcatttgcccaggaagattcagttagcccagctgcagctagtgagcatgctgagggaaatgctcctggtttacaaccgattgaagatggatcagtggtctcaaacgaacacacggtcaaatggagaatttacactgataatgcgcgggagtttttccagaaaagacaattggatgaggctgagaagttattccaggcagccctactagaagctaaggaaggatttggacttagagatccacatgtcgcgtcagcccttaacaatctggcagaattttataggctaaagaaagagcatgtgaaagctgaaccactatatttggaagcaattgagatcctggaggaatcatttggacctgatgatatacgggttggaagaactgtgcatagtcttggaatatgctatcatcttcaactcaagcttgctcaagcccagacatgttatgagcgtgctttgaagatagaaggacgtgttctgggggttggtcacccagagtattcaagtacaatgtacagtctagccaaggagttaataaaatcaagacgatttgctgaagctgaaatctggcaaaggaagatattacatgttctggagctttcagagggatgggattcattggtcactgcacgtgcagctgaactcctaagtttaaatcttgaaaccatggagaagttgaaggaatcagaagagctattggaacgatgccttgcagtcaagaaaaagattctacctgaagatcatcttcaggtagcttatacgttggtacacctggcaaggttaacattgcacagagttgtaaaggatcgggatgtaaacagcgatgtaactgcatattacctcgcaaaagcaaaacagttcagcaatgattcaatcaggattacagaaggacaattaaattcttcaagaaaagatcagaataaaattaacaacacatcaactgcagatacagataagagtgcagcaataattctttttcaagcacttcatgtttttggactcattgatattgcagcgaagcagttgctagggcaaggggagcaagactataattctgttcaagatgctctgcagaagtgtgtttcactttacaaagagcctcatacacgaaggttggtgaaaaatgctgccaagcaggactacatgatatgcctgacgagcctgatcgatatggttcagagcttgtttcccattccacacataccggggttgcaggagttgctttgcgaggccgaacaaattttaggagagctagaagaagagagtactaggaagaagcaatgatacgtaggaaccaacacccatatgggtggaagcatttgttaattgcaagttgtgagccatatattttttcagttggtcgagatcgcccacctatatgggtggaagcatttgtttgacgaggtgctgaatcgagtgacgggttaaagagtttaatgcttgtttgcgcagtggtgttatgacgtggtcttcaacatagagtcctagtttctcggtggtggtggtccacaagatagatcatgttgctgaaatcttggatgctttctaaatcaaaatccttgacattggcgaccaaaaaaaaagatccctatcaatggcggatggccaaactgaaccaaggattggttttggcatagaagctcttcctaaaagttgtgctggctgtttgcgtaattcttttagatattgtggtcttagactatctctagcaacttactcatctttatctctatatttaaactccacattataaacaatgcactttacaatacaaaacaatattttgcatggctattgtttttaaacttagctttagatatttttttggagaggatagttttaagtggctaaaaaatttgggagcattttttttgccatttttaaaatctcgtttttgcatcataaatccta

SEQ ID NO: 48408 - DNA, 2229 bp, Zea Mays
attatattttaggacggagaaaggttttgtaaattttattccgctagggctttgttcttgtttgccgccgccggcaccaccctcagtccccacatggccgccgcctgccttcgccgcctccaccgcatccctcatcctgtccttaagctcgccgcagccactcactggcccttgccattccccggtgccaagttggctccggtcacacagtcgtgcccatccgccgaccgcgtcgaagtacagctgagcgcccgctgccccggttttgcaagtaatggtaacttcaaacatcgatggcatcacaagctgggttcatcagttggtgctgtactgattggacatgcagccttttttcttggtttgagcaatggctctgcatttgcccaggaagattcagttagcccagctgcagctagtgagcatgctgagggaaatgctcctggtttacaaccgattgaagatggatcagtggtctcaaacgaacacacggtcaaatggagaatttacactgataatgcgcgggagtttttccagaaaagacaattggatgaggctgagaagttattccaggcagccctactagaagctaaggaaggatttggacttagagatccacatgtcgcgtcagcccttaacaatctggcagaattttataggctaaagaaagagcatgtgaaagctgaaccactatatttggaagcaattgagatcctggaggaatcatttggacctgatgatatacgggttggaagaactgtgcatagtcttggaatatgctatcatcttcaactcaagcttgctcaagcccagacatgttatgagcgtgctttgaagatagaaggacgtgttctgggggttggtcacccagagtattcaagtacaatgtacagtctagccaaggtagcttatacgttggtacacctggcaaggttaacattgcacagagttgtaaaggatcgggatgtaaacagcgatgtaactgcatattacctcgcaaaagcaaaacagttcagcaatgattcaatcaggattacagaaggacaattaaattcttcaagaaaagatcagaataaaattaacaacacatcaactgcagatacagataagagtgcagcaataattctttttcaagcacttcatgtttttggactcattgatattgcagcgaagcagttgctagggcaagggttggtactgttgctaaggcttccactggaacatttgaagcatggattcttcaaaattgaagctgtacatataccaggcacacctcggccatttatatggaccgacacatataccatatatgcccgatatagcgcactgcaaatccattttaaaaataagtttggaaaggagcaagactataattctgttcaagatgctctgcagaagtgtgtttcactttacaaagagcctcatacacgaaggttggtgaaaaatgctgccaagcaggactacatgatatgcctgacgagcctgatcgatatggttcagagcttgtttcccattccacacataccggggttgcaggagttgctttgcgaggccgaacaaattttaggagagctagaagaagagagtactaggaagaagcaatgatacgtaggaaccaacacccatatgggtggaagcatttgttaattgcaagttgtgagccatatattttttcagttggtcgagatcgcccacctatatgggtggaagcatttgtttgacgaggtgctgaatcgagtgacgggttaaagagtttaatgcttgtttgcgcagtggtgttatgacgtggtcttcaacatagagtcctagtttctcggtggtggtggtccacaagatagatcatgttgctgaaatcttggatgctttctaaatcaaaatccttgacattggcgaccaaaaaaaaagatccctatcaatggcggatggccaaactgaaccaaggattggttttggcatagaagctcttcctaaaagttgtgctggctgtttgcgtaattcttttagatattgtggtcttagactatctctagcaacttactcatctttatctctatatttaaactccacattataaacaatgcactttacaatacaaaacaatattttgcatggctattgtttttaaacttagctttagatatttttttggagaggatagttttaagtggctaaaaaatttgggagcattttttttgccatttttaaaatctcgtttttgcatcataaatccta

SEQ ID NO: 48409 - DNA, 2409 bp, Zea Mays
attatattttaggacggagaaaggttttgtaaattttattccgctagggctttgttcttgtttgccgccgccggcaccaccctcagtccccacatggccgccgcctgccttcgccgcctccaccgcatccctcatcctgtccttaagctcgccgcagccactcactggcccttgccattccccggtgccaagttggctccggtcacacagtcgtgcccatccgccgaccgcgtcgaagtacagctgagcgcccgctgccccggttttgcaagtaatggtaacttcaaacatcgatggcatcacaagctgggttcatcagttggtgctgtactgattggacatgcagccttttttcttggtttgagcaatggctctgcatttgcccaggaagattcagttagcccagctgcagctagtgagcatgctgagggaaatgctcctggtttacaaccgattgaagatggatcagtggtctcaaacgaacacacggtcaaatggagaatttacactgataatgcgcgggagtttttccagaaaagacaattggatgaggctgagaagttattccaggcagccctactagaagctaaggaaggatttggacttagagatccacatgtcgcgtcagcccttaacaatctggcagaattttataggctaaagaaagagcatgtgaaagctgaaccactatatttggaagcaattgagatcctggaggaatcatttggacctgatgatatacgggttggaagaactgtgcatagtcttggaatatgctatcatcttcaactcaagcttgctcaagcccagacatgttatgagcgtgctttgaagatagaaggacgtgttctgggggttggtcacccagagtattcaagtacaatgtacagtctagccaaggtgctcagtctacaaggaaaaagaaaaaatgcagaatgccttattgaagagtctattagaatacttgaggaagctgggcttggcgattcactaacatgtttacgaagaatggtctctctctctagagagttaataaaatcaagacgatttgctgaagctgaaatctggcaaaggaagatattacatgttctggagctttcagagggatgggattcattggtcactgcacgtgcagctgaactcctaagtttaaatcttgaaaccatggagaagttgaaggaatcagaagagctattggaacgatgccttgcagtcaagaaaaagattctacctgaagatcatcttcaggtagcttatacgttggtacacctggcaaggttaacattgcacagagttgtaaaggatcgggatgtaaacagcgatgtaactgcatattacctcgcaaaagcaaaacagttcagcaatgattcaatcaggattacagaaggacaattaaattcttcaagaaaagatcagaataaaattaacaacacatcaactgcagatacagataagagtgcagcaataattctttttcaagcacttcatgtttttggactcattgatattgcagcgaagcagttgctagggcaaggggagcaagactataattctgttcaagatgctctgcagaagtgtgtttcactttacaaagagcctcatacacgaaggttggtgaaaaatgctgccaagcaggactacatgatatgcctgacgagcctgatcgatatggttcagagcttgtttcccattccacacataccggggttgcaggagttgctttgcgaggccgaacaaattttaggagagctagaagaagagagtactaggaagaagcaatgatacgtaggaaccaacacccatatgggtggaagcatttgttaattgcaagttgtgagccatatattttttcagttggtcgagatcgcccacctatatgggtggaagcatttgtttgacgaggtgctgaatcgagtgacgggttaaagagtttaatgcttgtttgcgcagtggtgttatgacgtggtcttcaacatagagtcctagtttctcggtggtggtggtccacaagatagatcatgttgctgaaatcttggatgctttctaaatcaaaatccttgacattggcgaccaaaaaaaaagatccctatcaatggcggatggccaaactgaaccaaggattggttttggcatagaagctcttcctaaaagttgtgctggctgtttgcgtaattcttttagatattgtggtcttagactatctctagcaacttactcatctttatctctatatttaaactccacattataaacaatgcactttacaatacaaaacaatattttgcatggctattgtttttaaacttagctttagatatttttttggagaggatagttttaagtggctaaaaaatttgggagcattttttttgccatttttaaaatctcgtttttgcatcataaatccta

SEQ ID NO: 48410 - DNA, 2577 bp, Zea Mays
attatattttaggacggagaaaggttttgtaaattttattccgctagggctttgttcttgtttgccgccgccggcaccaccctcagtccccacatggccgccgcctgccttcgccgcctccaccgcatccctcatcctgtccttaagctcgccgcagccactcactggcccttgccattccccggtgccaagttggctccggtcacacagtcgtgcccatccgccgaccgcgtcgaagtacagctgagcgcccgctgccccggttttgcaagtaatggtaacttcaaacatcgatggcatcacaagctgggttcatcagttggtgctgtactgattggacatgcagccttttttcttggtttgagcaatggctctgcatttgcccaggaagattcagttagcccagctgcagctagtgagcatgctgagggaaatgctcctggtttacaaccgattgaagatggatcagtggtctcaaacgaacacacggtcaaatggagaatttacactgataatgcgcgggagtttttccagaaaagacaattggatgaggctgagaagttattccaggcagccctactagaagctaaggaaggatttggacttagagatccacatgtcgcgtcagcccttaacaatctggcagaattttataggctaaagaaagagcatgtgaaagctgaaccactatatttggaagcaattgagatcctggaggaatcatttggacctgatgatatacgggttggaagaactgtgcatagtcttggaatatgctatcatcttcaactcaagcttgctcaagcccagacatgttatgagcgtgctttgaagatagaaggacgtgttctgggggttggtcacccagagtattcaagtacaatgtacagtctagccaaggtgctcagtctacaaggaaaaagaaaaaatgcagaatgccttattgaagagtctattagaatacttgaggaagctgggcttggcgattcactaacatgtttacgaagaatggtctctctctctagagagttaataaaatcaagacgatttgctgaagctgaaatctggcaaaggaagatattacatgttctggagctttcagagggatgggattcattggtcactgcacgtgcagctgaactcctaagtttaaatcttgaaaccatggagaagttgaaggaatcagaagagctattggaacgatgccttgcagtcaagaaaaagattctacctgaagatcatcttcaggtagcttatacgttggtacacctggcaaggttaacattgcacagagttgtaaaggatcgggatgtaaacagcgatgtaactgcatattacctcgcaaaagcaaaacagttcagcaatgattcaatcaggattacagaaggacaattaaattcttcaagaaaagatcagaataaaattaacaacacatcaactgcagatacagataagagtgcagcaataattctttttcaagcacttcatgtttttggactcattgatattgcagcgaagcagttgctagggcaagggttggtactgttgctaaggcttccactggaacatttgaagcatggattcttcaaaattgaagctgtacatataccaggcacacctcggccatttatatggaccgacacatataccatatatgcccgatatagcgcactgcaaatccattttaaaaataagtttggaaaggagcaagactataattctgttcaagatgctctgcagaagtgtgtttcactttacaaagagcctcatacacgaaggttggtgaaaaatgctgccaagcaggactacatgatatgcctgacgagcctgatcgatatggttcagagcttgtttcccattccacacataccggggttgcaggagttgctttgcgaggccgaacaaattttaggagagctagaagaagagagtactaggaagaagcaatgatacgtaggaaccaacacccatatgggtggaagcatttgttaattgcaagttgtgagccatatattttttcagttggtcgagatcgcccacctatatgggtggaagcatttgtttgacgaggtgctgaatcgagtgacgggttaaagagtttaatgcttgtttgcgcagtggtgttatgacgtggtcttcaacatagagtcctagtttctcggtggtggtggtccacaagatagatcatgttgctgaaatcttggatgctttctaaatcaaaatccttgacattggcgaccaaaaaaaaagatccctatcaatggcggatggccaaactgaaccaaggattggttttggcatagaagctcttcctaaaagttgtgctggctgtttgcgtaattcttttagatattgtggtcttagactatctctagcaacttactcatctttatctctatatttaaactccacattataaacaatgcactttacaatacaaaacaatattttgcatggctattgtttttaaacttagctttagatatttttttggagaggatagttttaagtggctaaaaaatttgggagcattttttttgccatttttaaaatctcgtttttgcatcataaatccta

SEQ ID NO: 48411 - DNA, 2499 bp, Zea Mays
attatattttaggacggagaaaggttttgtaaattttattccgctagggctttgttcttgtttgccgccgccggcaccaccctcagtccccacatggccgccgcctgccttcgccgcctccaccgcatccctcatcctgtccttaagctcgccgcagccactcactggcccttgccattccccggtgccaagttggctccggtcacacagtcgtgcccatccgccgaccgcgtcgaagtacagctgagcgcccgctgccccggttttgcaagtaatggtaacttcaaacatcgatggcatcacaagctgggttcatcagttggtgctgtactgattggacatgcagccttttttcttggtttgagcaatggctctgcatttgcccaggaagattcagttagcccagctgcagctagtgagcatgctgagggaaatgctcctggtttacaaccgattgaagatggatcagtggtctcaaacgaacacacggtcaaatggagaatttacactgataatgcgcgggagtttttccagaaaagacaattggatgaggctgagaagttattccaggcagccctactagaagctaaggaaggatttggacttagagatccacatgtcgcgtcagcccttaacaatctggcagaattttataggctaaagaaagagcatgtgaaagctgaaccactatatttggaagcaattgagatcctggaggaatcatttggacctgatgatatacgggttggaagaactgtgcatagtcttggaatatgctatcatcttcaactcaagcttgctcaagcccagacatgttatgagcgtgctttgaagatagaaggacgtgttctgggggttggtcacccagagtattcaagtacaatgtacagtctagccaaggtgctcagtctacaaggaaaaagaaaaaatgcagaatgccttattgaagagtctattagaatacttgaggaagctgggcttggcgattcactaacatgtttacgaagaatggtctctctctctagaggatgggattcattggtcactgcacgtgcagctgaactcctaagtttaaatcttgaaaccatggagaagttgaaggaatcagaagagctattggaacgatgccttgcagtcaagaaaaagattctacctgaagatcatcttcaggtagcttatacgttggtacacctggcaaggttaacattgcacagagttgtaaaggatcgggatgtaaacagcgatgtaactgcatattacctcgcaaaagcaaaacagttcagcaatgattcaatcaggattacagaaggacaattaaattcttcaagaaaagatcagaataaaattaacaacacatcaactgcagatacagataagagtgcagcaataattctttttcaagcacttcatgtttttggactcattgatattgcagcgaagcagttgctagggcaagggttggtactgttgctaaggcttccactggaacatttgaagcatggattcttcaaaattgaagctgtacatataccaggcacacctcggccatttatatggaccgacacatataccatatatgcccgatatagcgcactgcaaatccattttaaaaataagtttggaaaggagcaagactataattctgttcaagatgctctgcagaagtgtgtttcactttacaaagagcctcatacacgaaggttggtgaaaaatgctgccaagcaggactacatgatatgcctgacgagcctgatcgatatggttcagagcttgtttcccattccacacataccggggttgcaggagttgctttgcgaggccgaacaaattttaggagagctagaagaagagagtactaggaagaagcaatgatacgtaggaaccaacacccatatgggtggaagcatttgttaattgcaagttgtgagccatatattttttcagttggtcgagatcgcccacctatatgggtggaagcatttgtttgacgaggtgctgaatcgagtgacgggttaaagagtttaatgcttgtttgcgcagtggtgttatgacgtggtcttcaacatagagtcctagtttctcggtggtggtggtccacaagatagatcatgttgctgaaatcttggatgctttctaaatcaaaatccttgacattggcgaccaaaaaaaaagatccctatcaatggcggatggccaaactgaaccaaggattggttttggcatagaagctcttcctaaaagttgtgctggctgtttgcgtaattcttttagatattgtggtcttagactatctctagcaacttactcatctttatctctatatttaaactccacattataaacaatgcactttacaatacaaaacaatattttgcatggctattgtttttaaacttagctttagatatttttttggagaggatagttttaagtggctaaaaaatttgggagcattttttttgccatttttaaaatctcgtttttgcatcataaatccta

SEQ ID NO: 48412 - DNA, 2455 bp, Zea Mays
attatattttaggacggagaaaggttttgtaaattttattccgctagggctttgttcttgtttgccgccgccggcaccaccctcagtccccacatggccgccgcctgccttcgccgcctccaccgcatccctcatcctgtccttaagctcgccgcagccactcactggcccttgccattccccggtgccaagttggctccggtcacacagtcgtgcccatccgccgaccgcgtcgaagtacagctgagcgcccgctgccccggttttgcaagtaatggtaacttcaaacatcgatggcatcacaagctgggttcatcagttggtgctgtactgattggacatgcagccttttttcttggtttgagcaatggctctgcatttgcccaggaagattcagttagcccagctgcagctagtgagcatgctgagggaaatgctcctggtttacaaccgattgaagatggatcagtggtctcaaacgaacacacggtcaaatggagaatttacactgataatgcgcgggagtttttccagaaagcaaagacaattggatgaggctgagaagttattccaggcagccctactagaagctaaggaaggatttggacttagagatccacatgtcgcgtcagcccttaacaatctggcagaattttataggctaaagaaagagcatgtgaaagctgaaccactatatttggaagcaattgagatcctggaggaatcatttggacctgatgatatacgggttggaagaactgtgcatagtcttggaatatgctatcatcttcaactcaagcttgctcaagcccagacatgttatgagcgtgctttgaagatagaaggacgtgttctgggggttggtcacccagagtattcaagtacaatgtacagtctagccaaggagttaataaaatcaagacgatttgctgaagctgaaatctggcaaaggaagatattacatgttctggagctttcagagggatgggattcattggtcactgcacgtgcagctgaactcctaagtttaaatcttgaaaccatggagaagttgaaggaatcagaagagctattggaacgatgccttgcagtcaagaaaaagattctacctgaagatcatcttcaggtagcttatacgttggtacacctggcaaggttaacattgcacagagttgtaaaggatcgggatgtaaacagcgatgtaactgcatattacctcgcaaaagcaaaacagttcagcaatgattcaatcaggattacagaaggacaattaaattcttcaagaaaagatcagaataaaattaacaacacatcaactgcagatacagataagagtgcagcaataattctttttcaagcacttcatgtttttggactcattgatattgcagcgaagcagttgctagggcaagggttggtactgttgctaaggcttccactggaacatttgaagcatggattcttcaaaattgaagctgtacatataccaggcacacctcggccatttatatggaccgacacatataccatatatgcccgatatagcgcactgcaaatccattttaaaaataagtttggaaaggagcaagactataattctgttcaagatgctctgcagaagtgtgtttcactttacaaagagcctcatacacgaaggttggtgaaaaatgctgccaagcaggactacatgatatgcctgacgagcctgatcgatatggttcagagcttgtttcccattccacacataccggggttgcaggagttgctttgcgaggccgaacaaattttaggagagctagaagaagagagtactaggaagaagcaatgatacgtaggaaccaacacccatatgggtggaagcatttgttaattgcaagttgtgagccatatattttttcagttggtcgagatcgcccacctatatgggtggaagcatttgtttgacgaggtgctgaatcgagtgacgggttaaagagtttaatgcttgtttgcgcagtggtgttatgacgtggtcttcaacatagagtcctagtttctcggtggtggtggtccacaagatagatcatgttgctgaaatcttggatgctttctaaatcaaaatccttgacattggcgaccaaaaaaaaagatccctatcaatggcggatggccaaactgaaccaaggattggttttggcatagaagctcttcctaaaagttgtgctggctgtttgcgtaattcttttagatattgtggtcttagactatctctagcaacttactcatctttatctctatatttaaactccacattataaacaatgcactttacaatacaaaacaatattttgcatggctattgtttttaaacttagctttagatatttttttggagaggatagttttaagtggctaaaaaatttgggagcattttttttgccatttttaaaatctcgtttttgcatcataaatccta

SEQ ID NO: 48413 - DNA, 2307 bp, Zea Mays
attatattttaggacggagaaaggttttgtaaattttattccgctagggctttgttcttgtttgccgccgccggcaccaccctcagtccccacatggccgccgcctgccttcgccgcctccaccgcatccctcatcctgtccttaagctcgccgcagccactcactggcccttgccattccccggtgccaagttggctccggtcacacagtcgtgcccatccgccgaccgcgtcgaagtacagctgagcgcccgctgccccggttttgcaagtaatggtaacttcaaacatcgatggcatcacaagctgggttcatcagttggtgctgtactgattggacatgcagccttttttcttggtttgagcaatggctctgcatttgcccaggaagattcagttagcccagctgcagctagtgagcatgctgagggaaatgctcctggtttacaaccgattgaagatggatcagtggtctcaaacgaacacacggtcaaatggagaatttacactgataatgcgcgggagtttttccagaaaagacaattggatgaggctgagaagttattccaggcagccctactagaagctaaggaaggatttggacttagagatccacatgtcgcgtcagcccttaacaatctggcagaattttataggctaaagaaagagcatgtgaaagctgaaccactatatttggaagcaattgagatcctggaggaatcatttggacctgatgatatacgggttggaagaactgtgcatagtcttggaatatgctatcatcttcaactcaagcttgctcaagcccagacatgttatgagcgtgctttgaagatagaaggacgtgttctgggggttggtcacccagagtattcaagtacaatgtacagtctagccaaggagttaataaaatcaagacgatttgctgaagctgaaatctggcaaaggaagatattacatgttctggagctttcagaggtagcttatacgttggtacacctggcaaggttaacattgcacagagttgtaaaggatcgggatgtaaacagcgatgtaactgcatattacctcgcaaaagcaaaacagttcagcaatgattcaatcaggattacagaaggacaattaaattcttcaagaaaagatcagaataaaattaacaacacatcaactgcagatacagataagagtgcagcaataattctttttcaagcacttcatgtttttggactcattgatattgcagcgaagcagttgctagggcaagggttggtactgttgctaaggcttccactggaacatttgaagcatggattcttcaaaattgaagctgtacatataccaggcacacctcggccatttatatggaccgacacatataccatatatgcccgatatagcgcactgcaaatccattttaaaaataagtttggaaaggagcaagactataattctgttcaagatgctctgcagaagtgtgtttcactttacaaagagcctcatacacgaaggttggtgaaaaatgctgccaagcaggactacatgatatgcctgacgagcctgatcgatatggttcagagcttgtttcccattccacacataccggggttgcaggagttgctttgcgaggccgaacaaattttaggagagctagaagaagagagtactaggaagaagcaatgatacgtaggaaccaacacccatatgggtggaagcatttgttaattgcaagttgtgagccatatattttttcagttggtcgagatcgcccacctatatgggtggaagcatttgtttgacgaggtgctgaatcgagtgacgggttaaagagtttaatgcttgtttgcgcagtggtgttatgacgtggtcttcaacatagagtcctagtttctcggtggtggtggtccacaagatagatcatgttgctgaaatcttggatgctttctaaatcaaaatccttgacattggcgaccaaaaaaaaagatccctatcaatggcggatggccaaactgaaccaaggattggttttggcatagaagctcttcctaaaagttgtgctggctgtttgcgtaattcttttagatattgtggtcttagactatctctagcaacttactcatctttatctctatatttaaactccacattataaacaatgcactttacaatacaaaacaatattttgcatggctattgtttttaaacttagctttagatatttttttggagaggatagttttaagtggctaaaaaatttgggagcattttttttgccatttttaaaatctcgtttttgcatcataaatccta

SEQ ID NO: 48414 - DNA, 2413 bp, Zea Mays
attatattttaggacggagaaaggttttgtaaattttattccgctagggctttgttcttgtttgccgccgccggcaccaccctcagtccccacatggccgccgcctgccttcgccgcctccaccgcatccctcatcctgtccttaagctcgccgcagccactcactggcccttgccattccccggtgccaagttggctccggtcacacagtcgtgcccatccgccgaccgcgtcgaagtacagctgagcgcccgctgccccggttttgcaagtaatggtaacttcaaacatcgatggcatcacaagctgggttcatcagttggtgctgtactgattggacatgcagccttttttcttggtttgagcaatggctctgcatttgcccaggaagattcagttagcccagctgcagctagtgagcatgctgagggaaatgctcctggtttacaaccgattgaagatggatcagtggtctcaaacgaacacacggtcaaatggagaatttacactgataatgcgcgggagtttttccagaaagcaaagacaattggatgaggctgagaagttattccaggcagccctactagaagctaaggaaggatttggacttagagatccacatgtcgcgtcagcccttaacaatctggcagaattttataggctaaagaaagagcatgtgaaagctgaaccactatatttggaagcaattgagatcctggaggaatcatttggacctgatgatatacgggttggaagaactgtgcatagtcttggaatatgctatcatcttcaactcaagcttgctcaagcccagacatgttatgagcgtgctttgaagatagaaggacgtgttctgggggttggtcacccagagtattcaagtacaatgtacagtctagccaaggtgctcagtctacaaggaaaaagaaaaaatgcagaatgccttattgaagagtctattagaatacttgaggaagctgggcttggcgattcactaacatgtttacgaagaatggtctctctctctagagagttaataaaatcaagacgatttgctgaagctgaaatctggcaaaggaagatattacatgttctggagctttcagagggatgggattcattggtcactgcacgtgcagctgaactcctaagtttaaatcttgaaaccatggagaagttgaaggaatcagaagagctattggaacgatgccttgcagtcaagaaaaagattctacctgaagatcatcttcaggtagcttatacgttggtacacctggcaaggttaacattgcacagagttgtaaaggatcgggatgtaaacagcgatgtaactgcatattacctcgcaaaagcaaaacagttcagcaatgattcaatcaggattacagaaggacaattaaattcttcaagaaaagatcagaataaaattaacaacacatcaactgcagatacagataagagtgcagcaataattctttttcaagcacttcatgtttttggactcattgatattgcagcgaagcagttgctagggcaaggggagcaagactataattctgttcaagatgctctgcagaagtgtgtttcactttacaaagagcctcatacacgaaggttggtgaaaaatgctgccaagcaggactacatgatatgcctgacgagcctgatcgatatggttcagagcttgtttcccattccacacataccggggttgcaggagttgctttgcgaggccgaacaaattttaggagagctagaagaagagagtactaggaagaagcaatgatacgtaggaaccaacacccatatgggtggaagcatttgttaattgcaagttgtgagccatatattttttcagttggtcgagatcgcccacctatatgggtggaagcatttgtttgacgaggtgctgaatcgagtgacgggttaaagagtttaatgcttgtttgcgcagtggtgttatgacgtggtcttcaacatagagtcctagtttctcggtggtggtggtccacaagatagatcatgttgctgaaatcttggatgctttctaaatcaaaatccttgacattggcgaccaaaaaaaaagatccctatcaatggcggatggccaaactgaaccaaggattggttttggcatagaagctcttcctaaaagttgtgctggctgtttgcgtaattcttttagatattgtggtcttagactatctctagcaacttactcatctttatctctatatttaaactccacattataaacaatgcactttacaatacaaaacaatattttgcatggctattgtttttaaacttagctttagatatttttttggagaggatagttttaagtggctaaaaaatttgggagcattttttttgccatttttaaaatctcgtttttgcatcataaatccta

SEQ ID NO: 48415 - DNA, 2096 bp, Zea Mays
gtttcagacaacttttgggatctgtgatgtttctgagagaaactacctttttatagagacaattggatgaggctgagaagttattccaggcagccctactagaagctaaggaaggatttggacttagagatccacatgtcgcgtcagcccttaacaatctggcagaattttataggctaaagaaagagcatgtgaaagctgaaccactatatttggaagcaattgagatcctggaggaatcatttggacctgatgatatacgggttggaagaactgtgcatagtcttggaatatgctatcatcttcaactcaagcttgctcaagcccagacatgttatgagcgtgctttgaagatagaaggacgtgttctgggggttggtcacccagagtattcaagtacaatgtacagtctagccaaggtgctcagtctacaaggaaaaagaaaaaatgcagaatgccttattgaagagtctattagaatacttgaggaagctgggcttggcgattcactaacatgtttacgaagaatggtctctctctctagagagttaataaaatcaagacgatttgctgaagctgaaatctggcaaaggaagatattacatgttctggagctttcagagggatgggattcattggtcactgcacgtgcagctgaactcctaagtttaaatcttgaaaccatggagaagttgaaggaatcagaagagctattggaacgatgccttgcagtcaagaaaaagattctacctgaagatcatcttcaggtagcttatacgttggtacacctggcaaggttaacattgcacagagttgtaaaggatcgggatgtaaacagcgatgtaactgcatattacctcgcaaaagcaaaacagttcagcaatgattcaatcaggattacagaaggacaattaaattcttcaagaaaagatcagaataaaattaacaacacatcaactgcagatacagataagagtgcagcaataattctttttcaagcacttcatgtttttggactcattgatattgcagcgaagcagttgctagggcaagggttggtactgttgctaaggcttccactggaacatttgaagcatggattcttcaaaattgaagctgtacatataccaggcacacctcggccatttatatggaccgacacatataccatatatgcccgatatagcgcactgcaaatccattttaaaaataagtttggaaaggagcaagactataattctgttcaagatgctctgcagaagtgtgtttcactttacaaagagcctcatacacgaaggttggtgaaaaatgctgccaagcaggactacatgatatgcctgacgagcctgatcgatatggttcagagcttgtttcccattccacacataccggggttgcaggagttgctttgcgaggccgaacaaattttaggagagctagaagaagagagtactaggaagaagcaatgatacgtaggaaccaacacccatatgggtggaagcatttgttaattgcaagttgtgagccatatattttttcagttggtcgagatcgcccacctatatgggtggaagcatttgtttgacgaggtgctgaatcgagtgacgggttaaagagtttaatgcttgtttgcgcagtggtgttatgacgtggtcttcaacatagagtcctagtttctcggtggtggtggtccacaagatagatcatgttgctgaaatcttggatgctttctaaatcaaaatccttgacattggcgaccaaaaaaaaagatccctatcaatggcggatggccaaactgaaccaaggattggttttggcatagaagctcttcctaaaagttgtgctggctgtttgcgtaattcttttagatattgtggtcttagactatctctagcaacttactcatctttatctctatatttaaactccacattataaacaatgcactttacaatacaaaacaatattttgcatggctattgtttttaaacttagctttagatatttttttggagaggatagttttaagtggctaaaaaatttgggagcattttttttgccatttttaaaatctcgtttttgcatcataaatccta

SEQ ID NO: 48416 - DNA, 1318 bp, Zea Mays
ggttggaagaactgtgcatagtcttggaatatgctatcatcttcaactcaagcttgctcaagcccagacatgttatgagcgtgctttgaagatagaaggacgtgttctgggggttggtcacccagagtattcaagtacaatgtacagtctagccaaggtagcttatacgttggtacacctggcaaggttaacattgcacagagttgtaaaggatcgggatgtaaacagcgatgtaactgcatattacctcgcaaaagcaaaacagttcagcaatgattcaatcaggattacagaaggacaattaaattcttcaagaaaagatcagaataaaattaacaacacatcaactgcagatacagataagagtgcagcaataattctttttcaagcacttcatgtttttggactcattgatattgcagcgaagcagttgctagggcaaggggagcaagactataattctgttcaagatgctctgcagaagtgtgtttcactttacaaagagcctcatacacgaaggttggtgaaaaatgctgccaagcaggactacatgatatgcctgacgagcctgatcgatatggttcagagcttgtttcccattccacacataccggggttgcaggagttgctttgcgaggccgaacaaattttaggagagctagaagaagagagtactaggaagaagcaatgatacgtaggaaccaacacccatatgggtggaagcatttgttaattgcaagttgtgagccatatattttttcagttggtcgagatcgcccacctatatgggtggaagcatttgtttgacgaggtgctgaatcgagtgacgggttaaagagtttaatgcttgtttgcgcagtggtgttatgacgtggtcttcaacatagagtcctagtttctcggtggtggtggtccacaagatagatcatgttgctgaaatcttggatgctttctaaatcaaaatccttgacattggcgaccaaaaaaaaagatccctatcaatggcggatggccaaactgaaccaaggattggttttggcatagaagctcttcctaaaagttgtgctggctgtttgcgtaattcttttagatattgtggtcttagactatctctagcaacttactcatctttatctctatatttaaactccacattataaacaatgcactttacaatacaaaacaatattttgcatggctattgtttttaaacttagctttagatatttttttggagaggatagttttaagtggctaaaaaatttgggagcattttttttgccatttttaaaatctcgtttttgcatcataaatccta

SEQ ID NO: 48417 - DNA, 1629 bp, Zea Mays
gttggaagaactgtgcatagtcttggaatatgctatcatcttcaactcaagcttgctcaagcccagacatgttatgagcgtgctttgaagatagaaggacgtgttctgggggttggtcacccagagtattcaagtacaatgtacagtctagccaagggatgggattcattggtcactgcacgtgcagctgaactcctaagtttaaatcttgaaaccatggagaagttgaaggaatcagaagagctattggaacgatgccttgcagtcaagaaaaagattctacctgaagatcatcttcaggtagcttatacgttggtacacctggcaaggttaacattgcacagagttgtaaaggatcgggatgtaaacagcgatgtaactgcatattacctcgcaaaagcaaaacagttcagcaatgattcaatcaggattacagaaggacaattaaattcttcaagaaaagatcagaataaaattaacaacacatcaactgcagatacagataagagtgcagcaataattctttttcaagcacttcatgtttttggactcattgatattgcagcgaagcagttgctagggcaagggttggtactgttgctaaggcttccactggaacatttgaagcatggattcttcaaaattgaagctgtacatataccaggcacacctcggccatttatatggaccgacacatataccatatatgcccgatatagcgcactgcaaatccattttaaaaataagtttggaaaggagcaagactataattctgttcaagatgctctgcagaagtgtgtttcactttacaaagagcctcatacacgaaggttggtgaaaaatgctgccaagcaggactacatgatatgcctgacgagcctgatcgatatggttcagagcttgtttcccattccacacataccggggttgcaggagttgctttgcgaggccgaacaaattttaggagagctagaagaagagagtactaggaagaagcaatgatacgtaggaaccaacacccatatgggtggaagcatttgttaattgcaagttgtgagccatatattttttcagttggtcgagatcgcccacctatatgggtggaagcatttgtttgacgaggtgctgaatcgagtgacgggttaaagagtttaatgcttgtttgcgcagtggtgttatgacgtggtcttcaacatagagtcctagtttctcggtggtggtggtccacaagatagatcatgttgctgaaatcttggatgctttctaaatcaaaatccttgacattggcgaccaaaaaaaaagatccctatcaatggcggatggccaaactgaaccaaggattggttttggcatagaagctcttcctaaaagttgtgctggctgtttgcgtaattcttttagatattgtggtcttagactatctctagcaacttactcatctttatctctatatttaaactccacattataaacaatgcactttacaatacaaaacaatattttgcatggctattgtttttaaacttagctttagatatttttttggagaggatagttttaagtggctaaaaaatttgggagcattttttttgccatttttaaaatctcgtttttgcatcataaatccta

SEQ ID NO: 48418 - DNA, 1430 bp, Zea Mays
agatgagtatatgggttaaggcccattacaggagataaacacacatagagttaataaaatcaagacgatttgctgaagctgaaatctggcaaaggaagatattacatgttctggagctttcagagggatgggattcattggtcactgcacgtgcagctgaactcctaagtttaaatcttgaaaccatggagaagttgaaggaatcagaagagctattggaacgatgccttgcagtcaagaaaaagattctacctgaagatcatcttcaggtagcttatacgttggtacacctggcaaggttaacattgcacagagttgtaaaggatcgggatgtaaacagcgatgtaactgcatattacctcgcaaaagcaaaacagttcagcaatgattcaatcaggattacagaaggacaattaaattcttcaagaaaagatcagaataaaattaacaacacatcaactgcagatacagataagagtgcagcaataattctttttcaagcacttcatgtttttggactcattgatattgcagcgaagcagttgctagggcaaggggagcaagactataattctgttcaagatgctctgcagaagtgtgtttcactttacaaagagcctcatacacgaaggttggtgaaaaatgctgccaagcaggactacatgatatgcctgacgagcctgatcgatatggttcagagcttgtttcccattccacacataccggggttgcaggagttgctttgcgaggccgaacaaattttaggagagctagaagaagagagtactaggaagaagcaatgatacgtaggaaccaacacccatatgggtggaagcatttgttaattgcaagttgtgagccatatattttttcagttggtcgagatcgcccacctatatgggtggaagcatttgtttgacgaggtgctgaatcgagtgacgggttaaagagtttaatgcttgtttgcgcagtggtgttatgacgtggtcttcaacatagagtcctagtttctcggtggtggtggtccacaagatagatcatgttgctgaaatcttggatgctttctaaatcaaaatccttgacattggcgaccaaaaaaaaagatccctatcaatggcggatggccaaactgaaccaaggattggttttggcatagaagctcttcctaaaagttgtgctggctgtttgcgtaattcttttagatattgtggtcttagactatctctagcaacttactcatctttatctctatatttaaactccacattataaacaatgcactttacaatacaaaacaatattttgcatggctattgtttttaaacttagctttagatatttttttggagaggatagttttaagtggctaaaaaatttgggagcattttttttgccatttttaaaatctcgtttttgcatcataaatccta

SEQ ID NO: 48419 - DNA, 1134 bp, Zea Mays
ttgcttccttggtgccgcttcttgcttttgtttcaagcacttcatgtttttggactcattgatattgcagcgaagcagttgctagggcaagggttggtactgttgctaaggcttccactggaacatttgaagcatggattcttcaaaattgaagctgtacatataccaggcacacctcggccatttatatggaccgacacatataccatatatgcccgatatagcgcactgcaaatccattttaaaaataagtttggaaaggagcaagactataattctgttcaagatgctctgcagaagtgtgtttcactttacaaagagcctcatacacgaaggttggtgaaaaatgctgccaagcaggactacatgatatgcctgacgagcctgatcgatatggttcagagcttgtttcccattccacacataccggggttgcaggagttgctttgcgaggccgaacaaattttaggagagctagaagaagagagtactaggaagaagcaatgatacgtaggaaccaacacccatatgggtggaagcatttgttaattgcaagttgtgagccatatattttttcagttggtcgagatcgcccacctatatgggtggaagcatttgtttgacgaggtgctgaatcgagtgacgggttaaagagtttaatgcttgtttgcgcagtggtgttatgacgtggtcttcaacatagagtcctagtttctcggtggtggtggtccacaagatagatcatgttgctgaaatcttggatgctttctaaatcaaaatccttgacattggcgaccaaaaaaaaagatccctatcaatggcggatggccaaactgaaccaaggattggttttggcatagaagctcttcctaaaagttgtgctggctgtttgcgtaattcttttagatattgtggtcttagactatctctagcaacttactcatctttatctctatatttaaactccacattataaacaatgcactttacaatacaaaacaatattttgcatggctattgtttttaaacttagctttagatatttttttggagaggatagttttaagtggctaaaaaatttgggagcattttttttgccatttttaaaatctcgtttttgcatcataaatccta

SEQ ID NO: 48420 - DNA, 2694 bp, Zea Mays
ccccaggcccagcagcagagcgagggagcgcattactctgcagcgcggacacgcccggcacggcaagccagccactcttctcgcgtgaagcttagccattcttgcggctgggcaaggaaactgctgaagccactagccggctgcctgctctacggcctccgaaccgaacgaggtgcatcgtgaggaagcagcagcagggggggggggggggggggggcagtggccgggcgggatgacggggagggaggccgtggcttcggcggaggcggagctggatcaggactcggcggcggcggcggccgcggcgcccgtgctgctgagcccgctcagcgagacgctgtggcgcgacagggcggcggcggcggcgggcggggtcctcgtcggggacgtgtcggcgcgcctggcgtggcgcgacctcaccgtgaccgtcgcgctcggcaccggcgacacgcaggccgtgctgcagggcctcacggggcacgccgagcccggcaccatcaccgcgctcatgggcccgtccggctccggcaagtccacgctgctcgacgcgctcgcgggccgcctcgccgccaacgccttcctctccgggaccgtcctcctcaacgggcgcaaggccaacctctccttcggcgccgcggcctacgtgacgcaagacgacaacctgatcggcacgctgacggtgagggagacgatctcgtactcggcgcgactccggctccccgacaagatgccgagggaggagaagcaggctctggtggagggcaccatcgtggagatggggctgcaggactgcgccgacaccgtcgtcggcaactggcacctgagggggatcagcggcggcgagaagcggagggtcagcatcgccctggaaatactcatgcggcccaggctgctgttcctggacgagcctaccagtggccttgacagtgcttcggcgttcttcgtgacgcagacgctgcgagggctggcaagggacggccggaccgtcatagcgtcggtgcaccagccgagcagcgaggttttcttgctgttcgactgcctctaccttctgtcagggggcaggacagtctacttcgggaaggcatcggaggcctgcgagttcttcgcccaggctggcttcccgtgcccgccgatgcgcaacccgtcggaccatttcctccggtgcataaactcggatttcgacaaggtgaaggccactctcaaagggtcgatgaaggcgaggttcgaaaggtccaacgacgacgacccgctggagaagatgacgacgtcggaagcgatgaggaggctcaccagctactaccagcactcgcagtgccacatcaacgcgcagcagaaagtggacgagatggcccggctcaaaggaacggtgctggatccaggaggagggagccaggccagcttcctgatgcaggcgttcacgctcacgaagcgctcgttcgtcaacatgtccagggacttcggctactactggctcaggctcatcatctacatcgtcgtcacgctttgcatcgggactatatacctcaacgttgggaccggatacagctctatcctggcccggggcgcgtgtgcttcgttcatcttcggcttcgtcacgttcatgtccatcggagggtttccgtctttcgtggaggacatgaaggtgttccagagggagaggctgaacgggcactacggcgtgctggcgttcgtcgtcagcaacacggtctcggcgatgccgttcctggtcctcatcaccttcgtgtcgggcacgctgtgctacttcatggtgcgcctgcacccgggcttcacgcactacctcttcttcgtgctggcgctctacgccagcgtcaccgtcgtcgagagcctcatgatggccatcgccagcgtcatccccaacttcctcatgggcatcataatcggcgcagggatccaggggatcttcatgctggtgtcgggttacttcaggcttccgcacgacatccccaagcccttctggaggacgacgagctgcccaggatcccgggggagttcatcctggagaccgtgttccagatcgacgtcgcccgctccaagtggctggacctggccgtgctcttcagcatgatcgtcatctaccgcctgctcttcttcctcatgatcaaggccagcgaggacgtcaccccctggctgcgccgctacgtcgcgcggcgccgggtgcggaaccgtcgccaccgcaagccggacctgcccgcccggacgccgtcgctccgcgggtacgtcgtcgacgcggccagcctgccggacgaccacccgtgacgaaagagcgcgagagaaaacgtacgggcagggatgtcatttcatatcatatcacacagaggctaaaccggatcgagctgataataacacactcactcactagtactgcaataatatgatgttaagttggtatagcaaccgcttaagtgcccgttcggttcttcctgaatgctttactggattggttccggattggaatagttcacaaatttgtattagctcgatgagttggaatgattccggccttcaatctggactaaacgaacagagctgtaatggagtgttgcttgatgcactgctaagatgtacacgtatatgaagagcatgtgaccatcagttctacacatcttgggttggactttgacaccctagggttaagtggtttgcctccaattacttacttaggggcgagttggg

SEQ ID NO: 48421 - DNA, 1658 bp, Zea Mays
gaattgcgtcgcgactccgccagcaccggctgaagcaggccgaaacccagcccaagaaagagcaataaacaaaacccagcccgagaaaggagaaagaaaaattagaaaccctagcgatgctgcagatccgcctgagcaagattggctcgtcggactccggcgctgccgccaccggctcggcagccgccgccggtgccgccgccgctgtggggtcggctgcggcgctgggcggcggcatcccggaatcggtcaccgtggcatgccccgaccacctggtgatcgcggacctacccgtcgcgaagagcctcggtgccgtcacgacctccgctgccgccgccacgcgcgccatcggccgtcgctcccgtcgcccgctcggggagcgcgtccacatctgctcccgctgcgagttccccatcgccatctacggccgcctcatcccttgtgaacatgccttttgtttaacctgtgcaagaagtgattccagctgctatctttgtgatgagcgcattcagaagatacaaagtgtgaaaatgatggaggggattttcatctgtgctgcaccgatgtgtctcaagtcattccttaagaaagcagattttgagtttcatgttcccgatgtccatgccaacctcctgcaaactaatctagagaaggaagaagaacgcaatgagccagatgctcctaacatctcccgtgcttctgcaggggatacacaaagacaatctcaaatgcctgaaatgtctactgcacgggctccttcaaggccaggtgtttcacaagatcgtgatgaacgctctcgctaccaccagtccagggagcaaacaccactgaggcccccaaccctttcaaaaccaccttcattccatggtcggcattcgtacccaccaggggatactcaggccgagaacaatccacctcaaggattcgaccgggcctacaactgggcttctcaatcacggcaagagagcccagggaaactttatgatgcctatgaatatgaatcagcctttgattcctaatgcaccattcaattatcctctccagcaagatggaaaccctcagtacttctctgcccctttccagatgcagctaccagatactggatcagaacaaggttccatgtcaaatgtccagcctccagctggtcctatgagtttccctgaggggcctcagcgcccatggggtatgaggctgatgagtaatccatttcaatcgatggcccttggtcagggaatgattgatggtgcgggtgatcctcaaggtggtggtggccttgccttcatgcaagctggttttgggggcatgcctgatggctccatgaatacaggcatgcccgatagaggtgatggaaggggtattctagcacagatgcatatgcaaatgcagatgtcacttcccccacctccgcctacacaacctcctccaggttcacagcaaacgtttaacaggacttgatatttttttttgtacgaattgatggcaactcccagaattgcatgtcaattcattgagcaaattgtaattttgtcgtttttggcatgtaacctgtggactagatggctcagttctgttccctggttggataggagcctgtattatgctataactcctgtttgaatgaaatgttccgaaatttcgaaattttagttcgagatggt

SEQ ID NO: 48422 - DNA, 1748 bp, Zea Mays
gaatatgccattttcctaaaaaaaagttgtacggggataggttttcgtgtatataaacttttaaataaattataggtcacattaaatttttaaaagctaataccaaaccgagcatctccggaactccattatccaattctcctaatgactttggagtatattgtaagatactcacaaagttgcaactcgcaagtgcttcatgtgaaaactttagggaggattcaagtacacatttgaggctcggaggagatccattgatccagttatttacatggtagttgatacctagaccaggctgctgcttcatccccaattatttctgccagactgggaaaatcaagcaagaagaacacttcatcagctctcatctaattgattatattaacttgctagcaactagggaaggtcaagtgagtagagatcccttgtgaacatgccttttgtttaacctgtgcaagaagtgattccagctgctatctttgtgatgagcgcattcagaagatacaaagtgtgaaaatgatggaggggattttcatctgtgctgcaccgatgtgtctcaagtcattccttaagaaagcagattttgagtttcatgttcccgatgtccatgccaacctcctgcaaactaatctagagaaggaagaagaacgcaatgagccagatgctcctaacatctcccgtgcttctgcaggggatacacaaagacaatctcaaatgcctgaaatgtctactgcacgggctccttcaaggccaggtgtttcacaagatcgtgatgaacgctctcgctaccaccagtccagggagcaaacaccactgaggcccccaaccctttcaaaaccaccttcattccatggtcggcattcgtacccaccaggggatactcaggccgagaacaatccacctcaaggattcgaccgggcctacaactgggcttctcaatcacggcaagagagcccaggtgcggcgactccacttcgccaagaatctgaccaaagtattcaggacaagcagcaattgatggctaatgcaccttttatgtttccgccgattcctcctcaccagggaaactttatgatgcctatgaatatgaatcagcctttgattcctaatgcaccattcaattatcctctccagcaagatggaaaccctcagtacttctctgcccctttccagatgcagctaccagatactggatcagaacaaggttccatgtcaaatgtccagcctccagctggtcctatgagtttccctgaggggcctcagcgcccatggggtatgaggctgatgagtaatccatttcaatcgatggcccttggtcagggaatgattgatggtgcgggtgatcctcaaggtggtggtggccttgccttcatgcaagctggttttgggggcatgcctgatggctccatgaatacaggcatgcccgatagaggtgatggaaggggtattctagcacagatgcatatgcaaatgcagatgtcacttcccccacctccgcctacacaacctcctccaggttcacagcaaacgtttaacaggacttgatatttttttttgtacgaattgatggcaactcccagaattgcatgtcaattcattgagcaaattgtaattttgtcgtttttggcatgtaacctgtggactagatggctcagttctgttccctggttggataggagcctgtattatgctataactcctgtttgaatgaaatgttccgaaatttcgaaattttagttcgagatggt

SEQ ID NO: 48423 - DNA, 1613 bp, Zea Mays
ctcctaatgactttggagtatattgtaagatactcacaaagttgcaactcgcaagtgcttcatgtgaaaactttagggaggattcaagtacacatttgaggctcggaggagatccattgatccagttatttacatggtagttgatacctagaccaggctgctgcttcatccccaattatttctgccagactgggaaaatcaagcaagaagaacacttcatcagctctcatctaattgattatattaacttgctagcaactagggaaggtcaagtgagtagagcagatcccttgtgaacatgccttttgtttaacctgtgcaagaagtgattccagctgctatctttgtgatgagcgcattcagaagatacaaagtgtgaaaatgatggaggggattttcatctgtgctgcaccgatgtgtctcaagtcattccttaagaaagcagattttgagtttcatgttcccgatgtccatgccaacctcctgcaaactaatctagagaaggaagaagaacgcaatgagccagatgctcctaacatctcccgtgcttctgcaggggatacacaaagacaatctcaaatgcctgaaatgtctactgcacgggctccttcaaggccaggtgtttcacaagatcgtgatgaacgctctcgctaccaccagtccagggagcaaacaccactgaggcccccaaccctttcaaaaccaccttcattccatggtcggcattcgtacccaccaggggatactcaggccgagaacaatccacctcaaggattcgaccgggcctacaactgggcttctcaatcacggcaagagagcccaggtgcggcgactccacttcgccaagaatctgaccaaagtattcaggacaagcagcaattgatggctaatgcaccttttatgtttccgccgattcctcctcaccagggaaactttatgatgcctatgaatatgaatcagcctttgattcctaatgcaccattcaattatcctctccagcaagatggaaaccctcagtacttctctgcccctttccagatgcagctaccagatactggatcagaacaaggttccatgtcaaatgtccagcctccagctggtcctatgagtttccctgaggggcctcagcgcccatggggtatgaggctgatgagtaatccatttcaatcgatggcccttggtcagggaatgattgatggtgcgggtgatcctcaaggtggtggtggccttgccttcatgcaagctggttttgggggcatgcctgatggctccatgaatacaggcatgcccgatagaggtgatggaaggggtattctagcacagatgcatatgcaaatgcagatgtcacttcccccacctccgcctacacaacctcctccaggttcacagcaaacgtttaacaggacttgatatttttttttgtacgaattgatggcaactcccagaattgcatgtcaattcattgagcaaattgtaattttgtcgtttttggcatgtaacctgtggactagatggctcagttctgttccctggttggataggagcctgtattatgctataactcctgtttgaatgaaatgttccgaaatttcgaaattttagttcgagatggt

SEQ ID NO: 48424 - DNA, 3511 bp, Zea Mays
aggagaggtagggaggaaccactcacaactcgattgcataaaaaactcgggtccggaagctggttcctgtctgacgacgctgtactcaagccacacgtcgttcgagctgtggcggactgcccgtgaagcgcggggagaagctcaaactccaccgggttttaataaaaggaacagccacggactctgagtctctgacgctgccttttgctctccccttccaccccgtctgcccgcgcgcgctgtctcgtggcgacaactgggcgaccgccgccgccgtcgctgccgccgctacgccaagaagctaggtcttcatcggtcccttcgtcgagattttctccggagacaagcacccagcaggggactacaagattgattttgatggattatgacaagtctagaagaagtaactccaaaaagaggagacattccaattctgatgacggaaagaggaaacggttgagctctaggcatgatgacacatctatgtcctctgagccaattgaaaccatctacaggatattgtgcccggcaaaaaagataggcagtgtcttgggaagaggtggtgacattgttaaggcccttagagaggaaactaaagccaagataagggttgccgattccattcctggtgcagatgagagagtaattatcatcttcaattaccaaaatcaacctgaacttactgatgaagcagctgaaaaacaaattagtgatggcttagggaacatgaaaccccattgctttgcccaagatgccttattgaagatacatgataagattgtggctgatgaaatttatgatgaagtcgctcatgatgaaagttctgatgatgtcactgctcgaattttggttcaaggcaatcaagttggctgccttctaggaaaaggtggctccattatacaacaactacgaagtgatactggtgctgggatccgtgtcttgtcatctgaaaaccttccccagtgtgcacttcaaagtgatgaactggtgcagatatctggagcaccatctcttgtaagaaaagctctatatgaaatatctactcgtctccatcagcatcctcgtaaggaaaatagacctcttgaacaaataatagatgcaagcacacaaaggaaacacgagtctccaacactgcaacatgaaaatccaatgttgccgcacctgcatagtcatcatccacctccaatacccctgcttgacccatacagaagtggacctcagtatcctgttagtgaaactgaagagttttctatcagaatcctatgtgcttctgagctcattggttcagttattgggaaaagtggggctaatgttaggcgggtagagcagcagactggtgctcgcattaaagttcaagagattgacaaagatgcttctggagaaaggctgatcattgtttcatctaacgagataccaactgaaccaatatccccaacaattgaggcactcattttgctccacgataaagtgggcaggtgattactgaaatgagaagacgaactggggctgaaattcgagtttactcgaaggcagataaaccaaaatacttgtcttttggtgatgaacttgtgcaggttgcagggcctccagctattgcaagaggagccctcacagagattgcttcgaggcttagaactaggactttgagagatacaagtactgccaataatcctccaccttttgccccttccgatgatcctactgtcgatatgcctagcagaaaattaacactatatggagggcctaccaatgatacaccgtatggaaggcctgccaatgatccactgtatggaaggcctgccattgatccaccatttggaagacctaccaacgatcgaccatacggaaggcctgccatcgttccaccatttggaagacctaccaatgatccaccatatggaaggcctgccaatgatccaccatatgaaaggcctaccaatgatccaccatatggacgaccttccagtactatagcatatggaagaccaaacagaagtgcacctcgtgatccttcagatgcatatcctgtagactacttctctaaaagagaacatcctagtggaggccctatgtttactagtaatgccccatcagctgcttatgagagatatgcagcacccacacactttcctactagagaacctccctcaactttcagtcatcgttcctatcgtgaccacatgcctactgatagctactctagtaggggtacacagaaattagacatcacgagagatggaaattcagatgcttatgattatacagaggtacatctttgccgtgagcttccctcttttgcaaatggccatcacctaaaattttcattagaagcttgagactttacacatgactgttccactgtccctattctgttccataatttgctggcactactgaacattggggaaacgttatatgttggtgtcttagcttctgtggcagtaatgttcaccctataatgtggtcacactgtcacagtggtgcaactcttttcatttgttgtcacttgcatcttggttcaatatatatctggctgttggatgtactctgctgcttttagtttcaatcggtttttcttgatattatctatgcctaccagaacatctcatattctgtatatatttaaattttatcattgcacaggctgctggacaaattcatggactggaggactatagaggactgccaagtgcttctggaaggttctcgagcactattgaactaaggattccaaatagttctttggagtctattgttggtgttggcggggtcaatttagcagagatacgtcagatttctggtgcaagactgaggctacatgaggctcatgctggttcttctgagtctgtggtggagatccagggcacactggaccaagcaaaagctgcgcagagcctcctggagggctttatcagcgcgaacagcaggcagcagcaatcccattcttctcgcatgccactttacccaagatggggatagcttctggttgtggcaggggaaaaccgagtcagcagggttggctggagttatctcagactgcagattagatgcatcgatgatgttaatggtagctgtttaaattgaccgtgcaagcatgataacttatattatgccataggacaagtaatgctgattctctcatgaaatactaagtgacaagctgtctctgtagttgtatttgtttctgaatgtttgaaccctactgttacaacggctgctattttaggtcagatttcagaggccggataattatgttatctgcagagttgggccaaaaaaaaaagctcaatctggttgagactggcttcacccatgccgtttcatttttagaagttacagcatctctgcaaaatatatgggtaaggcctcttggaacgcatgaatttcatagaaatcagtttattttctcagaaaaaacatgggaaacaggggaaaaaaatcccacgttccaagaggcctaaagtttgtgtctgtttagatcctgataatatgggagctaccaacatttgat

SEQ ID NO: 48425 - DNA, 3027 bp, Zea Mays
ggagaggtagggaggaaccactcacaactcgattgcataaaaaactcgggtccggaagctggttcctgtctgacgacgctgtactcaagccacacgtcgttcgagctgtggcggactgcccgtgaagcgcggggagaagctcaaactccaccgggttttaataaaaggggactacaagattgattttgatggattatgacaagtctagaagaagtaactccaaaaagaggagacattccaattctgatgacggaaagaggaaacggttgagctctaggcatgatgacacatctatgtcctctgagccaattgaaaccatctacaggatattgtgcccggcaaaaaagataggcagtgtcttgggaagaggtggtgacattgttaaggcccttagagaggaaactaaagccaagataagggttgccgattccattcctggtgcagatgagagagtaattatcatcttcaattaccaaaatcaacctgaacttactgatgaagcagctgaaaaacaaattagtgatggcttagggaacatgaaaccccattgctttgcccaagatgccttattgaagatacatgataagattgtggctgatgaaatttatgatgaagtcgctcatgatgaaagttctgatgatgtcactgctcgaattttggttcaaggcaatcaagttggctgccttctaggaaaaggtggctccattatacaacaactacgaagtgatactggtgctgggatccgtgtcttgtcatctgaaaaccttccccagtgtgcacttcaaagtgatgaactggtgcagatatctggagcaccatctcttgtaagaaaagctctatatgaaatatctactcgtctccatcagcatcctcgtaaggaaaatagacctcttgaacaaataatagatgcaagcacacaaaggaaacacgagtctccaacactgcaacatgaaaatccaatgttgccgcacctgcatagtcatcatccacctccaatacccctgcttgacccatacagaagtggacctcagtatcctgttagtgaaactgaagagttttctatcagaatcctatgtgcttctgagctcattggttcagttattgggaaaagtggggctaatgttaggcgggtagagcagcagactggtgctcgcattaaagttcaagagattgacaaagatgcttctggagaaaggctgatcattgtttcatctaacgagataccaactgaaccaatatccccaacaattgaggcactcattttgctccacgataaagtaagtgcatcctctgagaaacaccattcaagtacaaggcttgttgtaccatcaaacaaagttggctgtattcttggggaaggtgggcaggtgattactgaaatgagaagacgaactggggctgaaattcgagtttactcgaaggcagataaaccaaaatacttgtcttttggtgatgaacttgtgcaggttgcagggcctccagctattgcaagaggagccctcacagagattgcttcgaggcttagaactaggactttgagagatacaagtactgccaataatcctccaccttttgccccttccgatgatcctactgtcgatatgcctagcagaaaattaacactatatggagggcctaccaatgatacaccgtatggaaggcctgccaatgatccactgtatggaaggcctgccattgatccaccatttggaagacctaccaacgatcgaccatacggaaggcctgccatcgttccaccatttggaagacctaccaatgatccaccatatggaaggcctgccaatgatccaccatatgaaaggcctaccaatgatccaccatatggacgaccttccagtactatagcatatggaagaccaaacagaagtgcacctcgtgatccttcagatgcatatcctgtagactacttctctaaaagagaacatcctagtggaggccctatgtttactagtaatgccccatcagctgcttatgagagatatgcagcacccacacactttcctactagagaacctccctcaactttcagtcatcgttcctatcgtgaccacatgcctactgatagctactctagtaggggtacacagaaattagacatcacgagagatggaaattcagatgcttatgattatacagaggctgctggacaaattcatggactggaggactatagaggactgccaagtgcttctggaaggttctcgagcactattgaactaaggattccaaatagttctttggagtctattgttggtgttggcggggtcaatttagcagagatacgtcagatttctggtgcaagactgaggctacatgaggctcatgctggttcttctgagtctgtggtggagatccagggcacactggaccaagcaaaagctgcgcagagcctcctggagggctttatcagcgcgaacagcaggcagcagcaatcccattcttctcgcatgccactttacccaagatggggatagcttctggttgtggcaggggaaaaccgagtcagcagggttggctggagttatctcagactgcagattagatgcatcgatgatgttaatggtagctgtttaaattgaccgtgcaagcatgataacttatattatgccataggacaagtaatgctgattctctcatgaaatactaagtgacaagctgtctctgtagttgtatttgtttctgaatgtttgaaccctactgttacaacggctgctattttaggtcagatttcagaggccggataattatgttatctgcagagttgggccaaaaaaaaaagctcaatctggttgagactggcttcacccatgccgtttcatttttagaagttacagcatctctgcaaaatatatgggtaaggcctcttggaacgcatgaatttcatagaaatcagtttattttctcagaaaaaacatgggaaacaggggaaaaaaatcccacgttccaagaggcctaaagtttgtgtctgtttagatcctgataatatgggagctaccaacatttgat

SEQ ID NO: 48426 - DNA, 2953 bp, Zea Mays
accgggttttaataaaaggaacagccacggactctgagtctctgacgctgccttttgctctccccttccaccccgtctgcccgcgcgcgctgtctcgtggcgacaactgggcgaccgccgccgccgtcgctgccgccgctacgccaagaagctaggtcttcatcggtcccttcgtcgagattttctccggagacaagcacccagcaggggactacaagattgattttgatggattatgacaagtctagaagaagtaactccaaaaagaggagacattccaattctgatgacggaaagaggaaacggttgagctctaggcatgatgacacatctatgtcctctgagccaattgaaaccatctacaggatattgtgcccggcaaaaaagataggcagtgtcttgggaagaggtggtgacattgttaaggcccttagagaggaaactaaagccaagataagggttgccgattccattcctggtgcagatgagagagtaattatcatcttcaattaccaaaatcaacctgaacttactgatgaagcagctgaaaaacaaattagtgatggcttagggaacatgaaaccccattgctttgcccaagatgccttattgaagatacatgataagattgtggctgatgaaatttatgatgaagtcgctcatgatgaaagttctgatgatgtcactgctcgaattttggttcaaggcaatcaagttggctgccttctaggaaaaggtggctccattatacaacaactacgaagtgatactggtgctgggatccgtgtcttgtcatctgaaaaccttccccagtgtgcacttcaaagtgatgaactggtgcagatatctggagcaccatctcttgtaagaaaagctctatatgaaatatctactcgtctccatcagcatcctcgtaaggaaaatagacctcttgaacaaataatagatgcaagcacacaaaggaaacacgagtctccaacactgcaacatgaaaatccaatgttgccgcacctgcatagtcatcatccacctccaatacccctgcttgacccatacagaagtggacctcagtatcctgttagtgaaactgaagagttttctatcagaatcctatgtgcttctgagctcattggttcagttattgggaaaagtggggctaatgttaggcgggtagagcagcagactggtgctcgcattaaagttcaagagattgacaaagatgcttctggagaaaggctgatcattgtttcatctaacgagataccaactgaaccaatatccccaacaattgaggcactcattttgctccacgataaagtgggcaggtgattactgaaatgagaagacgaactggggctgaaattcgagtttactcgaaggcagataaaccaaaatacttgtcttttggtgatgaacttgtgcaggttgcagggcctccagctattgcaagaggagccctcacagagattgcttcgaggcttagaactaggactttgagagatacaagtactgccaataatcctccaccttttgccccttccgatgatcctactgtcgatatgcctagcagaaaattaacactatatggagggcctaccaatgatacaccgtatggaaggcctgccaatgatccactgtatggaaggcctgccattgatccaccatttggaagacctaccaacgatcgaccatacggaaggcctgccatcgttccaccatttggaagacctaccaatgatccaccatatggaaggcctgccaatgatccaccatatgaaaggcctaccaatgatccaccatatggacgaccttccagtactatagcatatggaagaccaaacagaagtgcacctcgtgatccttcagatgcatatcctgtagactacttctctaaaagagaacatcctagtggaggccctatgtttactagtaatgccccatcagctgcttatgagagatatgcagcacccacacactttcctactagagaacctccctcaactttcagtcatcgttcctatcgtgaccacacagaaattagacatcacgagagatggaaattcagatgcttatgattatacagaggctgctggacaaattcatggactggaggactatagaggactgccaagtgcttctggaaggttctcgagcactattgaactaaggattccaaatagttctttggagtctattgttggtgttggcggggtcaatttagcagagatacgtcagatttctggtgcaagactgaggctacatgaggctcatgctggttcttctgagtctgtggtggagatccagggcacactggaccaagcaaaagctgcgcagagcctcctggagggctttatcagcgcgaacagcaggcagcagcaatcccattcttctcgcatgccactttacccaagatggggatagcttctggttgtggcaggggaaaaccgagtcagcagggttggctggagttatctcagactgcagattagatgcatcgatgatgttaatggtagctgtttaaattgaccgtgcaagcatgataacttatattatgccataggacaagtaatgctgattctctcatgaaatactaagtgacaagctgtctctgtagttgtatttgtttctgaatgtttgaaccctactgttacaacggctgctattttaggtcagatttcagaggccggataattatgttatctgcagagttgggccaaaaaaaaaagctcaatctggttgagactggcttcacccatgccgtttcatttttagaagttacagcatctctgcaaaatatatgggtaaggcctcttggaacgcatgaatttcatagaaatcagtttattttctcagaaaaaacatgggaaacaggggaaaaaaatcccacgttccaagaggcctaaagtttgtgtctgtttagatcctgataatatgggagctaccaacatttgat

SEQ ID NO: 48427 - DNA, 3337 bp, Zea Mays
cagccacggactctgagtctctgacgctgccttttgctctccccttccaccccgtctgcccgcgcgcgctgtctcgtggcgacaactgggcgaccgccgccgccgtcgctgccgccgctacgccaagaagctaggtcttcatcggtcccttcgtcgagattttctccggagacaagcacccagcaggggactacaagattgattttgatggattatgacaagtctagaagaagtaactccaaaaagaggagacattccaattctgatgacggaaagaggaaacggttgagctctaggcatgatgacacatctatgtcctctgagccaattgaaaccatctacaggatattgtgcccggcaaaaaagataggcagtgtcttgggaagaggtggtgacattgttaaggcccttagagaggaaactaaagccaagataagggttgccgattccattcctggtgcagatgagagagtaattatcatcttcaattaccaaaatcaacctgaacttactgatgaagcagctgaaaaacaaattagtgatggcttagggaacatgaaaccccattgctttgcccaagatgccttattgaagatacatgataagattgtggctgatgaaatttatgatgaagtcgctcatgatgaaagttctgatgatgtcactgctcgaattttggttcaaggcaatcaagttggctgccttctaggaaaaggtggctccattatacaacaactacgaagtgatactggtgctgggatccgtgtcttgtcatctgaaaaccttccccagtgtgcacttcaaagtgatgaactggtgcagatatctggagcaccatctcttgtaagaaaagctctatatgaaatatctactcgtctccatcagcatcctcgtaaggaaaatagacctcttgaacaaataatagatgcaagcacacaaaggaaacacgagtctccaacactgcaacatgaaaatccaatgttgccgcacctgcatagtcatcatccacctccaatacccctgcttgacccatacagaagtggacctcagtatcctgttagtgaaactgaagagttttctatcagaatcctatgtgcttctgagctcattggttcagttattgggaaaagtggggctaatgttaggcgggtagagcagcagactggtgctcgcattaaagttcaagagattgacaaagatgcttctggagaaaggctgatcattgtttcatctaacgagataccaactgaaccaatatccccaacaattgaggcactcattttgctccacgataaagtgggcaggtgattactgaaatgagaagacgaactggggctgaaattcgagtttactcgaaggcagataaaccaaaatacttgtcttttggtgatgaacttgtgcaggttgcagggcctccagctattgcaagaggagccctcacagagattgcttcgaggcttagaactaggactttgagagatacaagtactgccaataatcctccaccttttgccccttccgatgatcctactgtcgatatgcctagcagaaaattaacactatatggagggcctaccaatgatacaccgtatggaaggcctgccaatgatccactgtatggaaggcctgccattgatccaccatttggaagacctaccaacgatcgaccatacggaaggcctgccatcgttccaccatttggaagacctaccaatgatccaccatatggaaggcctgccaatgatccaccatatgaaaggcctaccaatgatccaccatatggacgaccttccagtactatagcatatggaagaccaaacagaagtgcacctcgtgatccttcagatgcatatcctgtagactacttctctaaaagagaacatcctagtggaggccctatgtttactagtaatgccccatcagctgcttatgagagatatgcagcacccacacactttcctactagagaacctccctcaactttcagtcatcgttcctatcgtgaccacatgcctactgatagctactctagtaggggtacacagaaattagacatcacgagagatggaaattcagatgcttatgattatacagaggtacatctttgccgtgagcttccctcttttgcaaatggccatcacctaaaattttcattagaagcttgagactttacacatgactgttccactgtccctattctgttccataatttgctggcactactgaacattggggaaacgttatatgttggtgtcttagcttctgtggcagtaatgttcaccctataatgtggtcacactgtcacagtggtgcaactcttttcatttgttgtcacttgcatcttggttcaatatatatctggctgttggatgtactctgctgcttttagtttcaatcggtttttcttgatattatctatgcctaccagaacatctcatattctgtatatatttaaattttatcattgcacaggctgctggacaaattcatggactggaggactatagaggactgccaagtgcttctgggttctcgagcactattgaactaaggattccaaatagttctttggagtctattgttggtgttggcggggtcaatttagcagagatacgtcagatttctggtgcaagactgaggctacatgaggctcatgctggttcttctgagtctgtggtggagatccagggcacactggaccaagcaaaagctgcgcagagcctcctggagggctttatcagcgcgaacagcaggcagcagcaatcccattcttctcgcatgccactttacccaagatggggatagcttctggttgtggcaggggaaaaccgagtcagcagggttggctggagttatctcagactgcagattagatgcatcgatgatgttaatggtagctgtttaaattgaccgtgcaagcatgataacttatattatgccataggacaagtaatgctgattctctcatgaaatactaagtgacaagctgtctctgtagttgtatttgtttctgaatgtttgaaccctactgttacaacggctgctattttaggtcagatttcagaggccggataattatgttatctgcagagttgggccaaaaaaaaaagctcaatctggttgagactggcttcacccatgccgtttcatttttagaagttacagcatctctgcaaaatatatgggtaaggcctcttggaacgcatgaatttcatagaaatcagtttattttctcagaaaaaacatgggaaacaggggaaaaaaatcccacgttccaagaggcctaaagtttgtgtctgtttagatcctgataatatgggagctaccaacatttgat

SEQ ID NO: 48428 - DNA, 3332 bp, Zea Mays
cagccacggactctgagtctctgacgctgccttttgctctccccttccaccccgtctgcccgcgcgcgctgtctcgtggcgacaactgggcgaccgccgccgccgtcgctgccgccgctacgccaagaagctaggtcttcatcggtcccttcgtcgagattttctccggagacaagcacccagcaggggactacaagattgattttgatggattatgacaagtctagaagaagtaactccaaaaagaggagacattccaattctgatgacggaaagaggaaacggttgagctctaggcatgatgacacatctatgtcctctgagccaattgaaaccatctacaggatattgtgcccggcaaaaaagataggcagtgtcttgggaagaggtggtgacattgttaaggcccttagagaggaaactaaagccaagataagggttgccgattccattcctggtgcagatgagagagtaattatcatcttcaattaccaaaatcaacctgaacttactgatgaagcagctgaaaaacaaattagtgatggcttagggaacatgaaaccccattgctttgcccaagatgccttattgaagatacatgataagattgtggctgatgaaatttatgatgaagtcgctcatgatgaaagttctgatgatgtcactgctcgaattttggttcaaggcaatcaagttggctgccttctaggaaaaggtggctccattatacaacaactacgaagtgatactggtgctgggatccgtgtcttgtcatctgaaaaccttccccagtgtgcacttcaaagtgatgaactggtgcagatatctggagcaccatctcttgtaagaaaagctctatatgaaatatctactcgtctccatcagcatcctcgtaaggaaaatagacctcttgaacaaataatagatgcaagcacacaaaggaaacacgagtctccaacactgcaacatgaaaatccaatgttgccgcacctgcatagtcatcatccacctccaatacccctgcttgacccatacagaagtggacctcagtatcctgttagtgaaactgaagagttttctatcagaatcctatgtgcttctgagctcattggttcagttattgggaaaagtggggctaatgttaggcgggtagagcagcagactggtgctcgcattaaagttcaagagattgacaaagatgcttctggagaaaggctgatcattgtttcatctaacgagataccaactgaaccaatatccccaacaattgaggcactcattttgctccacgataaagtgattactgaaatgagaagacgaactggggctgaaattcgagtttactcgaaggcagataaaccaaaatacttgtcttttggtgatgaacttgtgcaggttgcagggcctccagctattgcaagaggagccctcacagagattgcttcgaggcttagaactaggactttgagagatacaagtactgccaataatcctccaccttttgccccttccgatgatcctactgtcgatatgcctagcagaaaattaacactatatggagggcctaccaatgatacaccgtatggaaggcctgccaatgatccactgtatggaaggcctgccattgatccaccatttggaagacctaccaacgatcgaccatacggaaggcctgccatcgttccaccatttggaagacctaccaatgatccaccatatggaaggcctgccaatgatccaccatatgaaaggcctaccaatgatccaccatatggacgaccttccagtactatagcatatggaagaccaaacagaagtgcacctcgtgatccttcagatgcatatcctgtagactacttctctaaaagagaacatcctagtggaggccctatgtttactagtaatgccccatcagctgcttatgagagatatgcagcacccacacactttcctactagagaacctccctcaactttcagtcatcgttcctatcgtgaccacatgcctactgatagctactctagtaggggtacacagaaattagacatcacgagagatggaaattcagatgcttatgattatacagaggtacatctttgccgtgagcttccctcttttgcaaatggccatcacctaaaattttcattagaagcttgagactttacacatgactgttccactgtccctattctgttccataatttgctggcactactgaacattggggaaacgttatatgttggtgtcttagcttctgtggcagtaatgttcaccctataatgtggtcacactgtcacagtggtgcaactcttttcatttgttgtcacttgcatcttggttcaatatatatctggctgttggatgtactctgctgcttttagtttcaatcggtttttcttgatattatctatgcctaccagaacatctcatattctgtatatatttaaattttatcattgcacaggctgctggacaaattcatggactggaggactatagaggactgccaagtgcttctggaaggttctcgagcactattgaactaaggattccaaatagttctttggagtctattgttggtgttggcggggtcaatttagcagagatacgtcagatttctggtgcaagactgaggctacatgaggctcatgctggttcttctgagtctgtggtggagatccagggcacactggaccaagcaaaagctgcgcagagcctcctggagggctttatcagcgcgaacagcaggcagcagcaatcccattcttctcgcatgccactttacccaagatggggatagcttctggttgtggcaggggaaaaccgagtcagcagggttggctggagttatctcagactgcagattagatgcatcgatgatgttaatggtagctgtttaaattgaccgtgcaagcatgataacttatattatgccataggacaagtaatgctgattctctcatgaaatactaagtgacaagctgtctctgtagttgtatttgtttctgaatgtttgaaccctactgttacaacggctgctattttaggtcagatttcagaggccggataattatgttatctgcagagttgggccaaaaaaaaaagctcaatctggttgagactggcttcacccatgccgtttcatttttagaagttacagcatctctgcaaaatatatgggtaaggcctcttggaacgcatgaatttcatagaaatcagtttattttctcagaaaaaacatgggaaacaggggaaaaaaatcccacgttccaagaggcctaaagtttgtgtctgtttagatcctgataatatgggagctaccaacatttgat

SEQ ID NO: 48429 - DNA, 3325 bp, Zea Mays
cacggactctgagtctctgacgctgccttttgctctccccttccaccccgtctgcccgcgcgcgctgtctcgtggcgacaactgggcgaccgccgccgccgtcgctgccgccgctacgccaagaagctaggtcttcatcggtcccttcgtcgagattttctccggagacaagcacccagcaggggactacaagattgattttgatggattatgacaagtctagaagaagtaactccaaaaagaggagacattccaattctgatgacggaaagaggaaacggttgagctctaggcatgatgacacatctatgtcctctgagccaattgaaaccatctacaggatattgtgcccggcaaaaaagataggcagtgtcttgggaagaggtggtgacattgttaaggcccttagagaggaaactaaagccaagataagggttgccgattccattcctggtgcagatgagagagtaattatcatcttcaattaccaaaatcaacctgaacttactgatgaagcagctgaaaaacaaattagtgatggcttagggaacatgaaaccccattgctttgcccaagatgccttattgaagatacatgataagattgtggctgatgaaatttatgatgaagtcgctcatgatgaaagttctgatgatgtcactgctcgaattttggttcaaggcaatcaagttggctgccttctaggaaaaggtggctccattatacaacaactacgaagtgatactggtgctgggatccgtgtcttgtcatctgaaaaccttccccagtgtgcacttcaaagtgatgaactggtgcagatatctggagcaccatctcttgtaagaaaagctctatatgaaatatctactcgtctccatcagcatcctcgtaaggaaaatagacctcttgaacaaataatagatgcaagcacacaaaggaaacacgagtctccaacactgcaacatgaaaatccaatgttgccgcacctgcatagtcatcatccacctccaatacccctgcttgacccatacagaagtggacctcagtatcctgttagtgaaactgaagagttttctatcagaatcctatgtgcttctgagctcattggttcagttattgggaaaagtggggctaatgttaggcgggtagagcagcagactggtgctcgcattaaagttcaagagattgacaaagatgcttctggagaaaggctgatcattgtttcatctaacgagataccaactgaaccaatatccccaacaattgaggcactcattttgctccacgataaagtgattactgaaatgagaagacgaactggggctgaaattcgagtttactcgaaggcagataaaccaaaatacttgtcttttggtgatgaacttgtgcaggttgcagggcctccagctattgcaagaggagccctcacagagattgcttcgaggcttagaactaggactttgagagatacaagtactgccaataatcctccaccttttgccccttccgatgatcctactgtcgatatgcctagcagaaaattaacactatatggagggcctaccaatgatacaccgtatggaaggcctgccaatgatccactgtatggaaggcctgccattgatccaccatttggaagacctaccaacgatcgaccatacggaaggcctgccatcgttccaccatttggaagacctaccaatgatccaccatatggaaggcctgccaatgatccaccatatgaaaggcctaccaatgatccaccatatggacgaccttccagtactatagcatatggaagaccaaacagaagtgcacctcgtgatccttcagatgcatatcctgtagactacttctctaaaagagaacatcctagtggaggccctatgtttactagtaatgccccatcagctgcttatgagagatatgcagcacccacacactttcctactagagaacctccctcaactttcagtcatcgttcctatcgtgaccacatgcctactgatagctactctagtaggggtacacagaaattagacatcacgagagatggaaattcagatgcttatgattatacagaggtacatctttgccgtgagcttccctcttttgcaaatggccatcacctaaaattttcattagaagcttgagactttacacatgactgttccactgtccctattctgttccataatttgctggcactactgaacattggggaaacgttatatgttggtgtcttagcttctgtggcagtaatgttcaccctataatgtggtcacactgtcacagtggtgcaactcttttcatttgttgtcacttgcatcttggttcaatatatatctggctgttggatgtactctgctgcttttagtttcaatcggtttttcttgatattatctatgcctaccagaacatctcatattctgtatatatttaaattttatcattgcacaggctgctggacaaattcatggactggaggactatagaggactgccaagtgcttctgggttctcgagcactattgaactaaggattccaaatagttctttggagtctattgttggtgttggcggggtcaatttagcagagatacgtcagatttctggtgcaagactgaggctacatgaggctcatgctggttcttctgagtctgtggtggagatccagggcacactggaccaagcaaaagctgcgcagagcctcctggagggctttatcagcgcgaacagcaggcagcagcaatcccattcttctcgcatgccactttacccaagatggggatagcttctggttgtggcaggggaaaaccgagtcagcagggttggctggagttatctcagactgcagattagatgcatcgatgatgttaatggtagctgtttaaattgaccgtgcaagcatgataacttatattatgccataggacaagtaatgctgattctctcatgaaatactaagtgacaagctgtctctgtagttgtatttgtttctgaatgtttgaaccctactgttacaacggctgctattttaggtcagatttcagaggccggataattatgttatctgcagagttgggccaaaaaaaaaagctcaatctggttgagactggcttcacccatgccgtttcatttttagaagttacagcatctctgcaaaatatatgggtaaggcctcttggaacgcatgaatttcatagaaatcagtttattttctcagaaaaaacatgggaaacaggggaaaaaaatcccacgttccaagaggcctaaagtttgtgtctgtttagatcctgataatatgggagctaccaacatttgat

SEQ ID NO: 48430 - DNA, 2160 bp, Zea Mays
cacggactctgagtctctgacgctgccttttgctctccccttccaccccgtctgcccgcgcgcgctgtctcgtggcgacaactgggcgaccgccgccgccgtcgctgccgccgctacgccaagaagctaggtcttcatcggtcccttcgtcgagattttctccggagacaagcacccagcaggggactacaagattgattttgatggattatgacaagtctagaagaagtaactccaaaaagaggagacattccaattctgatgacggaaagaggaaacggttgagctctaggcatgatgacacatctatgtcctctgagccaattgaaaccatctacaggatattgtgcccggcaaaaaagataggcagtgtcttgggaagaggtggtgacattgttaaggcccttagagaggaaactaaagccaagataagggttgccgattccattcctggtgcagatgagagagtaattatcatcttcaattaccaaaatcaacctgaacttactgatgaagcagctgaaaaacaaattagtgatggcttagggaacatgaaaccccattgctttgcccaagatgccttattgaagatacatgataagattgtggctgatgaaatttatgatgaagtcgctcatgatgaaagttctgatgatgtcactgctcgaattttggttcaaggcaatcaagttggctgccttctaggaaaaggtggctccattatacaacaactacgaagtgatactggtgctgggatccgtgtcttgtcatctgaaaaccttccccagtgtgcacttcaaagtgatgaactggtgcagatatctggagcaccatctcttgtaagaaaagctctatatgaaatatctactcgtctccatcagcatcctcgtaaggaaaatagacctcttgaacaaataatagatgcaagcacacaaaggaaacacgagtctccaacactgcaacatgaaaatccaatgttgccgcacctgcatagtcatcatccacctccaatacccctgcttgacccatacagaagtggacctcagtatcctgttagtgaaactgaagagttttctatcagaatcctatgtgcttctgagctcattggttcagttattgggaaaagtggggctaatgttaggcgggtagagcagcagactggtgctcgcattaaagttcaagagattgacaaagatgcttctggagaaaggctgatcattgtttcatctaacgagataccaactgaaccaatatccccaacaattgaggcactcattttgctccacgataaagctgctggacaaattcatggactggaggactatagaggactgccaagtgcttctggaaggttctcgagcactattgaactaaggattccaaatagttctttggagtctattgttggtgttggcggggtcaatttagcagagatacgtcagatttctggtgcaagactgaggctacatgaggctcatgctggttcttctgagtctgtggtggagatccagggcacactggaccaagcaaaagctgcgcagagcctcctggagggctttatcagcgcgaacagcaggcagcagcaatcccattcttctcgcatgccactttacccaagatggggatagcttctggttgtggcaggggaaaaccgagtcagcagggttggctggagttatctcagactgcagattagatgcatcgatgatgttaatggtagctgtttaaattgaccgtgcaagcatgataacttatattatgccataggacaagtaatgctgattctctcatgaaatactaagtgacaagctgtctctgtagttgtatttgtttctgaatgtttgaaccctactgttacaacggctgctattttaggtcagatttcagaggccggataattatgttatctgcagagttgggccaaaaaaaaaagctcaatctggttgagactggcttcacccatgccgtttcatttttagaagttacagcatctctgcaaaatatatgggtaaggcctcttggaacgcatgaatttcatagaaatcagtttattttctcagaaaaaacatgggaaacaggggaaaaaaatcccacgttccaagaggcctaaagtttgtgtctgtttagatcctgataatatgggagctaccaacatttgat

SEQ ID NO: 48431 - DNA, 2957 bp, Zea Mays
cacggactctgagtctctgacgctgccttttgctctccccttccaccccgtctgcccgcgcgcgctgtctcgtggcgacaactgggcgaccgccgccgccgtcgctgccgccgctacgccaagaagctaggtcttcatcggtcccttcgtcgagattttctccggagacaagcacccagcaggggactacaagattgattttgatggattatgacaagtctagaagaagtaactccaaaaagaggagacattccaattctgatgacggaaagaggaaacggttgagctctaggcatgatgacacatctatgtcctctgagccaattgaaaccatctacaggatattgtgcccggcaaaaaagataggcagtgtcttgggaagaggtggtgacattgttaaggcccttagagaggaaactaaagccaagataagggttgccgattccattcctggtgcagatgagagagtaattatcatcttcaattaccaaaatcaacctgaacttactgatgaagcagctgaaaaacaaattagtgatggcttagggaacatgaaaccccattgctttgcccaagatgccttattgaagatacatgataagattgtggctgatgaaatttatgatgaagtcgctcatgatgaaagttctgatgatgtcactgctcgaattttggttcaaggcaatcaagttggctgccttctaggaaaaggtggctccattatacaacaactacgaagtgatactggtgctgggatccgtgtcttgtcatctgaaaaccttccccagtgtgcacttcaaagtgatgaactggtgcagatatctggagcaccatctcttgtaagaaaagctctatatgaaatatctactcgtctccatcagcatcctcgtaaggaaaatagacctcttgaacaaataatagatgcaagcacacaaaggaaacacgagtctccaacactgcaacatgaaaatccaatgttgccgcacctgcatagtcatcatccacctccaatacccctgcttgacccatacagaagtggacctcagtatcctgttagtgaaactgaagagttttctatcagaatcctatgtgcttctgagctcattggttcagttattgggaaaagtggggctaatgttaggcgggtagagcagcagactggtgctcgcattaaagttcaagagattgacaaagatgcttctggagaaaggctgatcattgtttcatctaacgagataccaactgaaccaatatccccaacaattgaggcactcattttgctccacgataaagtgggcaggtgattactgaaatgagaagacgaactggggctgaaattcgagtttactcgaaggcagataaaccaaaatacttgtcttttggtgatgaacttgtgcaggttgcagggcctccagctattgcaagaggagccctcacagagattgcttcgaggcttagaactaggactttgagagatacaagtactgccaataatcctccaccttttgccccttccgatgatcctactgtcgatatgcctagcagaaaattaacactatatggagggcctaccaatgatacaccgtatggaaggcctgccaatgatccactgtatggaaggcctgccattgatccaccatttggaagacctaccaacgatcgaccatacggaaggcctgccatcgttccaccatttggaagacctaccaatgatccaccatatggaaggcctgccaatgatccaccatatgaaaggcctaccaatgatccaccatatggacgaccttccagtactatagcatatggaagaccaaacagaagtgcacctcgtgatccttcagatgcatatcctgtagactacttctctaaaagagaacatcctagtggaggccctatgtttactagtaatgccccatcagctgcttatgagagatatgcagcacccacacactttcctactagagaacctccctcaactttcagtcatcgttcctatcgtgaccacatgcctactgatagctactctagtaggggtacacagaaattagacatcacgagagatggaaattcagatgcttatgattatacagaggctgctggacaaattcatggactggaggactatagaggactgccaagtgcttctgggttctcgagcactattgaactaaggattccaaatagttctttggagtctattgttggtgttggcggggtcaatttagcagagatacgtcagatttctggtgcaagactgaggctacatgaggctcatgctggttcttctgagtctgtggtggagatccagggcacactggaccaagcaaaagctgcgcagagcctcctggagggctttatcagcgcgaacagcaggcagcagcaatcccattcttctcgcatgccactttacccaagatggggatagcttctggttgtggcaggggaaaaccgagtcagcagggttggctggagttatctcagactgcagattagatgcatcgatgatgttaatggtagctgtttaaattgaccgtgcaagcatgataacttatattatgccataggacaagtaatgctgattctctcatgaaatactaagtgacaagctgtctctgtagttgtatttgtttctgaatgtttgaaccctactgttacaacggctgctattttaggtcagatttcagaggccggataattatgttatctgcagagttgggccaaaaaaaaaagctcaatctggttgagactggcttcacccatgccgtttcatttttagaagttacagcatctctgcaaaatatatgggtaaggcctcttggaacgcatgaatttcatagaaatcagtttattttctcagaaaaaacatgggaaacaggggaaaaaaatcccacgttccaagaggcctaaagtttgtgtctgtttagatcctgataatatgggagctaccaacatttgat

SEQ ID NO: 48432 - DNA, 2952 bp, Zea Mays
cacggactctgagtctctgacgctgccttttgctctccccttccaccccgtctgcccgcgcgcgctgtctcgtggcgacaactgggcgaccgccgccgccgtcgctgccgccgctacgccaagaagctaggtcttcatcggtcccttcgtcgagattttctccggagacaagcacccagcaggggactacaagattgattttgatggattatgacaagtctagaagaagtaactccaaaaagaggagacattccaattctgatgacggaaagaggaaacggttgagctctaggcatgatgacacatctatgtcctctgagccaattgaaaccatctacaggatattgtgcccggcaaaaaagataggcagtgtcttgggaagaggtggtgacattgttaaggcccttagagaggaaactaaagccaagataagggttgccgattccattcctggtgcagatgagagagtaattatcatcttcaattaccaaaatcaacctgaacttactgatgaagcagctgaaaaacaaattagtgatggcttagggaacatgaaaccccattgctttgcccaagatgccttattgaagatacatgataagattgtggctgatgaaatttatgatgaagtcgctcatgatgaaagttctgatgatgtcactgctcgaattttggttcaaggcaatcaagttggctgccttctaggaaaaggtggctccattatacaacaactacgaagtgatactggtgctgggatccgtgtcttgtcatctgaaaaccttccccagtgtgcacttcaaagtgatgaactggtgcagatatctggagcaccatctcttgtaagaaaagctctatatgaaatatctactcgtctccatcagcatcctcgtaaggaaaatagacctcttgaacaaataatagatgcaagcacacaaaggaaacacgagtctccaacactgcaacatgaaaatccaatgttgccgcacctgcatagtcatcatccacctccaatacccctgcttgacccatacagaagtggacctcagtatcctgttagtgaaactgaagagttttctatcagaatcctatgtgcttctgagctcattggttcagttattgggaaaagtggggctaatgttaggcgggtagagcagcagactggtgctcgcattaaagttcaagagattgacaaagatgcttctggagaaaggctgatcattgtttcatctaacgagataccaactgaaccaatatccccaacaattgaggcactcattttgctccacgataaagtgattactgaaatgagaagacgaactggggctgaaattcgagtttactcgaaggcagataaaccaaaatacttgtcttttggtgatgaacttgtgcaggttgcagggcctccagctattgcaagaggagccctcacagagattgcttcgaggcttagaactaggactttgagagatacaagtactgccaataatcctccaccttttgccccttccgatgatcctactgtcgatatgcctagcagaaaattaacactatatggagggcctaccaatgatacaccgtatggaaggcctgccaatgatccactgtatggaaggcctgccattgatccaccatttggaagacctaccaacgatcgaccatacggaaggcctgccatcgttccaccatttggaagacctaccaatgatccaccatatggaaggcctgccaatgatccaccatatgaaaggcctaccaatgatccaccatatggacgaccttccagtactatagcatatggaagaccaaacagaagtgcacctcgtgatccttcagatgcatatcctgtagactacttctctaaaagagaacatcctagtggaggccctatgtttactagtaatgccccatcagctgcttatgagagatatgcagcacccacacactttcctactagagaacctccctcaactttcagtcatcgttcctatcgtgaccacatgcctactgatagctactctagtaggggtacacagaaattagacatcacgagagatggaaattcagatgcttatgattatacagaggctgctggacaaattcatggactggaggactatagaggactgccaagtgcttctggaaggttctcgagcactattgaactaaggattccaaatagttctttggagtctattgttggtgttggcggggtcaatttagcagagatacgtcagatttctggtgcaagactgaggctacatgaggctcatgctggttcttctgagtctgtggtggagatccagggcacactggaccaagcaaaagctgcgcagagcctcctggagggctttatcagcgcgaacagcaggcagcagcaatcccattcttctcgcatgccactttacccaagatggggatagcttctggttgtggcaggggaaaaccgagtcagcagggttggctggagttatctcagactgcagattagatgcatcgatgatgttaatggtagctgtttaaattgaccgtgcaagcatgataacttatattatgccataggacaagtaatgctgattctctcatgaaatactaagtgacaagctgtctctgtagttgtatttgtttctgaatgtttgaaccctactgttacaacggctgctattttaggtcagatttcagaggccggataattatgttatctgcagagttgggccaaaaaaaaaagctcaatctggttgagactggcttcacccatgccgtttcatttttagaagttacagcatctctgcaaaatatatgggtaaggcctcttggaacgcatgaatttcatagaaatcagtttattttctcagaaaaaacatgggaaacaggggaaaaaaatcccacgttccaagaggcctaaagtttgtgtctgtttagatcctgataatatgggagctaccaacatttgat

SEQ ID NO: 48433 - DNA, 988 bp, Zea Mays
cttaaaccaattgaaagtatttttaagtatgtatgactgctttcttttagtttaacattttggactacaattgcatcaccacactcaccgcaccaccgaccactgcctccgtacgcgtccctctggcggaaaatcggtcctagtgccgagctcgttttgtttggatcttctgtatatctattaaggaggcttctccatctcctcggagcagcaaggctgtgcagcaatggagaacgataacagcaacactcaatttgcaccattgagagagactccgtttgccctccgtggtgctcttggtagttcaagctcatatcttgagcaagccaggggctacacatcttcccctgtagcagctctgcgcccaaagatgtctacacctggaaatcgactcctgcatacgagctgccccctgtcatctgctgtagcgaaccgcccgctgtcgccccatcttcctctgaagaagccacagttcagcgctactttctctatctcgcaccgtatcttcggtgtcgcgctgggagttgccatcatatccgtccccctcgccaccaagttcagcctgatgtttggcgtttgagagcgatttgctgcatcttatgaggaactgcatttccccgttcctgtgactgtttcatcgttcgtctgggttaccttgcaacacaactttaggtgcagttggaataacatctttgtcatgctgacagacttctgtaatacagtaataagtaaaactataaaatatcagtgcaaggaggtttgccccattatggatgtacatggtcatgaggtctgcagcctgcaggtttggctgggaaatagttgattatcatcacaacatattaactgcatggtgcgtatcttcgctacgtgcccttaagctcgtctggaaaatttgtgaaaattgttaaacgtaacgtttctcaaaatatacgtatgagctatgttttctaggcatcactgttattgtgaaatgataaatttgttc

SEQ ID NO: 48434 - DNA, 1029 bp, Zea Mays
atggggcagcagtcgctgatctacgtgttcgtggcgcacgcaacaagttcacctacaactgcgatagccacaccttcaactacctcatcgaggatggattcggggagccggagttacaagagcacgaaggtggcagcgaagaggctggaagaggcagcgctctcctgcaaaggggacgaacgggtgcagctgctgcgccggtggctcgtcgcgctcaaggagacccagcgcgtgaccatggtggttcgggagccgcaacttggggacaatccggaccaggctgcgtccctgctggatttgtacatcgattacgacagcggtgtggagccgatgaactttttccatgtcttcctctacagtcaagccctcgagtgtgttgttctctccttggcaaaacgtgacgagctgcttcagtttgctcagggtgcgatctcagggctaaagataaatgctgacattgcaagattagataatgaaattactcagttgcaacagcagataaagtcaatggatgcgctccatgtgtcgatctcttcgtcagtgaagagcatccaccagccacaagggcccgtcgatctgttttggtgtacaatgtggatgaaaacaacatggagctctggcttatgggggcttctcgacgccagcggagcccgtgggaattcacaagagcaatatggtacaccaatgccacacattggacaaacaacagttgaagttgatcttttgaaatatggtgtgatagaaggtgatgaatcatatggcatgaatcttacaaaggaacagagagtagagaaaattgagtcacaaaaacttgaaaaatatgaagccaaacatgataagagacatgacttgaaagttgatcaaagtgtacaggaagaatacataaatgcatattatgaggccttgaggaaaaagttggaagagaaagaagcaaaaagcagaatgcaccatgaaggcaagatttttgtccctgatgctcaaagggaatgccaagttggcaataaatacaagcaggatgatgatgaataa

SEQ ID NO: 48435 - DNA, 1151 bp, Zea Mays
atggccctccttgcccttaaagaagctccaccattctgcctacagaggttatacaagcataaggatgctttgagacaactttttacgcggggaagaaaacttagactttgctttctatacgattctggcatgctgcggaggattgcttggacatctcagcctttgttaattgtgttgaggattgttaatagggatgagaagcctgtcatgccagagatttctgctgctatggattttactatagaagagataaatacatctcttggaagcaagcctagggtactaaagaaggtaatggatatcattgacacgaggtggttgcaccaaatggagcaaaaactacatggggctgtattgtttttgaatccaaataagttttttgacatcacgaatgatgctgaccatgcttctaggctcctaatcactttcaattatgtgcttgaaaagatggtaaccgatgatgatgtgcttgaaaaaaataagtaaccaagcggatgactatgggaaaatgagaagctttggaaagcaatggaattgaagcaacaaaaaaccctcgtaagtaatttaaaattctaatgcatttattttagttagttttgaacatgctagttctctaacatagatataaacatttcagttgttggtgggatgcttttggcggcctgaattgagagcttcaaaattttgcaagacacatccttggcttctgtagttcagcctcaagtagtctggttgtgaaagcaattggactatcttcaaatttgcaagtaactaagcctatttgagttcttgtgtttctttgatagttggttagtggttactcattagtgactacttttctagatccattgaaagaagcgaaccagttggagcaccaaaggttgaagattatggaaagtcacttgaaggccgcaatttgtctaggacgactaggacatactcatcgacgtggtttgacttctacctcaactaatgaagaagaagagcaaggatcggaagaagaggaagcctatgatctggacattgttgttgccgatgatctagatgttgaggatgactatggccaaccaccgcctactcctccccatgatggtactccaattgatgagaatgagggtggcctaaacgatatgggcttagatatcgattag

SEQ ID NO: 48436 - DNA, 905 bp, Zea Mays
ggcctgctaagaggtgcaagaaatcaagttatgtttgatgcattgtgaagatggtaggcaggtgtaacttcagagtacagcaaaaagaaccaacgcatagtagcacacgactacacgacccctgaacataaactgacctaaaaccttcaggcatcaactttctggtcatggattgtgtgtcatgcaagcatattagctagcaacactacacatatgagcaaaaatattactccttcagttttaaatcataagacattttgtcttttctacataagtaatttttgcgcttagatgtacattatgtttagatacatatatagtaaaagcgatgtatgtagaaaagccaaaacgtcttataatttaaaacgaatggagtataaagcacgcaaaatgcagagtaggagcggtttctgatcaggagtctgaacactaaataactacaaactgctcatcaccatatcgcacagttccttctagtgtttgttcacttgaatgaatgacaaaagtacagtctaacacatgaatacatgactgtcggaaaagctactcgagtatcgcattgaatgatgttaacgatattccctccattccaaattataagacattttggttttctagatacgtagtttttattatgtatgtaatgtctggatctaaatacatagtagtttttgttatgtatgtaatgtctggatctaaatacatagtaaaacaatgtacctataaaagccaaaatatcttataatttggaacagggagaatacttagaatgggcaagcaaggtacctttctagctatggcacaagcacctcgtaaatgcttaaccttaagaacctttcagtactagatgaaatgcagtttacctttaactacttttagaagggaactagtcaggaagcttcaac

SEQ ID NO: 48437 - DNA, 2462 bp, Zea Mays
taggcgcccacctccagtcgtcgaggcctccagccgtcgaggcctgcgccgccctcctctggccgccgcccaggcgtccacctctggctgccgcccacctccagccgtcgaggcctctggtggtgagtcatgtgtcgcccctctgcacgccctgacaagtctcagcaacctgcgccgccctcacaagtcacaacaagctctagggatatggaagatgcatctgcagatcgaccacaaggggagtcaggaagccagcagccatatgatccaactaaagatcctaagagaaaggcaaaatcaaatgatccggcatggaactattgttattggccggatttgaacaaaaaagatgtggtgaagtgcatcctttgtggaaaaattgttcattcaggtgttagaaggttgaagcagcaccttgttggtagtcatggtgatgttgctaagtgcccgaagacaacatcggcaatcagcaaagagatgagtgattatttgaagaagaatgctagacagaagcctattgagttggatgatgataaagagggtgaaaagacgatgaagttgaagtatttggagaaggggaaagtagagcatctcattcagttgttcagcccagttccggaacagcccaaaagagaaggctctcagcggaagcaagccaaaacaatcaacacgtgtcgaagtcttctaagtcaattgcatccatgcttcgcaaagcacctgaggatgtggttcatgagaggcattgcaagggcaacactcaaactacattgcagcgaaagagcaaggaggagaaggaaagaacagatatgtatgttgctgattttatttatgagtgagtctacagttagagaaggggatgatcttgcatgggctcatgtggatgatgcaatcggtgcttctagttcacttcaaggtcgcaacttcccaagaagagcccgatatgagtctgtttattcaaggcgttgtcaagctgctgctacacaggaggagagagttatggaagaggaagagcaaggcaacgagggcaatgaacaagatgatgaagagtacatgcctaatgatgatgaagaagtggatgactttggtgaatccccacataacagtccaactcaagctggtgctggtcgtgaagaaaatgcaatggatgatcttgatttgggagatatttagggtatctagtatctatctagctgcagcagcagcttagctatctaatggagtttatttcctttcaagtttgaactatattttcttgctatttgttttccaatttgaactatatggctgttatgacttatgagtttatgacttatcacttatgtggctgatttggttcagtttgaggcttcaaatgaggtaagacttgctgtttattttagttttgttcaatttcagacttcaaaagaggtaaaacatcctctttcttcatatataattgatatattgtctatatgaagccattatataggcaaaacagccactatattggcaagtcgacgactagtcgactgacttatcgactagtcaccaagtcggtaccttgtcgactcgactcgacttaccgacttgaaaacctggctccagtctatccgttcgtgttgctaacgttacggctgcaggggctgttagagtatattaggcaactcttgatatggttgggttaagattgattggattgattgtaatcccgagataacattccttatctccagccatgtactcctataaattcaccccagggcctcaatgcaacattatcatacaaaatctccccttcctacacttatcaatgatatagcataaagttaggctgcatcagcacttggaaaaaaatttatgaatgaaaccaacagagaaggctgtccaaaaatgtatatgatatccaaaggagaaaaggaaaaggctccattctctgatcattttggtgacttgggaaacctagaaacataggaacgattgtgtggtcaatagggccaacccagcggttgggaccattctactggccatagctaatgagtgtgtgttatggtgtgctgctggagctgtagggcttcagaaactgtatagaggcaggaccttgggtgtttcccaaccctactcggcttgtgtgtagtgtggtcctttttttgtgggacaggggtttcataccctgtgttgtactatcttctcttctataaatgagatgacgcacaattatcttgcatgtttgagaaaaatgtgtctgatatgatgaacactcttcttagcttgaagttggcgagtgaaaattattaggatatgtatctatcaggatcaatcagagcctgattagcaattgattgtaatcccctagattggctagctgccttgtatagactaggattaccttctatctatagcctaggtctgtttccttgtacagggaatagccttccttacatgtaccttccatacatgcctattggctatatatgacaggctcc

SEQ ID NO: 48438 - DNA, 2658 bp, Zea Mays
actgaaagtatggtgccggtcacctgagctgctgccgacggtggtggatctccttgctgaagagccgatggtctgtggagaggatgggggctgggttcctagcacgttggtgttccctgtttctgtggtggttcttcattctgatggaagttcagcttccggtggggatcctccagcgccaccccccccttcgggctttgtcgacgaagatagtgatcatgagcatcatgtggggcggccgggacgccctgcgtcttctgttcgggttccaattcatttgcgtctgggtcagcgcagtcgttctgggtaggtggatgacatgtctgttgaggctgttcaccaagatttggtggaggtgggatcagttgatgctccagctctcccgattgtttcggttgaggagcgggaggcgcctagtcaccctccagatttgggatcagttgatgccctggctctcccggaagtttcggttgcagagctggaggcgcctggtcaccctccagtgttagcgttggatctggctgaggatttgggggtcagttgtcaggaggactggtcttcgcatgttgttatctcgccggctgggtcttgcttggacaatcctttggtgggggcccctatgtctgacttggtagaggctgtcactgatgggcagcatggttctgggctctcctatttgctgaccgatggtgtttctgctaatgtggaggaggcagtcactgctgggcagcatggtttcgggttctcccaattggtggctgttggttctcctgctgttgtctctgccagggtgcggaggtttgagtattgtcagtcttcccgggctgatagatggagaacaaagccacccgtgtttaaagtttattccagaagaagattatctcaggctcaggtggtccaggaagaccttttactgcaatctgtggtggaaatggttccacctttggaggcacctttggaggagttcaagtccgcagttactaagccttctgatggcttgttaccaccccctccccaccgaaggaccaaaagcaggaaaaagaccatgccaagtgattttcggccacggagaagtaggagggtggccaaattccctccagaacttggatccaatgcggctgcacaagtctgtaggcatctaggtttttgtgatgacatggagaatatctctctcgaagatgcctgcacttatgcaaagttatttgattccgggctttcgagtgcacatgtggctgctttggcagctttgtttggttgggaggtccctcaggtgggggcgatctgatttgtttccaatggagaatagctgttttcttatttggaatgtgaggggtctaaatgatcgtgccaggagggactcggttaaatctctggtccttgatatcaagccttccattgtttgtctacaggaaaccaaattgtgtgctatctcggactttgacatgttgtctattcttgggactggtttcagtaattttgtgtatagtcccgcccaggggactagaggaggaatactaattgcttggcgtgatgggtcttttgtctctgtggcttcggttgtgaagaatttctctgtatcagtccagtttcaggatgagtctggttcttcctggtggttcacaggtgtgtatggacctcaccaggatatttttaagcaggagtttatccatgaattgagatcggttcgtgatgaatgtgtggggccatggtttttatgtggggattttaatatgatcctccgggaggaagataagaataattccaacatcaataggctaatgatgggtcgcttcagggggtttgtcaattctatggagctaaaagagattcctttgattggcagaagattcacttggtcaaatcagagggaggtgcctactcttgtgaaattagatcatgttttctgcactgcggactgggaggatttttttccagactgttctcttcacagtaatgctactgctatctcggatcactgtcccctaactcttagaattagagagggggcgtggggaggagaagatttcactttgagagtttttggccaaaaatcccgggatttttggaggtggtggctgcctcgtggagtctacctctgcaggagttttgtccatttgagaagatagcactgaagtttaaaagattagctaagtgtttgcagtcctggggtcacaaagaggtggggaatgtcaatgcccagttgggacttgcccgtgaggttttgcataggctagagatggcgcaagatatcagatccttatccagggaggagctttggctatgggggcagctgaaacaacattgtctagttttggcgtctttgcaaagaactattgcacgtttgcggtccagaattcaatttttaaaagaaggagatgccaatactcatttctttcaccgacaggctgtttaccgtaaaaaaaggaagttcatttccaatctagaggaggatggaagggtgtacacaaatcatgaggatattcaaggagttctggacggtttctttaccaaccttctaggcactgattttccaaggtctgttactattgatttgttgggctgtcataggcctgcagcggatctcagtgagctggataaccctttctcggagaaggaggtgagggatgcgattgctgacctgccttctgacaaggctcc

SEQ ID NO: 48439 - DNA, 2225 bp, Zea Mays
ttttgtgagagggagatcaattcatgataattttatgctggttcagcagtctattaagtcgctgcacaagaggaagattgcgggtctattcttaaaattagatatttcaagggcattcgattccgtgtcatgggccttcattattgaaattcttgtccatcttggctttggtccaatctggcggaattttatttcctccctattgttcacgtcttctacgcaagtacttcttaatggctcgcctggtgctcgtattgctcatcggtgaggtcttcgtcagggtgatcccctttctcctatgttgtttgtgatggtcatggatgttcttaatagtctgttcaggacagctgaaagcagggggctgttacaaggattggaggcagctgggattcggaataggctctcgatctacgctgatgatgtggtgctttttgttaaacctttggtggatgatctgaattgtgttagattgattttggattgctttggtgaagcaacggggctggtaacaaaatctgcgtaaaaagttttgctattccaattagatgtgaaggactggagagtcaggctggctgcaatatcttgcaatgcagttcgggatcctttccgtgcagctatttggggctgcctatctctgataaaaagctgaggaaaagggattttatggggtgggttaataagattgctgactggcttcccaactggaaggctcgtttgctgagtctggctggtaggacagcgttagtgaggcatgtgatttcggcaattccagtttatattcttatggccatgagtgttcccaaatgggtgatcaagtccattgataaactcaggagagggtttctatggaaaggaaggaagaatgttaatggcggaagctgtcttgttccttgggagatagtaactaggcctctcaagtatggcggtcttggagtttctaatttacaattcaaaagttgggctttacaggtgaaatggttatggctgcaaagaaccgatccgtccagaccatggcaaggaatgaatcttcctattcagcagcaagtgagacagtttttcaatctttcggtctttcatgtggtcggagatggaactagcactctcttttggtttgataaatggttgaatgggaaggctatctttgatattgcaccagaggttgtctgtttggtggacagtagagtcagctcgacccggacggttcctcaagctttggacaactggcgttgggttagggatattgggacttgggagtcatctttctatgcttgggctgcagcagtatttaaaattatgggatgagattggacaggtgactctttcacaagaggcggacaggcttgtttggagacacacgacttctgggcagttttcctcaaagtcttgctataatgctttcttcctgggatccattttctttgagccttggaaacgattgtggaagacttgggcccccccctaaatgcaaattttttctttggctggctataaggaataaatgttggactgcggacagacttcagaggagagggttacactacccagcgagttgccccctatgtgatcaagggcaggaaacaatccaacatatcctttgcaactgcagttttactagggaattttggcatctcattttgtcgtccatcgggcttggtaacttcactcctattgctgctgaacagtcctttgctgcgtggtgggagagggtctctaaaagagtccataggtgcaagaggaggggtttcaatagtgtcattatccttggagcttggtgcttgtggctctctcgtaatagggctgtttttgatggagtgagcccttccattaatttgacaaagaggttgtttctagatgagttgattagttggagtaaggcgggagcgaagcatttagacagtttgggaatttttgtcgctttaaatagggtctcgtagggcccgtcaggcttccccctggtgggtgaggcttgagggtttggtcttggtgttgtaattcggtccactttggacctttcctttcttaatataatgatgcgcagctctcctgcgctttcgagaaaaaaaaagctcaggtggtaggtacacaatttggaacataccggtaagaggatctgaagatataggcatctgaatacgactaaagtgggtaactccatgcagttttttctgaaccttgttatttcgtttgatgccaagttgtagtatctgcattagatacgttgaaat

SEQ ID NO: 48440 - DNA, 1166 bp, Zea Mays
ctatcgcccaccgatctgctcgccaaagctattcccttgctcacgcctcaccggagctttgtcagccagagattccgtggctgcatcgctgctcagcttgctagagtccttgcgtcacccgaagcggcgaagtacttgttatcgtcgtcgtcgagctccctacgtcctttcgttgcgtgcgacgctgcccagagccgagcccacgtcgtcgactccacgacaccgagattcctctgtccgcgcacttgttcctgctcgcggtgcgcctgccactctgcccgtcaacattgttatttgactcaccggaattcgtcgtgccgcatcgtcgacggagaccctctccctccactctacgtcttgctgctgttccaaggttagttgtccgcgcggccaagctagctgaggatacgaccaatgtaagttcagttggggcgagcgcaggagcggtcgtggtcagcgtggggacggtcggggcagtccgacgacggccatggtctccatgatggcggcgtgcgtgatcagagagacgttggtctgatcctttgagatatacaaacgagaaaccatgcataaggacataaatgacatttcagacgccagaaaaaataataaaaaaatatatgaaattgtattaaaatcaattggaagacgttcttagtgctggttttgcgaagtgaacatttcatatgacaaaagctttatttgggtattttagtattgatctcaatccacatgagtttaggtggattagagcgtaaattagtttaatttacactctaatccacctcaatacatgtggattaatgtcaataatagagtatctaaattaagcctaaaagatgttatttggactcccaaatatataattttctggtttttgttttgagaaattgggttctatttggaatctctaaagctaatagttaactgctaaaattagttttaggccccgtttgtttcgttgaaattgaattccattttaataattataatttagacaaaattaattaagttcatatatttatatatgtaatatatttgtatattatcctaaataatatgagagagataattatatactatatttatgttatagcgaagcaagtagaaaaatgtgctataagttgtacatcggaaaaatagtatgtaaatctatagaatcaatt

SEQ ID NO: 48441 - DNA, 1679 bp, Zea Mays
ccttgcgtcacccgaagcggcgaagtacttgttatcgtcgtcgtcgagctccctacgtcctttcgttgcgtgcgacgctgcccagagccgagcccacgtcgtcgactccacgacaccgagattcctctgtccgcgcacttgttcctgctcgcggtgcgcctgccactctgcccgtcaacattgttatttgactcaccggaattcgtcgtgccgcatcgtcgacggagaccctctccctccactctacgtcttgctgctgttccaagtagaggtgctgtgtcagtcgggctacccccagcctgggtggatgtttctgaagagatatctgcaaacatgcagagggcaaggacaaaaatgacggagttggctaaggcacatgccaaagccttgatgccgtcctttggcgatggcagagacgaccagcgagcaattgaggttctcacacatgagataacagacttgctgaaaaggtccgagaagaggctgcagaagctgtccatgaaagatttgtcagaggattcaaatgtccgaaagaatgtccagcgttcccttgctacagacctgcaaaacctgtcaatggagttccggaaaaagcagtcatcatatttaaagcagcttcgccaacaaaaagagggtcaggatggtgttgatttggaaatgaatatgaacgggacaaagtctacatttgaagacgatgagtttgatgatgtgggtttcactgagattcagatgtcaaaacttaagaaaagcgaagcattcactagagaaagggagagagaaattgagcaggttgttgaatcagtcaacgaacttgcacagattatgaaggatctttcagttcttgtgattgatcagggaaccatcatcgatcggatagactacaacatacagaacgttgcagcttcagttgaggaaggttacaaacaattgcaaaaggctgagaggacccagaagaaagggggcatggtgatgtgtgccactgtccttgtcattctgatcttcatcatgatagtccttctgattttgaagaccattttctgacatacttagctatctcattttaatggttgatgaatggtggccaagcacacaccacgctcatctattcatgtgagtgaggattgcaccatgcctgcatatcaagaacgccacaaattcatttgaatagcggcgatacgactcactgatctgaagatggaaccatcttgagtcttggccacaatttttgcatcgttgcagatgtagacatgccctattcatacaggactcttaattttagagagagaaaaatctgaagaggattgtttgacacgtttcaccttccagtttgccttggagcaaccgggttaggctggctgtgtatgcctctgtatagagtgagttgtatcatacatcagggtatcggaaatcagaaagtaggttcagttcctgtgtcatctcttttctgctttatgttgtctgcccttctattttgagctagctttgaagtggcatttcattgtaccatatcctaacaattgttctgacaactttcgcccgggtagtcggatatgcaatgagattttgtgctagtgtggcgaaagggcctccaggctatcatatcgctctgccgattaaccagcggtgtcctgctgctgccagtctaccatatcgctctgtcgaaagagcatcttcacgag

SEQ ID NO: 48442 - DNA, 1757 bp, Zea Mays
agaaactctaccaaaccaaactgcaccaaattctccggtccccgcctcagcgcctccgccatcgacatcccacccgcccgtcccctcgcggctcgcgcccgacggcccgaggcatggcgacgcggaaccgcacgccgctctaccgcaagtaccgcgacgcgctgcggcacgtccgcgcaccggccggggcgacgtcgtcgtcctgcgggggcgggggagggtcggtgatcgagatggcctcgctgctgcgctccgaccggccctacgcgcccctcagcatcgaagacccctccgcctccagtagaggtgctgtgtcagtcgggctacccccagcctgggtggatgtttctgaagagatatctgcaaacatgcagagggcaaggacaaaaatgacggagttggctaaggcacatgccaaagccttgatgccgtcctttggcgatggcagagacgaccagcgagcaattgaggttctcacacatgagataacagacttgctgaaaaggtccgagaagaggctgcagaagctgtccatgaaagatttgtcagaggattcaaatgtccgaaagaatgtccagcgttcccttgctacagacctgcaaaacctgtcaatggagttccggaaaaagcagtcatcatatttaaagcagcttcgccaacaaaaagagggtcaggatggtgttgatttggaaatgaatatgaacgggacaaagtctacatttgaagacgatgagtttgatgatgtggtccgttttattttggtctttacatgctgcatacctgattttgggtttcactgagattcagatgtcaaaacttaagaaaagcgaagcattcactagagaaagggagagagaaattgagcaggttgttgaatcagtcaacgaacttgcacagattatgaaggatctttcagttcttgtgattgatcagggaaccatcatcgatcggatagactacaacatacagaacgttgcagcttcagttgaggaaggttacaaacaattgcaaaaggctgagaggacccagaagaaagggggcatggtgatgtgtgccactgtccttgtcattctgatcttcatcatgatagtccttctgattttgaagaccattttctgacatacttagctatctcattttaatggttgatgaatggtggccaagcacacaccacgctcatctattcatgtgagtgaggattgcaccatgcctgcatatcaagaacgccacaaattcatttgaatagcggcgatacgactcactgatctgaagatggaaccatcttgagtcttggccacaatttttgcatcgttgcagatgtagacatgccctattcatacaggactcttaattttagagagagaaaaatctgaagaggattgtttgacacgtttcaccttccagtttgccttggagcaaccgggttaggctggctgtgtatgcctctgtatagagtgagttgtatcatacatcagggtatcggaaatcagaaagtaggttcagttcctgtgtcatctcttttctgctttatgttgtctgcccttctattttgagctagctttgaagtggcatttcattgtaccatatcctaacaattgttctgacaactttcgcccgggtagtcggatatgcaatgagattttgtgctagtgtggcgaaagggcctccaggctatcatatcgctctgccgattaaccagcggtgtcctgctgctgccagtctaccatatcgctctgtcgaaagagcatcttcacgag

SEQ ID NO: 48443 - DNA, 1614 bp, Zea Mays
agaaactctaccaaaccaaactgcaccaaattctccggtccccgcctcagcgcctccgccatcgacatcccacccgcccgtcccctcgcggctcgcgcccgacggcccgaggcatggcgacgcggaaccgcacgccgctctaccgcaagtaccgcgacgcgctgcggcacgtccgcgcaccggccggggcgacgtcgtcgtcctgcgggggcgggggagggtcggtgatcgagatggcctcgctgctgcgctccgaccggccctacgcgcccctcagcatcgaagacccctccgcctccagtagaggtgctgtgtcagtcgggctacccccagcctgggtggatgtttctgaagagatatctgcaaacatgcagagggcaaggacaaaaatgacggagttggctaaggcacatgccaaagccttgatgccgtcctttggcgatggcagagacgaccagcgagcaattgaggttctcacacatgagataacagacttgctgaaaaggtccgagaagaggctgcagaagctgtccatgaaagatttgtcagaggattcaaatgtccgaaagaatgtccagcgttcccttgctacagacctgcaaaacctgtcaatggagttccggaaaaagcagtcatcatatttaaagcagcttcgccaacaaaaagagggtcaggatggtgttgatttggaaatgaatatgaacgggacaaagtctacatttgaagacgatgagtttgatgatgtgggtttcactgagattcagatgtcaaaacttaagaaaagcgaagcattcactagagaaagggagagagaaattgagcaggttgttgaatcagtcaacgaacttgcacagattatgaaggatctttcagttcttgtgattgatcagggaaccatcatcgatcggatagactacaacatacagaacgttgcagcttcagttgaggaaggttacaaacaattgcaaaaggctgagaggacccagaagaaagggggcatggtgatgtgtgccactgtccttgtcattctgatcttcatcatgatagtccttctgattttgaagaccattttctgacatacttagctatctcattttaatggttgatgaatggtggccaagcacacaccacgctcatctattcatgtgagtgaggattgcaccatgcctgcatatcaagaacgccacaaattcatttgaatagcggcgatacgactcactgatctgaagatggaaccatcttgagtcttggccacaatttttgcatcgttgcagatgtagacatgccctattcatacaggactcttaattttagagagagaaaaatctgaagaggattgtttgacacgtttcaccttccagtttgccttggagcaaccgggttaggctggctgtgtatgcctctgtatagagtgagttgtatcatacatcagggtatcggaaatcagaaagtaggttcagttcctgtgtcatctcttttctgctttatgttgtctgcccttctattttgagctagctttgaagtggcatttcattgtaccatatcctaacaattgttctgacaactttcgcccgggtagtcggatatgcaatgagattttgtgctaaaaaaata

SEQ ID NO: 48444 - DNA, 1614 bp, Zea Mays
agaaactctaccaaaccaaactgcaccaaattctccggtccccgcctcagcgcctccgccatcgacatcccacccgcccgtcccctcgcggctcgcgcccgacggcccgaggcatggcgacgcggaaccgcacgccgctctaccgcaagtaccgcgacgcgctgcggcacgtccgcgcaccggccggggcgacgtcgtcgtcctgcgggggcgggggagggtcggtgatcgagatggcctcgctgctgcgctccgaccggccctacgcgcccctcagcatcgaagacccctccgcctccagtagaggtgctgtgtcagtcgggctacccccagcctgggtggatgtttctgaagagatatctgcaaacatgcagagggcaaggacaaaaatgacggagttggctaaggcacatgccaaagccttgatgccgtcctttggcgatggcagagacgaccagcgagcaattgaggttctcacacatgagataacagacttgctgaaaaggtccgagaagaggctgcagaagctgtccatgaaagatttgtcagaggattcaaatgtccgaaagaatgtccagcgttcccttgctacagacctgcaaaacctgtcaatggagttccggaaaaagcagtcatcatatttaaagcagcttcgccaacaaaaagagggtcaggatggtgttgatttggaaatgaatatgaacgggacaaagtctacatttgaagacgatgagtttgatgatgtgggtttcactgagattcagatgtcaaaacttaagaaaagcgaagcattcactagagaaagggagagagaaattgagcaggttgttgaatcagtcaacgaacttgcacagattatgaaggatctttcagttcttgtgattgatcagggaaccatcatcgatcggatagactacaacatacagaacgttgcagcttcagttgaggaaggttacaaacaattgcaaaaggctgagaggacccagaagaaagggggcatggtgatgtgtgccactgtccttgtcattctgatcttcatcatgatagtccttctgattttgaagaccattttctgacatacttagctatctcattttaatggttgatgaatggtggccaagcacacaccacgctcatctattcatgtgagtgaggattgcaccatgcctgcatatcaagaacgccacaaattcatttgaatagcggcgatacgactcactgatctgaagatggaaccatcttgagtcttggccacaatttttgcatcgttgcagatgtagacatgccctattcatacaggactcttaattttagagagagaaaaatctgaagaggattgtttgacacgtttcaccttccagtttgccttggagcaaccgggttaggctggctgtgtatgcctctgtatagagtgagttgtatcatacatcagggtatcggaaatcagaaagtaggttcagttcctgtgtcatctcttttctgctttatgttgtctgcccttctattttgagctagctttgaagtggcatttcattgtaccatatcctaacaattgttctgacaactttcgcccgggtagtcggatatgcaatgagattttgtgctaaaaaaaac

SEQ ID NO: 48445 - DNA, 993 bp, Zea Mays
ctttcaaccagttcctggtggccagggtttcactgagattcagatgtcaaaacttaagaaaagcgaagcattcactagagaaagggagagagaaattgagcaggttgttgaatcagtcaacgaacttgcacagattatgaaggatctttcagttcttgtgattgatcagggaaccatcatcgatcggatagactacaacatacagaacgttgcagcttcagttgaggaaggttacaaacaattgcaaaaggctgagaggacccagaagaaagggggcatggtgatgtgtgccactgtccttgtcattctgatcttcatcatgatagtccttctgattttgaagaccattttctgacatacttagctatctcattttaatggttgatgaatggtggccaagcacacaccacgctcatctattcatgtgagtgaggattgcaccatgcctgcatatcaagaacgccacaaattcatttgaatagcggcgatacgactcactgatctgaagatggaaccatcttgagtcttggccacaatttttgcatcgttgcagatgtagacatgccctattcatacaggactcttaattttagagagagaaaaatctgaagaggattgtttgacacgtttcaccttccagtttgccttggagcaaccgggttaggctggctgtgtatgcctctgtatagagtgagttgtatcatacatcagggtatcggaaatcagaaagtaggttcagttcctgtgtcatctcttttctgctttatgttgtctgcccttctattttgagctagctttgaagtggcatttcattgtaccatatcctaacaattgttctgacaactttcgcccgggtagtcggatatgcaatgagattttgtgctagtgtggcgaaagggcctccaggctatcatatcgctctgccgattaaccagcggtgtcctgctgctgccagtctaccatatcgctctgtcgaaagagcatcttcacgag

SEQ ID NO: 48446 - DNA, 3337 bp, Zea Mays
cgcaaaccaaagcaagcaaaccccctctgctccgaatcgcgcgcgtcacagcaatagcacgctgcactgcacgctgcggagtctacctgaccacaccttatccggacggcgcgggcgccatggagcggaggctgtcggcgacgtccaggcggtccgcgccgtcggccatccaacggctgtcccacctggcgcagcgcgtcggcgccgtcaacctcgccgagggcttccccgacttccccgcaccgccccacgtcaaggccgccgccgtcgccgccattgccgcggacctcaaccagtacaggcatgtgcaggggatctgcgacatcctcgccaacacgatgaaacgtgaccatgacctcgacgtggacccgctcacggactttgtcatctgctgcggccaatccgaagcattcgccgcggccatctttgcaataatcgaccaaggagacgaagttctcatcttcgaccctgcttatgaaacgtatgagacaagcattgagctagctcgaggcgtccctgtgtatgtgccattggatccaccttcttggactctgaacgaagaaaaatttctgaaatcttttacaagtcggaccaaggcgttggtcttgaacagggaaggtcttcagcaaagaggagctgcttattatctcccaagcttgtcagaaaatggactgctttgtgataactgatgagggatgcaagagaggaccatcatcacatcctcactgtcaaaaacttacagtgtgactggttggagactcggttgggcttgtgcagcagcaagcatcgcctcagctattagaaatatccacataaaattaacagattcagctcctgcaccattccaagaagctgcattgattgcattaacaagcacagcagattactacatatccctgagaaaagactatgaggtgaaaagagacttcatccttctgttgctgaaagacttgggcttcaaaatcagcgtcaagccacaaggttcagtatttgtgtttgctgagctgccaaggtcctgccaactttcagatgtgagttccttcgatgagaaatagaactacatctgagagttcctttagaacacaagaatttcacaggaatgatataggaatttcacagaaattagcacaaaatacaggaaaaacgtaggatttggaaaaatatcctttaatccaaaggaggcctgaagcatttttctctatacagtggaactcagataagaccatttttgttgagcttaaaatgaaactctgaatttgctaatgctggaaacgaaaatcactttgtttctagtgacacaatagcataagtagttagtagcacgagtttgtattatattgatcttatgacttcacactacaagcttacacacattgcttgatcttcacaatcaagctctactatcacacatacacattagcttactatacaccatacactagcttgatcttcacaaccaggctttatcttctctatatctcaaacccacttctacacaggaggattgctgcctcttttacaggactttcaggtcggttgctacaggaaccgacctaatagtgcacagctcaagttctcctacttgctagctaagcaacctctaaaaaccagttttgcttcattttcgccccagcagcctgcttcttgcagtggtaaacttggagttcactaacaagtagctagtactagaaacgtcatagctgctgtcttcatgtagctttctcatccataaaccatataggcctatacatgcttgttcaacactaatatacctcaacaacaacatcaacatagccttttagtcccaagcaagttgggatagactagagttgaaacccaacaaaatgataaaataaatcctaacagctagttggtccttttttcctgcactatgcaattcaggtagaatttgtgacaaagttgatcaacgatgctggtgtggttgccgtgcctggccgtgggttcttccacaagacttgtgacggtgaaagctactgccaccgatatgtcaggtttgcgttctgcaagggcgacgacacacttaaggctgctgccatgaagatgaggaagctggcaagcaggcagggagaaccatggcttactggcagacaataggataagactatgccctcctctaattgatcaaaacccttagatttattcctctttttagtttctggatacaactttgatgccatgtcacacggcccatgaaagtgtaacagctagttgcatccttttcccataaaagtgtaagggcatgtacaacctagaacccacttcacggttctccaagcgcaagacacacctaagacagtttcatacagtgggttgtatcttagattaaatgctttaataaatgcattgtatttacgtgtatgaaagtatgattgatctagtgtgcatatacacttaggtgccgtttggtttccaaaatgtaacgtaaatggtaatggtaacggtttgcattcgattatcagtggtaacaagtttgaataggctggtatcaatttctagtgtggtatccgattacgattggacttaaacaaacatgatttaacgttatttgttaccgattacattacaaatatgtgaaccaaacagcaccttagtccatgcattcacattttcagtttcaggttgtaacacacatgtttcagactgcattcccgtctcattttctgagatacacagttttatgctaaattcacagaaacgtgactgaatcatcacagaacatactacatatgtcacatactgaaaacataactgaatcatcagagaaacatggttgaaccatcaatttcgcacaagcatattcaaaacatccattagcacaaaatgaggccctttgttttcatcctcatagaacttgtgtgctttttctatccacatttgatccaaatacctgctagtgaacaaccttctaggcttcaacgaacagtcattgaacatgtttatccacttatttatcttgtgccaccttcaactaaaataggtagattgaaatggcaatctagggctaaaactgaatttaatctggtactgaaactgtatgcaaacctgaattaagtaaattgaaattgtaatctgggctgaaactgaatgtaatctagggcggtttactaaatgtaatctggtgctgaaactaaatataaacctaaactgggtaaattgaaattgttactctaaaataatcaataaactgaaatgtaaacctaaacctaaatatacattcattcaaactgggtttagggttgatcatcctttagaaattaatcaataaactgttgtacagtctctaaacaacttgtattacctttgaagcaaatcagag

SEQ ID NO: 48447 - DNA, 3412 bp, Zea Mays
cgcaaaccaaagcaagcaaaccccctctgctccgaatcgcgcgcgtcacagcaatagcacgctgcactgcacgctgcggagtctacctgaccacaccttatccggacggcgcgggcgccatggagcggaggctgtcggcgacgtccaggcggtccgcgccgtcggccatccaacggctgtcccacctggcgcagcgcgtcggcgccgtcaacctcgccgagggcttccccgacttccccgcaccgccccacgtcaaggccgccgccgtcgccgccattgccgcggacctcaaccagtacaggcatgtgcaggggatctgcgacatcctcgccaacacgatgaaacgtgaccatgacctcgacgtggacccgctcacggactttgtcatctgctgcggccaatccgaagcattcgccgcggccatctttgcaataatcgaccaaggagacgaagttctcatcttcgaccctgcttatgaaacgtatgagacaagcattgagctagctcgaggcgtccctgtgtatgtgccattggatccaccttcttggactctgaacgaagaaaaatttctgaaatcttttacaagtcggaccaaggcgttggtcttgaacagcccacacaatccaacagggaaggtcttcagcaaagaggagctgcttattatctcccaagcttgtcagaaaatggactgctttgtgataactgatgaggtttatgagtatattacttacgatgcgaacaagcatatctcactggcttctcttccagggatgcaagagaggaccatcatcacatcctcactgtcaaaaacttacagtgtgactggttggagactcggttgggcttgtgcagcagcaagcatcgcctcagctattagaaatatccacataaaattaacagattcagctcctgcaccattccaagaagctgcattgattgcattaacaagcacagcagattactacatatccctgagaaaagactatgaggtgaaaagagacttcatccttctgttgctgaaagacttgggcttcaaaatcagcgtcaagccacaaggttcagtatttgtgtttgctgagctgccaaggtcctgccaactttcagatgtgagttccttcgatgagaaatagaactacatctgagagttcctttagaacacaagaatttcacaggaatgatataggaatttcacagaaattagcacaaaatacaggaaaaacgtaggatttggaaaaatatcctttaatccaaaggaggcctgaagcatttttctctatacagtggaactcagataagaccatttttgttgagcttaaaatgaaactctgaatttgctaatgctggaaacgaaaatcactttgtttctagtgacacaatagcataagtagttagtagcacgagtttgtattatattgatcttatgacttcacactacaagcttacacacattgcttgatcttcacaatcaagctctactatcacacatacacattagcttactatacaccatacactagcttgatcttcacaaccaggctttatcttctctatatctcaaacccacttctacacaggaggattgctgcctcttttacaggactttcaggtcggttgctacaggaaccgacctaatagtgcacagctcaagttctcctacttgctagctaagcaacctctaaaaaccagttttgcttcattttcgccccagcagcctgcttcttgcagtggtaaacttggagttcactaacaagtagctagtactagaaacgtcatagctgctgtcttcatgtagctttctcatccataaaccatataggcctatacatgcttgttcaacactaatatacctcaacaacaacatcaacatagccttttagtcccaagcaagttgggatagactagagttgaaacccaacaaaatgataaaataaatcctaacagctagttggtccttttttcctgcactatgcaattcaggtagaatttgtgacaaagttgatcaacgatgctggtgtggttgccgtgcctggccgtgggttcttccacaagacttgtgacggtgaaagctactgccaccgatatgtcaggtttgcgttctgcaagggcgacgacacacttaaggctgctgccatgaagatgaggaagctggcaagcaggcagggagaaccatggcttactggcagacaataggataagactatgccctcctctaattgatcaaaacccttagatttattcctctttttagtttctggatacaactttgatgccatgtcacacggcccatgaaagtgtaacagctagttgcatccttttcccataaaagtgtaagggcatgtacaacctagaacccacttcacggttctccaagcgcaagacacacctaagacagtttcatacagtgggttgtatcttagattaaatgctttaataaatgcattgtatttacgtgtatgaaagtatgattgatctagtgtgcatatacacttaggtgccgtttggtttccaaaatgtaacgtaaatggtaatggtaacggtttgcattcgattatcagtggtaacaagtttgaataggctggtatcaatttctagtgtggtatccgattacgattggacttaaacaaacatgatttaacgttatttgttaccgattacattacaaatatgtgaaccaaacagcaccttagtccatgcattcacattttcagtttcaggttgtaacacacatgtttcagactgcattcccgtctcattttctgagatacacagttttatgctaaattcacagaaacgtgactgaatcatcacagaacatactacatatgtcacatactgaaaacataactgaatcatcagagaaacatggttgaaccatcaatttcgcacaagcatattcaaaacatccattagcacaaaatgaggccctttgttttcatcctcatagaacttgtgtgctttttctatccacatttgatccaaatacctgctagtgaacaaccttctaggcttcaacgaacagtcattgaacatgtttatccacttatttatcttgtgccaccttcaactaaaataggtagattgaaatggcaatctagggctaaaactgaatttaatctggtactgaaactgtatgcaaacctgaattaagtaaattgaaattgtaatctgggctgaaactgaatgtaatctagggcggtttactaaatgtaatctggtgctgaaactaaatataaacctaaactgggtaaattgaaattgttactctaaaataatcaataaactgaaatgtaaacctaaacctaaatatacattcattcaaactgggtttagggttgatcatcctttagaaattaatcaataaactgttgtacagtctctaaacaacttgtattacctttgaagcaaatcagag

SEQ ID NO: 48448 - DNA, 3427 bp, Zea Mays
cgcaaaccaaagcaagcaaaccccctctgctccgaatcgcgcgcgtcacagcaatagcacgctgcactgcacgctgcggagtctacctgaccacaccttatccggacggcgcgggcgccatggagcggaggctgtcggcgacgtccaggcggtccgcgccgtcggccatccaacggctgtcccacctggcgcagcgcgtcggcgccgtcaacctcgccgagggcttccccgacttccccgcaccgccccacgtcaaggccgccgccgtcgccgccattgccgcggacctcaaccagtacaggcatgtgcaggggatctgcgacatcctcgccaacacgatgaaacgtgaccatgacctcgacgtggacccgctcacggactttgtcatctgctgcggccaatccgaagcattcgccgcggccatctttgcaataatcgaccaaggagacgaagttctcatcttcgaccctgcttatgaaacgtatgagacaagcattgagctagctcgaggcgtccctgtgtatgtgccattggatccaccttcttggactctgaacgaagaaaaatttctgaaatcttttacaagtcggaccaaggcgttggtcttgaacagcccacacaatccaacagggaaggtcttcagcaaagaggagctgcttattatctcccaagcttgtcagaaaatggactgctttgtgataactgatgagggatgcaagagaggaccatcatcacatcctcactgtcaaaaacttacagtgtgactggttggagactcggttgggcttgtgcagcagcaagcatcgcctcagctattagaaatatccacataaaattaacagattcagctcctgcaccattccaagaagctgcattgattgcattaacaagcacagcagattactacatatccctgagaaaagtgagccttaattctaaccatgcttctttcagtttgagctgtcttaccttgcaattgtgatgactttggctaggactatgaggtgaaaagagacttcatccttctgttgctgaaagacttgggcttcaaaatcagcgtcaagccacaaggttcagtatttgtgtttgctgagctgccaaggtcctgccaactttcagatgtgagttccttcgatgagaaatagaactacatctgagagttcctttagaacacaagaatttcacaggaatgatataggaatttcacagaaattagcacaaaatacaggaaaaacgtaggatttggaaaaatatcctttaatccaaaggaggcctgaagcatttttctctatacagtggaactcagataagaccatttttgttgagcttaaaatgaaactctgaatttgctaatgctggaaacgaaaatcactttgtttctagtgacacaatagcataagtagttagtagcacgagtttgtattatattgatcttatgacttcacactacaagcttacacacattgcttgatcttcacaatcaagctctactatcacacatacacattagcttactatacaccatacactagcttgatcttcacaaccaggctttatcttctctatatctcaaacccacttctacacaggaggattgctgcctcttttacaggactttcaggtcggttgctacaggaaccgacctaatagtgcacagctcaagttctcctacttgctagctaagcaacctctaaaaaccagttttgcttcattttcgccccagcagcctgcttcttgcagtggtaaacttggagttcactaacaagtagctagtactagaaacgtcatagctgctgtcttcatgtagctttctcatccataaaccatataggcctatacatgcttgttcaacactaatatacctcaacaacaacatcaacatagccttttagtcccaagcaagttgggatagactagagttgaaacccaacaaaatgataaaataaatcctaacagctagttggtccttttttcctgcactatgcaattcaggtagaatttgtgacaaagttgatcaacgatgctggtgtggttgccgtgcctggccgtgggttcttccacaagacttgtgacggtgaaagctactgccaccgatatgtcaggtttgcgttctgcaagggcgacgacacacttaaggctgctgccatgaagatgaggaagctggcaagcaggcagggagaaccatggcttactggcagacaataggataagactatgccctcctctaattgatcaaaacccttagatttattcctctttttagtttctggatacaactttgatgccatgtcacacggcccatgaaagtgtaacagctagttgcatccttttcccataaaagtgtaagggcatgtacaacctagaacccacttcacggttctccaagcgcaagacacacctaagacagtttcatacagtgggttgtatcttagattaaatgctttaataaatgcattgtatttacgtgtatgaaagtatgattgatctagtgtgcatatacacttaggtgccgtttggtttccaaaatgtaacgtaaatggtaatggtaacggtttgcattcgattatcagtggtaacaagtttgaataggctggtatcaatttctagtgtggtatccgattacgattggacttaaacaaacatgatttaacgttatttgttaccgattacattacaaatatgtgaaccaaacagcaccttagtccatgcattcacattttcagtttcaggttgtaacacacatgtttcagactgcattcccgtctcattttctgagatacacagttttatgctaaattcacagaaacgtgactgaatcatcacagaacatactacatatgtcacatactgaaaacataactgaatcatcagagaaacatggttgaaccatcaatttcgcacaagcatattcaaaacatccattagcacaaaatgaggccctttgttttcatcctcatagaacttgtgtgctttttctatccacatttgatccaaatacctgctagtgaacaaccttctaggcttcaacgaacagtcattgaacatgtttatccacttatttatcttgtgccaccttcaactaaaataggtagattgaaatggcaatctagggctaaaactgaatttaatctggtactgaaactgtatgcaaacctgaattaagtaaattgaaattgtaatctgggctgaaactgaatgtaatctagggcggtttactaaatgtaatctggtgctgaaactaaatataaacctaaactgggtaaattgaaattgttactctaaaataatcaataaactgaaatgtaaacctaaacctaaatatacattcattcaaactgggtttagggttgatcatcctttagaaattaatcaataaactgttgtacagtctctaaacaacttgtattacctttgaagcaaatcagag

SEQ ID NO: 48449 - DNA, 1696 bp, Zea Mays
cgcaaatctcgccctgcgatgcaaacccccatccccaccccctcgccctcttcctccccacgccgcatataccactgtccccaacaactcctcagattgggcacgggcactcccttgatgtctctcttcctgtcttcaccctcgccctcgccgccagcaccaccaaccacagttattgcatggctccaccctcaatgacgacaagggtgtcgcggctgcaggcaatcccttgctcgtgctctctctcttcctgtctccgccctcaccctcgtcgccaacaccaccacccacggtcgctacacgaccatcctcgatgtcggcaagggtgtcgcgatcgcagggcaccagcgtagctaggggctagggcggaggtgggtgcgaggaccggtcctcgctgctgctccttgagcgaggccacttctcccgcacgctccttcgtagaggaggtcatcaccggctatgacaagaccgacctctacaagacctggcagaaacagccatggccgatagtcctgaagcagaaaggggaaaacatgcccaaatcctagatggccttttacgtcttccgcgtttgagatatgtattgtatttgatatatgtctgacatatttcatttgttctattttatgtatacgacaatgttcggcctttaaatggcagttatttcgctctagcgactggacgggttcacaattgaatggcatccaacaagagatcacagatagggtacaagaatttggtcgtgagcgatatgtgggacttgccaaacttgtgataagcaatcaacacatttgaaaggaaagttcatccttcatgctccctttaccaaagctattattgttatagaagggcccctgttggaattgacattcttatacatggtcttgtcttatctccatcaagaaagctccaagctgcaccatgcccaaacattaaggaccgtggaagccagaagcatataagtggctattatatccttgccatgaaccgcatagatgcttggatgggtccttcgtaggtcataactgataagctaagattacatgtcacttacagagtatccgcttgggtacgatttgggtccgaaggacatggacatcaccatgtaattgtcagtcttgctgtggataaaaaccaatgggtcaattgtgggcaagtggatgttgatggggatcaatgatatgaaatcaaagcagcattcaagcttgaaaagtagccatccaaagttaatgcatatgttcaaggccctcctgcaggtgttgatcttagagtcatggagttttatatatatgctgttggagaaaatagacaagggtggtctgataggggcatatggctactttgtgggatcgaaaagtttgatgcctcaagaggatttaagatttccacctatgtgtattggtgcattcatcagcttccatacgaagacatgacaccttttcaggcaacagttgtcgttgttcaaaagatcgactggatctatatgggattgactctgctcgtgctgaaggagaaagagcgtgcttggcttgcgggagaccatgtttcggttcatatttttttcatgggtcatgttacctgtcatgtcagattatacaacttctgatatttctgtctttgcgagacaactaccaaaatagttttacatcatgactactctcagatgtattcatgcattaatatttttctgaatatt

SEQ ID NO: 48450 - DNA, 1377 bp, Zea Mays
cgcaaatctcgccctgcgatgcaaacccccatccccaccccctcgccctcttcctccccacgccgcatataccactgtccccaacaactcctcagattgggcacgggcactcccttgatgtctctcttcctgtcttcaccctcgccctcgccgccagcaccaccaaccacagttattgcatggctccaccctcaatgacgacaagggtgtcgcggctgcaggcaatcccttgctcgtgctctctctcttcctgtctccgccctcaccctcgtcgccaacaccaccacccacggtcgctacacgaccatcctcgatgtcggcaagggtgtcgcgatcgcagggcaccagcgtagctaggggctagggcggaggtgggtgcgaggaccggtcctcgctgctgctccttgagcgaggccacttctcccgcacgctccttcgtagaggaggtcatcaccggctatgacaagaccgacctctacaagacctggcagaaacagccatggccgatagtcctgaagcagaaaggggaaaacatgcccaaatcctagatggccttttacgtcttccgcgtttgagatatgtattgtatttgatatatgtctgacatatttcatttgttctattttatgtatacgacaatgttcggcctttaaatggcagttatttcgctctagcgactggacgggttcacaattgaatggcatccaacaagagatcacagatagggtacaagaatttggtcgtgagcgatatgtgggacttgccaaacttgtgataagcaatcaacacatttgaaaggaaagttcatccttcatgctccctttaccaaagctattattgttatagaagggcccctgttggaattgacattcttatacatggtcttgtcttatctccatcaagaaagctccaagctgcaccatgcccaaacattaaggtgttgatcttagagtcatggagttttatatatatgctgttggagaaaatagacaagggtggtctgataggggcatatggctactttgtgggatcgaaaagtttgatgcctcaagaggatttaagatttccacctatgtgtattggtgcattcatcagcttccatacgaagacatgacaccttttcaggcaacagttgtcgttgttcaaaagatcgactggatctatatgggattgactctgctcgtgctgaaggagaaagagcgtgcttggcttgcgggagaccatgtttcggttcatatttttttcatgggtcatgttacctgtcatgtcagattatacaacttctgatatttctgtctttgcgagacaactaccaaaatagttttacatcatgactactctcagatgtattcatgcattaatatttttctgaatatt

SEQ ID NO: 48451 - DNA, 1826 bp, Zea Mays
gcaaatctcgccctgcgatgcaaacccccatccccaccccctcgccctcttcctccccacgccgcatataccactgtccccaacaactcctcagattgggcacgggcactcccttgatgtctctcttcctgtcttcaccctcgccctcgccgccagcaccaccaaccacagttattgcatggctccaccctcaatgacgacaagggtgtcgcggctgcaggcaatcccttgctcgtgctctctctcttcctgtctccgccctcaccctcgtcgccaacaccaccacccacggtcgctacacgaccatcctcgatgtcggcaagggtgtcgcgatcgcagggcaccagcgtagctaggggctagggcggaggtgggtgcgaggaccggtcctcgctgctgctccttgagcgaggccacttctcccgcacgctccttcgtagaggaggtcatcaccggctatgacaagaccgacctctacaagacctggcagaaacagccatggccgatagtcctgaagcagaaaggggaaaacatgcccaaatcctagatggccttttacgtcttccgcgtttgagatatgtattgtatttgatatatgtctgacatatttcatttgttctattttatgtatacgacaatgttcggcctttaaatggcagttatttcgctctagcgactggacgggttcacaattgaatggcatccaacaagagatcacagatagggtacaagaatttggtcgtgagcgatatgtgggacttgccaaacttgtgataagcaatcaacacatttgaaaggaaagttcatccttcatgctccctttaccaaagctattattgttatagaagggcccctgttggaattgacattcttatacatggtcttgtcttatctccatcaagaaagctccaagctgcaccatgcccaaacattaagaatgttttgtatggaactaatatattgcacaataatgccttcactcgtgggctttctgggtggagtcctatggttcatgttgattgagtatctagactgaagcaccccatatgctactttctatcttgaaggaccgtggaagccagaagcatataagtggctattatatccttgccatgaaccgcatagatgcttggatgggtccttcgtaggtcataactgataagctaagattacatgtcacttacagagtatccgcttgggtacgatttgggtccgaaggacatggacatcaccatgtaattgtcagtcttgctgtggataaaaaccaatgggtcaattgtgggcaagtggatgttgatggggatcaatgatatgaaatcaaagcagcattcaagcttgaaaagtagccatccaaagttaatgcatatgttcaaggccctcctgcaggtgttgatcttagagtcatggagttttatatatatgctgttggagaaaatagacaagggtggtctgataggggcatatggctactttgtgggatcgaaaagtttgatgcctcaagaggatttaagatttccacctatgtgtattggtgcattcatcagcttccatacgaagacatgacaccttttcaggcaacagttgtcgttgttcaaaagatcgactggatctatatgggattgactctgctcgtgctgaaggagaaagagcgtgcttggcttgcgggagaccatgtttcggttcatatttttttcatgggtcatgttacctgtcatgtcagattatacaacttctgatatttctgtctttgcgagacaactaccaaaatagttttacatcatgactactctcagatgtattcatgcattaatatttttctgaatatt

SEQ ID NO: 48452 - DNA, 1166 bp, Zea Mays
tctcgccctgcgatgcaaacccccatccccaccccctcgccctcttcctccccacgccgcatataccactgtccccaacaactcctcagattgggcacgggcactcccttgatgtctctcttcctgtcttcaccctcgccctcgccgccagcaccaccaaccacagttattgcatggctccaccctcaatgacgacaagggtgtcgcggctgcaggcaatcccttgctcgtgctctctctcttcctgtctccgccctcaccctcgtcgccaacaccaccacccacggtcgctacacgaccatcctcgatgtcggcaagggtgtcgcgatcgcagggcaccagcgtagctaggggctagggcggaggtgggtgcgaggaccggtcctcgctgctgctccttgagcgaggccacttctcccgcacgctccttcgtagaggaggtcatcaccggctatgacaagaccgacctctacaagacctggcagaaacagccatggccgatagtcctgaagcagaaaggggaaaacatgcccaaatcctagatggccttttacgtcttccgcgtttgagatatgtattgtatttgatatatgtctgacatatttcatttgttctattttatgtatacgacaatgttcggcctttaaatggcagttatttcgctctagcgactggacgggttcacaattgaatggcatccaacaagagatcacagatagggtacaagaatttggtcgtgagcgatatgtgggacttgccaaggcccctgttggaattgacattcttatacatggtcttgtcttatctccatcaagaaagctccaagctgcaccatgcccaaacattaaggaccgtggaagccagaagcatataagtggctattatatccttgccatgaaccgcatagatgcttggatgggtccttcgtaggtcataactgataagctaagattacatgtcacttacagagtatccgcttgggtacgatttgggtccgaaggacatggacatcaccatgtaattgtcagtcttgctgtggataaaaaccaatgggtcaattgtgggcaagtggatgttgatggggatcaatgatatgaaatcaaagcagcattcaagcttgaaaagtagccatccaaagttaatgcatatgttcaaggccctcctgc

SEQ ID NO: 48453 - DNA, 1677 bp, Zea Mays
cccatccccaccccctcgccctcttcctccccacgccgcatataccactgtccccaacaactcctcagattgggcacgggcactcccttgatgtctctcttcctgtcttcaccctcgccctcgccgccagcaccaccaaccacagttattgcatggctccaccctcaatgacgacaagggtgtcgcggctgcaggcaatcccttgctcgtgctctctctcttcctgtctccgccctcaccctcgtcgccaacaccaccacccacggtcgctacacgaccatcctcgatgtcggcaagggtgtcgcgatcgcagggcaccagcgtagctaggggctagggcggaggtgggtgcgaggaccggtcctcgctgctgctccttgagcgaggccacttctcccgcacgctccttcgtagaggaggtcatcaccggctatgacaagaccgacctctacaagacctggcagaaacagccatggccgatagtcctgaagcagaaaggggaaaacatgcccaaatcctagatggccttttacgtcttccgcgtttgagatatgtattgtatttgatatatgtctgacatatttcatttgttctattttatgtatacgacaatgttcggcctttaaatggcagttatttcgctctagcgactggacgggttcacaattgaatggcatccaacaagagatcacagatagggtgtagtggaaagttctttatgagatcagttctgttgtttgaatatttgggagtgccaatgatactgaagtgtgcactaccctacaggtacaagaatttggtcgtgagcgatatgtgggacttgccaaaagggcccctgttggaattgacattcttatacatggtcttgtcttatctccatcaagaaagctccaagctgcaccatgcccaaacattaaggaccgtggaagccagaagcatataagtggctattatatccttgccatgaaccgcatagatgcttggatgggtccttcgtaggtcataactgataagctaagattacatgtcacttacagagtatccgcttgggtacgatttgggtccgaaggacatggacatcaccatgtaattgtcagtcttgctgtggataaaaaccaatgggtcaattgtgggcaagtggatgttgatggggatcaatgatatgaaatcaaagcagcattcaagcttgaaaagtagccatccaaagttaatgcatatgttcaaggccctcctgcaggtgttgatcttagagtcatggagttttatatatatgctgttggagaaaatagacaagggtggtctgataggggcatatggctactttgtgggatcgaaaagtttgatgcctcaagaggatttaagatttccacctatgtgtattggtgcattcatcagcttccatacgaagacatgacaccttttcaggcaacagttgtcgttgttcaaaagatcgactggatctatatgggattgactctgctcgtgctgaaggagaaagagcgtgcttggcttgcgggagaccatgtttcggttcatatttttttcatgggtcatgttacctgtcatgtcagattatacaacttctgatatttctgtctttgcgagacaactaccaaaatagttttacatcatgactactctcagatgtattcatgcattaatatttttctgaatatt

SEQ ID NO: 48454 - DNA, 1063 bp, Zea Mays
ccactgtccccaacaactcctcagattgggcacgggcactcccttgatgtctctcttcctgtcttcaccctcgccctcgccgccagcaccaccaaccacagttattgcatggctccaccctcaatgacgacaagggtgtcgcggctgcagttatttcgctctagcgactggacgggttcacaattgaatggcatccaacaagagatcacagatagggtacaagaatttggtcgtgagcgatatgtgggacttgccaaacttgtgataagcaatcaacacatttgaaaggaaagttcatccttcatgctccctttaccaaagctattattgttatagaagggcccctgttggaattgacattcttatacatggtcttgtcttatctccatcaagaaagctccaagctgcaccatgcccaaacattaagaatgttttgtatggaactaatatattgcacaataatgccttcactcgtgggctttctgggtggagtcctatggttcatgttgattgagtatctagactgaagcaccccatatgctactttctatcttgaaggaccgtggaagccagaagcatataagtggctattatatccttgccatgaaccgcatagatgcttggatgggtccttcgtaggtcataactgataagctaagattacatgtcacttacagagtatccgcttgggtacgatttgggtccgaaggacatggacatcaccatgtaattgtcagtcttgctgtggataaaaaccaatgggtcaattgtgggcaagtggatgttgatggggatcaatgatatgaaatcaaagcagcattcaagcttgaaaagtagccatccaaagttaatgcatatgttcaaggccctcctgcaggtgttgatcttagagtcatggagttttatatatatgctgttggagaaaatagacaagggtggtctgataggggcatatggctactttgtgggatcgaaaagtttgatgcctcaagaggatttaagatttccacctatgtgtattggtgcattcatcagcttccatacgaagacatgacaccttttc

SEQ ID NO: 48455 - DNA, 1677 bp, Zea Mays
ccactgtccccaacaactcctcagattgggcacgggcactcccttgatgtctctcttcctgtcttcaccctcgccctcgccgccagcaccaccaaccacagttattgcatggctccaccctcaatgacgacaagggtgtcgcggctgcaggcaatcccttgctcgtgctctctctcttcctgtctccgccctcaccctcgtcgccaacaccaccacccacggtcgctacacgaccatcctcgatgtcggcaagggtgtcgcgatcgcagggcaccagcgtagctaggggctagggcggaggtgggtgcgaggaccggtcctcgctgctgctccttgagcgaggccacttctcccgcacgctccttcgtagaggaggtcatcaccggctatgacaagaccgacctctacaagacctggcagaaacagccatggccgatagtcctgaagcagaaaggggaaaacatgcccaaatcctagatggccttttacgtcttccgcgtttgagatatgtattgtatttgatatatgtctgacatatttcatttgttctattttatgtatacgacaatgttcggcctttaaatggcagttatttcgctctagcgactggacgggttcacaattgaatggcatccaacaagagatcacagatagggtacaagaatttggtcgtgagcgatatgtgggacttgccaaaagggcccctgttggaattgacattcttatacatggtcttgtcttatctccatcaagaaagctccaagctgcaccatgcccaaacattaagaatgttttgtatggaactaatatattgcacaataatgccttcactcgtgggctttctgggtggagtcctatggttcatgttgattgagtatctagactgaagcaccccatatgctactttctatcttgaaggaccgtggaagccagaagcatataagtggctattatatccttgccatgaaccgcatagatgcttggatgggtccttcgtaggtcataactgataagctaagattacatgtcacttacagagtatccgcttgggtacgatttgggtccgaaggacatggacatcaccatgtaattgtcagtcttgctgtggataaaaaccaatgggtcaattgtgggcaagtggatgttgatggggatcaatgatatgaaatcaaagcagcattcaagcttgaaaagtagccatccaaagttaatgcatatgttcaaggccctcctgcaggtgttgatcttagagtcatggagttttatatatatgctgttggagaaaatagacaagggtggtctgataggggcatatggctactttgtgggatcgaaaagtttgatgcctcaagaggatttaagatttccacctatgtgtattggtgcattcatcagcttccatacgaagacatgacaccttttcaggcaacagttgtcgttgttcaaaagatcgactggatctatatgggattgactctgctcgtgctgaaggagaaagagcgtgcttggcttgcgggagaccatgtttcggttcatatttttttcatgggtcatgttacctgtcatgtcagattatacaacttctgatatttctgtctttgcgagacaactaccaaaatagttttacatcatgactactctcagatgtattcatgcattaatatttttctgaatatt

SEQ ID NO: 48456 - DNA, 1841 bp, Zea Mays
ccactgtccccaacaactcctcagattgggcacgggcactcccttgatgtctctcttcctgtcttcaccctcgccctcgccgccagcaccaccaaccacagttattgcatggctccaccctcaatgacgacaagggtgtcgcggctgcaggcaatcccttgctcgtgctctctctcttcctgtctccgccctcaccctcgtcgccaacaccaccacccacggtcgctacacgaccatcctcgatgtcggcaagggtgtcgcgatcgcagggcaccagcgtagctaggggctagggcggaggtgggtgcgaggaccggtcctcgctgctgctccttgagcgaggccacttctcccgcacgctccttcgtagaggaggtcatcaccggctatgacaagaccgacctctacaagacctggcagaaacagccatggccgatagtcctgaagcagaaaggggaaaacatgcccaaatcctagatggccttttacgtcttccgcgtttgagatatgtattgtatttgatatatgtctgacatatttcatttgttctattttatgtatacgacaatgttcggcctttaaatggcagttatttcgctctagcgactggacgggttcacaattgaatggcatccaacaagagatcacagatagggtgtagtggaaagttctttatgagatcagttctgttgtttgaatatttgggagtgccaatgatactgaagtgtgcactaccctacaggtacaagaatttggtcgtgagcgatatgtgggacttgccaaaagggcccctgttggaattgacattcttatacatggtcttgtcttatctccatcaagaaagctccaagctgcaccatgcccaaacattaaggtttgtaggctaactgcttctcacagtctgagattatttgcatgtgaacgatcctgactcttgagacttatgaaacctttttttcttttgttataactttcatctgtcatgatactgtaaaagatactataaaattgtcctctctaatcaaagaatatttatttgttaaatattacagaatgttttgtatggaactaatatattgcacaataatgccttcactcgtgggctttctgggtggagtcctatggttcatgttgattgagtatctagactgaagcaccccatatgctactttctatcttgaaggaccgtggaagccagaagcatataagtggctattatatccttgccatgaaccgcatagatgcttggatgggtccttcgtaggtcataactgataagctaagattacatgtcacttacagagtatccgcttgggtacgatttgggtccgaaggacatggacatcaccatgtaattgtcagtcttgctgtggataaaaaccaatgggtcaattgtgggcaagtggatgttgatggggatcaatgatatgaaatcaaagcagcattcaagcttgaaaagtagccatccaaagttaatgcatatgttcaaggccctcctgcaggtgttgatcttagagtcatggagttttatatatatgctgttggagaaaatagacaagcttccatacgaagacatgacaccttttcaggcaacagttgtcgttgttcaaaagatcgactggatctatatgggattgactctgctcgtgctgaaggagaaagagcgtgcttggcttgcgggagaccatgtttcggttcatatttttttcatgggtcatgttacctgtcatgtcagattatacaacttctgatatttctgtctttgcgagacaactaccaaaatagttttacatcatgactactctcagatgtattcatgcattaatatttttctgaatatt

SEQ ID NO: 48457 - DNA, 2383 bp, Zea Mays
cccgtttctatatttttccgtaaatacggaaacggtcggatcaaatatagaaaatggtacgaatcgtgacgagattttttcgttctgttttcaaccctaatgggcacagccaccggagacacaggtccgcattgtctcgtgtctacagatgcgaagatgaatattataacgtcaactttccatactcgttcgactacgacctgcttccattgacatatgggtcctgcagtgttaaagtcccactgatcagccaaaccagcattcccctcaaagccgtcgtccttatccccaatccacaccgtcggcggcccatccaacccgtccccatctgatctccccgtcggcggcggcccccaccgcttccttcccctcgccgtcgcgatactgagcagacactagcagaagtaggtgctccgtaacccgccccccaacaccaaagtggcactcatcacgcccacgcgaggtggtcgacgaagagccgcagaggagggggaggtgctgggtgggatccggcggaccgctcatgtcgagcggcgcggacggatcggatccctgcacgggccttgacccggggacgatcccagagctgccggcccatgaacctcctgtgctgcaggctccgtcgccggcgccgcagcaggaggtggtggtggcatcgcagaccgaggcgccgttgccagctgtcaccatcgtgatctcgcggccaggcgaggatgttcagatgcccgatgcaaagggtggctccccggcatgctccccgcaggccggtgacggcaagcctatggccacctcggtttcgttgaccgcttcggcggccgcgaaggaagccgggctggcaaggtccgactccgacagcttggacgactacgagcaatgcaggagcaacacttgtactcttaataagcccaggttccagttaagagtttgtcaacagaagacagaagaacctctggtcgaccttggatgcagatgtcgtggtgatcttgcaaaagcacatcgcacatgcattgatttttggtttcgtactagaggttcaaacaagtgtgagatatgccagcaggttgctgtcaatatcgcccctccagaaacgcaatcaagtacaagttattgggtttggagggttgattcgacttatggaaggggacgaggaggacgagaaaggggatggtttagcccactttgggttgcatttgcaattctgattggtggtctcttattggatgtgctgatatctgtttctctcggtgtttccgcacttcctgtcaatataataattggtgttcttatagttctcggattgggcaccgcccttcatctagctcttgagtgctgtcacgaatggggctcaaggaggaacgtggccaatattccgaggctggagaacatagcgccgactgggtaccaccctgcagtagtataatcattatgggacttgtaaatagcgtaggaacatctaagctcgtgctggcttttggattattatgttctcgcaactagctttagctcacacgtgttgctcgttaatgtcgagctcaaattcaaagctcgttgattacaatccagttcatactcccactagtccaatccaatgtaaatgcagagttactgatactcggtcatcacgggctagtgctcatgccaaactgccagcaccttaattggatggtctggctacccattcagcatgacagggctaggttccttcttccctccttgtacggtttactctgacaagtcacttgttgtgtttcatctttatctgtggcttgtcggtataggcatttgtgaaggccatttgagctagtgttgtttttgtacatttatgtagagttgtggatataacatttttatatgaattaatctgctgatacgtttcgtgattacgtaaaaccataaatttgacagttcccttttgattcttgacgatccttctagcaaaccttgacttgcaccaatatgttaaaaaaacagagtaacatggcccttatatataaaatggcgacatgtgacaatagttcaagccatttcggcggcatgttgcaattgctcaaactgtcttttttttttttgagagagcttccttttcttttgttttttttttgagagagaagtaacggataagaacctttcgtttttctcattttctttatcaatattgtcacatccttcaaccgaccaatcttgagcattagaagcaaggtagaagtacatcaacattttagttgcttctctttttttcccgagtaatcttgtattgaattgaacaaagagaaggtcacttatgtgttgtgtatttggctcatttcttctcttggtatgcaactacattgcaaatcgaatcaaccaaacaatttagaatagataaggctatttttagtctaac

SEQ ID NO: 48458 - DNA, 2813 bp, Zea Mays
cccgtttctatatttttccgtaaatacggaaacggtcggatcaaatatagaaaatggtacgaatcgtgacgagattttttcgttctgttttcaaccctaatgggcacagccaccggagacacaggtccgcattgtctcgtgtctacagatgcgaagatgaatattataacgtcaactttccatactcgttcgactacgacctgcttccattgacatatgggtcctgcagtgttaaagtcccactgatcagccaaaccagcattcccctcaaagccgtcgtccttatccccaatccacaccgtcggcggcccatccaacccgtccccatctgatctccccgtcggcggcggcccccaccgcttccttcccctcgccgtcgcgatactgagcagacactagcagaagtaggtgctccgtaacccgccccccaacaccaaagtggcactcatcacgcccacgcgaggtggtcgacgaagagccgcagaggagggggaggtgctgggtgggatccggcggaccgctcatgtcgagcggcgcggacggatcggatccctgcacgggccttgacccggggacgatcccagagctgccggcccatgaacctcctgtgctgcaggctccgtcgccggcgccgcagcaggaggtggtggtggcatcgcagaccgaggcgccgttgccagctgtcaccatcgtgatctcgcggccaggcgaggatgttcagatgcccgatgcaaagggtggctccccggcatgctccccgcaggccggtgacggcaagcctatggccacctcggtttcgttgaccgcttcggcggccgcgaaggaagccgggctggcaaggtccgactccgacagcttggacgactacgagcaatgcaggagcaacacttgtactcttaataagcccaggttccagttaaggtacctgtggaccaagtggctgtccttgttttggaaggaacaatgtagaatgcattggccttgatggtaccgatttaagttattaagggcctgcttgtttgggattataatctggccagcttatataatctcacttattttaaactaacacttagttcaaaataagtgagattatataatctgggcagattataatcccaaacaaacaatccctaaatccaccatttccttaacataaatacattttttactgttagacatcgcaatgtcatcccaaaattaggtccagtcttgtaaaacacatgtctagaagccctttagtacatactgcctgccattttatttaccttcaaatttttatatatttctgaatcttgccacttgttacgttattttttctggaggatgaatacatttttcacttctgcagagtttgtcaacagaagacagaagaacctctggtcgaccttggatgcagatgtcgtggtgatcttgcaaaagcacatcgcacatgcattgatttttggtttcgtactagaggttcaaacaagtgtgagatatgccagcaggttgctgtcaatatcgcccctccagaaacgcaatcaagtacaagttattgggtttggagggttgattcgacttatggaaggggacgaggaggacgagaaaggggatggtttagcccactttgggttgcatttgcaattctgattggtggtctcttattggatgtgctgatatctgtttctctcggtgtttccgcacttcctgtcaatataataattggtgttcttatagttctcggattgggcaccgcccttcatctagctcttgagtgctgtcacgaatggggctcaaggaggaacgtggccaatattccgaggctggagaacatagcgccgactgggtaccaccctgcagtagtataatcattatgggacttgtaaatagcgtaggaacatctaagctcgtgctggcttttggattattatgttctcgcaactagctttagctcacacgtgttgctcgttaatgtcgagctcaaattcaaagctcgttgattacaatccagttcatactcccactagtccaatccaatgtaaatgcagagttactgatactcggtcatcacgggctagtgctcatgccaaactgccagcaccttaattggatggtctggctacccattcagcatgacagggctaggttccttcttccctccttgtacggtttactctgacaagtcacttgttgtgtttcatctttatctgtggcttgtcggtataggcatttgtgaaggccatttgagctagtgttgtttttgtacatttatgtagagttgtggatataacatttttatatgaattaatctgctgatacgtttcgtgattacgtaaaaccataaatttgacagttcccttttgattcttgacgatccttctagcaaaccttgacttgcaccaatatgttaaaaaaacagagtaacatggcccttatatataaaatggcgacatgtgacaatagttcaagccatttcggcggcatgttgcaattgctcaaactgtcttttttttttttgagagagcttccttttcttttgttttttttttgagagagaagtaacggataagaacctttcgtttttctcattttctttatcaatattgtcacatccttcaaccgaccaatcttgagcattagaagcaaggtagaagtacatcaacattttagttgcttctctttttttcccgagtaatcttgtattgaattgaacaaagagaaggtcacttatgtgttgtgtatttggctcatttcttctcttggtatgcaactacattgcaaatcgaatcaaccaaacaatttagaatagataaggctatttttagtctaac

SEQ ID NO: 48459 - DNA, 2264 bp, Zea Mays
tttcgttctgttttcaaccctaatgggcacagccaccggagacacaggtccgcattgtctcgtgtctacagatgcgaagatgaatattataacgtcaactttccatactcgttcgactacgacctgcttccattgacatatgggtcctgcagtgttaaagtcccactgatcagccaaaccagcattcccctcaaagccgtcgtccttatccccaatccacaccgtcggcggcccatccaacccgtccccatctgatctccccgtcggcggcggcccccaccgcttccttcccctcgccgtcgcgatactgagcagacactagcagaagtaggtgctccgtaacccgccccccaacaccaaagtggcactcatcacgcccacgcgaggtggtcgacgaagagccgcagaggagggggaggtgctgggtgggatccggcggaccgctcatgtcgagcggcgcggacggatcggatccctgcacgggccttgacccggggacgatcccagagctgccggcccatgaacctcctgtgctgcaggctccgtcgccggcgccgcagcaggaggtggtggtggcatcgcagaccgaggcgccgttgccagctgtcaccatcgtgatctcgcggccaggcgaggatgttcagatgcccgatgcaaagggtggctccccggcatgctccccgcaggccggtgacggcaagcctatggccacctcggtttcgttgaccgcttcggcggccgcgaaggaagccgggctggcaaggtccgactccgacagcttggacgactacgagcaatgcagagtttgtcaacagaagacagaagaacctctggtcgaccttggatgcagatgtcgtggtgatcttgcaaaagcacatcgcacatgcattgatttttggtttcgtactagaggttcaaacaagtgtgagatatgccagcaggttgctgtcaatatcgcccctccagaaacgcaatcaagtacaagttattgggtttggagggttgattcgacttatggaaggggacgaggaggacgagaaaggggatggtttagcccactttgggttgcatttgcaattctgattggtggtctcttattggatgtgctgatatctgtttctctcggtgtttccgcacttcctgtcaatataataattggtgttcttatagttctcggattgggcaccgcccttcatctagctcttgagtgctgtcacgaatggggctcaaggaggaacgtggccaatattccgaggctggagaacatagcgccgactgggtaccaccctgcagtagtataatcattatgggacttgtaaatagcgtaggaacatctaagctcgtgctggcttttggattattatgttctcgcaactagctttagctcacacgtgttgctcgttaatgtcgagctcaaattcaaagctcgttgattacaatccagttcatactcccactagtccaatccaatgtaaatgcagagttactgatactcggtcatcacgggctagtgctcatgccaaactgccagcaccttaattggatggtctggctacccattcagcatgacagggctaggttccttcttccctccttgtacggtttactctgacaagtcacttgttgtgtttcatctttatctgtggcttgtcggtataggcatttgtgaaggccatttgagctagtgttgtttttgtacatttatgtagagttgtggatataacatttttatatgaattaatctgctgatacgtttcgtgattacgtaaaaccataaatttgacagttcccttttgattcttgacgatccttctagcaaaccttgacttgcaccaatatgttaaaaaaacagagtaacatggcccttatatataaaatggcgacatgtgacaatagttcaagccatttcggcggcatgttgcaattgctcaaactgtcttttttttttttgagagagcttccttttcttttgttttttttttgagagagaagtaacggataagaacctttcgtttttctcattttctttatcaatattgtcacatccttcaaccgaccaatcttgagcattagaagcaaggtagaagtacatcaacattttagttgcttctctttttttcccgagtaatcttgtattgaattgaacaaagagaaggtcacttatgtgttgtgtatttggctcatttcttctcttggtatgcaactacattgcaaatcgaatcaaccaaacaatttagaatagataaggctatttttagtctaac

SEQ ID NO: 48460 - DNA, 3450 bp, Zea Mays
ataacgtcaactttccatactcgttcgactacgacctgcttccattgacatatgggtcctgcagtgttaaagtcccactgatcagccaaaccagcattcccctcaaagccgtcgtccttatccccaatccacaccgtcggcggcccatccaacccgtccccatctgatctccccgtcggcggcggcccccaccgcttccttcccctcgccgtcgcgatactgagcagacactagcagaagtaggtgctccgtaacccgccccccaacaccaaagtggcactcatcacgcccacgcgaggtggtcgacgaagagccgcagaggagggggaggtgctgggtgggatccggcggaccgctcatgtcgagcggcgcggacggatcggatccctgcacgggccttgacccggggacgatcccagagctgccggcccatgaacctcctgtgctgcaggctccgtcgccggcgccgcagcaggaggtggtggtggcatcgcagaccgaggcgccgttgccagctgtcaccatcgtgatctcgcggccaggcgaggatgttcagatgcccgatgcaaagggtggctccccggcatgctccccgcaggccggtgacggcaagcctatggccacctcggtttcgttgaccgcttcggcggccgcgaaggaagccgggctggcaaggtccgactccgacagcttggacgactacgagcaatgcagtgactgtagctgtatgaacgaacttccttttatgatgtagtgattcatttcttggagtcgccctagcacatggatcatgtcaactgaactgattaccctagctgcctttttctgtctgtcattacaccaatggattttttgcctgcagttgggtgagtgttgtttatcacatataacatgcgagcaacaagtttgtgaacatgttcattgtcagtttgtctgcatcttctttagtattgactttgtcagtgtttgtggtatgtgcttatttacagcccatatgttagtgtagttaggctttcatgaagtgcaaataggactacaaagtggtaattatgatatattagggtctccaaggtatttaggcggtcatgagaaggtaggttatgtttccaatgcagttgggttgaccttgaatgtagaagcaaaggatattcggaatggtttgaacttacagcaacttcgtgctcaagtttgctgatagtaagatcttttatgtgtagaattattataaataggacttcatatattcgacaattcgatgaatatatatgatatttacttcttggctatgaaaggctaactggcagctaggaggctgcgggtgaaaacaatatgaggaagcatggtggaaattgataatcaacttccaactgagcttttcttgtaccacaaatgtgctgtgagccgcaccattgcttttccatgtattgatgttcttgcgttgatcttttgatttactggatgcaagtaataacacatccaatctgttttctcatggctctttgacatttctaaatatagaagggagcattgtgttacttatgatctactaatcagaacaattatctttagaagctgaattttcccaatacagtacctggaattaaatattggtcttttgttttacaggagcaacacttgtactcttaataagcccaggttccagttaaggtacctgtggaccaagtggctgtccttgttttggaaggaacaatgtagaatgcattggccttgatggtaccgatttaaattataatcccaaacaaacaatccctaaatccaccatttccttaacataaatacattttttactgttagacatcgcaatgtcatcccaaaattaggtccagtcttgtaaaacacatgtctagaagccctttagtacatactgcctgccattttatttaccttcaaatttttatatatttctgaatcttgccacttgttacgttattttttctggaggatgaatacatttttcacttctgcagagtttgtcaacagaagacagaagaacctctggtcgaccttggatgcagatgtcgtggtgatcttgcaaaagcacatcgcacatgcattgatttttggtttcgtactagaggttcaaacaagtgtgagatatgccagcaggttgctgtcaatatcgcccctccagaaacgcaatcaagtacaagttattgggtttggagggttgattcgacttatggaaggggacgaggaggacgagaaaggggatggtttagcccactttgggttgcatttgcaattctgattggtggtctcttattggatgtgctgatatctgtttctctcggtgtttccgcacttcctgtcaatataataattggtgttcttatagttctcggattgggcaccgcccttcatctagctcttgagtgctgtcacgaatggggctcaaggaggaacgtggccaatattccgaggctggagaacatagcgccgactgggtaccaccctgcagtagtataatcattatgggacttgtaaatagcgtaggaacatctaagctcgtgctggcttttggattattatgttctcgcaactagctttagctcacacgtgttgctcgttaatgtcgagctcaaattcaaagctcgttgattacaatccagttcatactcccactagtccaatccaatgtaaatgcagagttactgatactcggtcatcacgggctagtgctcatgccaaactgccagcaccttaattggatggtctggctacccattcagcatgacagggctaggttccttcttccctccttgtacggtttactctgacaagtcacttgttgtgtttcatctttatctgtggcttgtcggtataggcatttgtgaaggccatttgagctagtgttgtttttgtacatttatgtagagttgtggatataacatttttatatgaattaatctgctgatacgtttcgtgattacgtaaaaccataaatttgacagttcccttttgattcttgacgatccttctagcaaaccttgacttgcaccaatatgttaaaaaaacagagtaacatggcccttatatataaaatggcgacatgtgacaatagttcaagccatttcggcggcatgttgcaattgctcaaactgtcttttttttttttgagagagcttccttttcttttgttttttttttgagagagaagtaacggataagaacctttcgtttttctcattttctttatcaatattgtcacatccttcaaccgaccaatcttgagcattagaagcaaggtagaagtacatcaacattttagttgcttctctttttttcccgagtaatcttgtattgaattgaacaaagagaaggtcacttatgtgttgtgtatttggctcatttcttctcttggtatgcaactacattgcaaatcgaatcaaccaaacaatttagaatagataaggctatttttagtctaac

SEQ ID NO: 48461 - DNA, 3878 bp, Zea Mays
ataacgtcaactttccatactcgttcgactacgacctgcttccattgacatatgggtcctgcagtgttaaagtcccactgatcagccaaaccagcattcccctcaaagccgtcgtccttatccccaatccacaccgtcggcggcccatccaacccgtccccatctgatctccccgtcggcggcggcccccaccgcttccttcccctcgccgtcgcgatactgagcagacactagcagaagtaggtgctccgtaacccgccccccaacaccaaagtggcactcatcacgcccacgcgaggtggtcgacgaagagccgcagaggagggggaggtgctgggtgggatccggcggaccgctcatgtcgagcggcgcggacggatcggatccctgcacgggccttgacccggggacgatcccagagctgccggcccatgaacctcctgtgctgcaggctccgtcgccggcgccgcagcaggaggtggtggtggcatcgcagaccgaggcgccgttgccagctgtcaccatcgtgatctcgcggccaggcgaggatgttcagatgcccgatgcaaagggtggctccccggcatgctccccgcaggccggtgacggcaagcctatggccacctcggtttcgttgaccgcttcggcggccgcgaaggaagccgggctggcaaggtccgactccgacagcttggacgactacgagcaatgcagtgactgtagctgtatgaacgaacttccttttatgatgtagtgattcatttcttggagtcgccctagcacatggatcatgtcaactgaactgattaccctagctgcctttttctgtctgtcattacaccaatggattttttgcctgcagttgggtgagtgttgtttatcacatataacatgcgagcaacaagtttgtgaacatgttcattgtcagtttgtctgcatcttctttagtattgactttgtcagtgtttgtggtatgtgcttatttacagcccatatgttagtgtagttaggctttcatgaagtgcaaataggactacaaagtggtaattatgatatattagggtctccaaggtatttaggcggtcatgagaaggtaggttatgtttccaatgcagttgggttgaccttgaatgtagaagcaaaggatattcggaatggtttgaacttacagcaacttcgtgctcaagtttgctgatagtaagatcttttatgtgtagaattattataaataggacttcatatattcgacaattcgatgaatatatatgatatttacttcttggctatgaaaggctaactggcagctaggaggctgcgggtgaaaacaatatgaggaagcatggtggaaattgataatcaacttccaactgagcttttcttgtaccacaaatgtgctgtgagccgcaccattgcttttccatgtattgatgttcttgcgttgatcttttgatttactggatgcaagtaataacacatccaatctgttttctcatggctctttgacatttctaaatatagaagggagcattgtgttacttatgatctactaatcagaacaattatctttagaagctgaattttcccaatacagtacctggaattaaatattggtcttttgttttacaggagcaacacttgtactcttaataagcccaggttccagttaaggtacctgtggaccaagtggctgtccttgttttggaaggaacaatgtagaatgcattggccttgatggtaccgatttaaattataatcccaaacaaacaatccctaaatccaccatttccttaacataaatacattttttactgttagacatcgcaatgtcatcccaaaattaggtccagtcttgtaaaacacatgtctagaagccctttagtacatactgcctgccattttatttaccttcaaatttttatatatttctgaatcttgccacttgttacgttattttttctggaggatgaatacatttttcacttctgcagagtttgtcaacagaagacagaagaacctctggtcgaccttggatgcagatgtcgtggtgatcttgcaaaagcacatcgcacatgcattgatttttggtttcgtactagaggttcaaacaagtgtgagatatgccagcaggttgctgtcaatatcgcccctccagaaacgcaatcaagtgtatgtttactattttgcactttatatatttcgatctatattggatcatttggagaatgtatgtgtcctaatgcatatgtatatccatttcatttattctctaactaataaactggtctatgtttatgtctaaccaagttaaactacctattgtcagttgtatctatttgtagttttgagaacacctcattaaatataacaactttaattggctttgttttggaagacttctttttcacaattacataaatgaaggccatcctgaaatttgaggaggcacaatattgataaaagtacaagtcaatttccattttctattatgaaatttacttgttttcattcaacagacaagttattgggtttggagggttgattcgacttatggaaggggacgaggaggacgagaaagggtatttttatcactggatatgataaataagaaacaaatgcagtaacctgactctttatctgcaaaaatgattaatgatcatggatggtttagcccactttgggttgcatttgcaattctgattggtggtctcttattggatgtgctgatatctgtttctctcggtgtttccgcacttcctgtcaatataataattggtgttcttatagttctcggattgggcaccgcccttcatctagctcttgagtgctgtcacgaatggggctcaaggaggaacgtggccaatattccgaggctggagaacatagcgccgactgggtaccaccctgcagtagtataatcattatgggacttgtaaatagcgtaggaacatctaagctcgtgctggcttttggattattatgttctcgcaactagctttagctcacacgtgttgctcgttaatgtcgagctcaaattcaaagctcgttgattacaatccagttcatactcccactagtccaatccaatgtaaatgcagagttactgatactcggtcatcacgggctagtgctcatgccaaactgccagcaccttaattggatggtctggctacccattcagcatgacagggctaggttccttcttccctccttgtacggtttactctgacaagtcacttgttgtgtttcatctttatctgtggcttgtcggtataggcatttgtgaaggccatttgagctagtgttgtttttgtacatttatgtagagttgtggatataacatttttatatgaattaatctgctgatacgtttcgtgattacgtaaaaccataaatttgacagttcccttttgattcttgacgatccttctagcaaaccttgacttgcaccaatatgttaaaaaaacagagtaacatggcccttatatataaaatggcgacatgtgacaatagttcaagccatttcggcggcatgttgcaattgctcaaactgtcttttttttttttgagagagcttccttttcttttgttttttttttgagagagaagtaacggataagaacctttcgtttttctcattttctttatcaatattgtcacatccttcaaccgaccaatcttgagcattagaagcaaggtagaagtacatcaacattttagttgcttctctttttttcccgagtaatcttgtattgaattgaacaaagagaaggtcacttatgtgttgtgtatttggctcatttcttctcttggtatgcaactacattgcaaatcgaatcaaccaaacaatttagaatagataaggctatttttagtctaac

SEQ ID NO: 48462 - DNA, 2518 bp, Zea Mays
gtcaactttccatactcgttcgactacgacctgcttccattgacatatgggtcctgcagtgttaaagtcccactgatcagccaaaccagcattcccctcaaagccgtcgtccttatccccaatccacaccgtcggcggcccatccaacccgtccccatctgatctccccgtcggcggcggcccccaccgcttccttcccctcgccgtcgcgatactgagcagacactagcagaagtaggtgctccgtaacccgccccccaacaccaaagtggcactcatcacgcccacgcgaggtggtcgacgaagagccgcagaggagggggaggtgctgggtgggatccggcggaccgctcatgtcgagcggcgcggacggatcggatccctgcacgggccttgacccggggacgatcccagagctgccggcccatgaacctcctgtgctgcaggctccgtcgccggcgccgcagcaggaggtggtggtggcatcgcagaccgaggcgccgttgccagctgtcaccatcgtgatctcgcggccaggcgaggatgttcagatgcccgatgcaaagggtggctccccggcatgctccccgcaggccggtgacggcaagcctatggccacctcggtttcgttgaccgcttcggcggccgcgaaggaagccgggctggcaaggtccgactccgacagcttggacgactacgagcaatgcagagtttgtcaacagaagacagaagaacctctggtcgaccttggatgcagatgtcgtggtgatcttgcaaaagcacatcgcacatgcattgatttttggtttcgtactagaggttcaaacaagtgtgagatatgccagcaggttgctgtcaatatcgcccctccagaaacgcaatcaagtgtatgtttactattttgcactttatatatttcgatctatattggatcatttggagaatgtatgtgtcctaatgcatatgtatatccatttcatttattctctaactaataaactggtctatgtttatgtctaaccaagttaaactacctattgtcagttgtatctatttgtagttttgagaacacctcattaaatataacaactttaattggctttgttttggaagacttctttttcacaattacataaatgaaggccatcctgaaatttgaggaggcacaatattgataaaagtacaagtcaatttccattttctattatgaaatttacttgttttcattcaacagacaagttattgggtttggagggttgattcgacttatggaaggggacgaggaggacgagaaaggggatggtttagcccactttgggttgcatttgcaattctgattggtggtctcttattggatgtgctgatatctgtttctctcggtgtttccgcacttcctgtcaatataataattggtgttcttatagttctcggattgggcaccgcccttcatctagctcttgagtgctgtcacgaatggggctcaaggaggaacgtggccaatattccgaggctggagaacatagcgccgactgggtaccaccctgcagtagtataatcattatgggacttgtaaatagcgtaggaacatctaagctcgtgctggcttttggattattatgttctcgcaactagctttagctcacacgtgttgctcgttaatgtcgagctcaaattcaaagctcgttgattacaatccagttcatactcccactagtccaatccaatgtaaatgcagagttactgatactcggtcatcacgggctagtgctcatgccaaactgccagcaccttaattggatggtctggctacccattcagcatgacagggctaggttccttcttccctccttgtacggtttactctgacaagtcacttgttgtgtttcatctttatctgtggcttgtcggtataggcatttgtgaaggccatttgagctagtgttgtttttgtacatttatgtagagttgtggatataacatttttatatgaattaatctgctgatacgtttcgtgattacgtaaaaccataaatttgacagttcccttttgattcttgacgatccttctagcaaaccttgacttgcaccaatatgttaaaaaaacagagtaacatggcccttatatataaaatggcgacatgtgacaatagttcaagccatttcggcggcatgttgcaattgctcaaactgtcttttttttttttgagagagcttccttttcttttgttttttttttgagagagaagtaacggataagaacctttcgtttttctcattttctttatcaatattgtcacatccttcaaccgaccaatcttgagcattagaagcaaggtagaagtacatcaacattttagttgcttctctttttttcccgagtaatcttgtattgaattgaacaaagagaaggtcacttatgtgttgtgtatttggctcatttcttctcttggtatgcaactacattgcaaatcgaatcaaccaaacaatttagaatagataaggctatttttagtctaac

SEQ ID NO: 48463 - DNA, 2252 bp, Zea Mays
gtcaactttccatactcgttcgactacgacctgcttccattgacatatgggtcctgcagtgttaaagtcccactgatcagccaaaccagcattcccctcaaagccgtcgtccttatccccaatccacaccgtcggcggcccatccaacccgtccccatctgatctccccgtcggcggcggcccccaccgcttccttcccctcgccgtcgcgatactgagcagacactagcagaagtaggtgctccgtaacccgccccccaacaccaaagtggcactcatcacgcccacgcgaggtggtcgacgaagagccgcagaggagggggaggtgctgggtgggatccggcggaccgctcatgtcgagcggcgcggacggatcggatccctgcacgggccttgacccggggacgatcccagagctgccggcccatgaacctcctgtgctgcaggctccgtcgccggcgccgcagcaggaggtggtggtggcatcgcagaccgaggcgccgttgccagctgtcaccatcgtgatctcgcggccaggcgaggatgttcagatgcccgatgcaaagggtggctccccggcatgctccccgcaggccggtgacggcaagcctatggccacctcggtttcgttgaccgcttcggcggccgcgaaggaagccgggctggcaaggtccgactccgacagcttggacgactacgagcaatgcagagtttgtcaacagaagacagaagaacctctggtcgaccttggatgcagatgtcgtggtgatcttgcaaaagcacatcgcacatgcattgatttttggtttcgtactagaggttcaaacaagtgtgagatatgccagcaggttgctgtcaatatcgcccctccagaaacgcaatcaagtacaagttattgggtttggagggttgattcgacttatggaaggggacgaggaggacgagaaagggtatttttatcactggatatgataaataagaaacaaatgcagtaacctgactctttatctgcaaaaatgattaatgatcatggatggtttagcccactttgggttgcatttgcaattctgattggtggtctcttattggatgtgctgatatctgtttctctcggtgtttccgcacttcctgtcaatataataattggtgttcttatagttctcggattgggcaccgcccttcatctagctcttgagtgctgtcacgaatggggctcaaggaggaacgtggccaatattccgaggctggagaacatagcgccgactgggtaccaccctgcagtagtataatcattatgggacttgtaaatagcgtaggaacatctaagctcgtgctggcttttggattattatgttctcgcaactagctttagctcacacgtgttgctcgttaatgtcgagctcaaattcaaagctcgttgattacaatccagttcatactcccactagtccaatccaatgtaaatgcagagttactgatactcggtcatcacgggctagtgctcatgccaaactgccagcaccttaattggatggtctggctacccattcagcatgacagggctaggttccttcttccctccttgtacggtttactctgacaagtcacttgttgtgtttcatctttatctgtggcttgtcggtataggcatttgtgaaggccatttgagctagtgttgtttttgtacatttatgtagagttgtggatataacatttttatatgaattaatctgctgatacgtttcgtgattacgtaaaaccataaatttgacagttcccttttgattcttgacgatccttctagcaaaccttgacttgcaccaatatgttaaaaaaacagagtaacatggcccttatatataaaatggcgacatgtgacaatagttcaagccatttcggcggcatgttgcaattgctcaaactgtcttttttttttttgagagagcttccttttcttttgttttttttttgagagagaagtaacggataagaacctttcgtttttctcattttctttatcaatattgtcacatccttcaaccgaccaatcttgagcattagaagcaaggtagaagtacatcaacattttagttgcttctctttttttcccgagtaatcttgtattgaattgaacaaagagaaggtcacttatgtgttgtgtatttggctcatttcttctcttggtatgcaactacattgcaaatcgaatcaaccaaacaatttagaatagataaggctatttttagtctaac

SEQ ID NO: 48464 - DNA, 2378 bp, Zea Mays
cttgtcgggaataaagtttagcccattgtattgtcggggcctcagctcgtacgcttgtacaccagtttctcattgcacagcaagcaatcgttcccttcatttgttaagaatttaataaagaatgtactgaagcttatcgaaaaaagatatagagatagaaaaaaaaggtgtcgctcgaaaaacaaaacccgaacctacgaacgaacgtgccgcttgtgggtccccagctgtcatcggcctgcctagtaaccgtaggcagcgagtagcattaaaatcttccaaaaatgaaacagaaaaaaaaaatataataagctccctctggttccacccgcaccacttcactcttctccctaaacacctcttctcgtagccggtagatcttccggggtcgccatctccggccacggcggccggcactcggagtaacgctggagctcgaggcggtggtcggcggccatgtacaagaatcagctgcaggagctggcgcagcggagctgcttcaacctgccttcttacacgtgcctgcgggaggggcccgaccatgcgccgcggttcaaggcggcggtgaacttcaacggggagcagttcgagagtcccgggttcttcaccacgctccgccaagcggagcacgccgccgcggaggttgcgctcgccgcgctcgcgcgacgcggcccgtcctactcgctcgccgcccgcatcctggacgaaacaggggtttataaaaatcttctgcaggaagtggctcaaagagttggggcgccattgccattgtatacaacagagcgatctggccttggccaccttccggttttcacatgcacagtagagctagctggtatcacatttgcaggtgatcctgctaagaataagaaacaggctgaaaaaaatgctgcttcagctgcatgtggtacgcgaggaggtgaattcatccaatgagccagaaaacattgatgagcaggagcagatcaggatcgcccgagccctcctcaattatcgcttgaaggagaagatggcgatggccaactaccctcatgtttcaccattccccaagaaatttcccatgcagcaagagcggaagccttgtttgggtcaatcttgtcaatccagccactcgaagattctccctttattccgccctaaacctaattcaagaccaaagtcgccagcatccaccgacggtgtgtcgaaaacgcctgggcggacggttgagagcctagtagatcaaagtcccaggtcaagatttccagctgcagaggcagctccctatgtgccagttgggcactaccgccgtataccttgccataacatggctccttccgtcacaattaggaccgctgttcctgtcttctctgctccacctctcccacctccccctgcacgcctgcagcagctccctccactcatgagccacccaccgcccattcggatggcatccccagtccgcatgaggccagcgccagcctctccaatgtttgcctcctcatctccagttcaagtgccgaaacctgtgatgcctgttcagctgaaggatgtgcaagatcacccaaggaaggaagcagttccacttccacctgtgatccctgttcaggtgaaggatgcgcaatgccgaccaaggaagagctccatgtctcccgtgattcctgtcccagtaaaggacgcacagcgccggcctgccgcaatcccagtgcagatgaaggacgtgcaaacccaagccccaaaggaaccgctggcagctccaattccagcagccaggccttcagttatgaccgacacgcctgcccaagtcaaggaagcttcagctggtgctaccagcgaggcgccatcgtctgctactggcaataacgctgctgtggaatgcagtgcatcatcggaaactgtcttggcaaggcaatctggggctgcggatgaggacacgctggtactaatgcggaagctaagcatgaggcccgaggctcaatcagcggcagaggcagccaccaccatgcggttggagaccaattgacttgatataaaaaaaatgcgcgccgccatcttctcccagattttgtaattatagccgcctcccgtgcacatccccgttctgttttagttcttgtatgccttgggtttcggattagggctgtctgggcaacctgcattgtggttggtaggaaggaacacctagtttttttttttttttggtctgttgagaagagagagagagaaaaaaaacaatgaggtggtggtggtaggtggcttgcccagtgtttttagttggagacggttatacttccctggacatgcagttggtctgcttttttttacccccaatgatgaggcgggctgtgcggtgcctctagggaaggaaggattctgatgaggcggcagttacatctaac

SEQ ID NO: 48465 - DNA, 1924 bp, Zea Mays
ctaggggccagcttgctaccacaagtgcgcctccactccctagtgctttgattgctatccagcgtctgggctttggttggcttcgaattgatctgtggatgaatgggacaacgcgggtgtgtctgctggtactagtgtggagacgtcgctttgctccccgccttttaggcagggttcttggaatcttggtgcaggactgcgggccgagtgcgatggaggccttgttgaatggacgaaacaggggtttataaaaatcttctgcaggaagtggctcaaagagttggggcgccattgccattgtatacaacagagcgatctggccttggccaccttccggttttcacatgcacagtagagctagctggtatcacatttgcaggtgatcctgctaagaataagaaacaggctgaaaaaaatgctgcttcagctgcatggtcagcactgaaacaattggtacgcgaggaggtgaattcatccaatgagccagaaaacattgatgagcaggagcagatcaggatcgcccgagccctcctcaattatcgcttgaaggagaagatggcgatggccaactaccctcatgtttcaccattccccaagaaatttcccatgcagcaagagcggaagccttgtttgggtcaatcttgtcaatccagccactcgaagattctccctttattccgccctaaacctaattcaagaccaaagtcgccagcatccaccgacggtgtgtcgaaaacgcctgggcggacggttgagagcctagtagatcaaagtcccaggtcaagatttccagctgcagaggcagctccctatgtgccagttgggcactaccgccgtataccttgccataacatggctccttccgtcacaattaggaccgctgttcctgtcttctctgctccacctctcccacctccccctgcacgcctgcagcagctccctccactcatgagccacccaccgcccattcggatggcatccccagtccgcatgaggccagcgccagcctctccaatgtttgcctcctcatctccagttcaagtgccgaaacctgtgatgcctgttcagctgaaggatgtgcaagatcacccaaggaaggaagcagttccacttccacctgtgatccctgttcaggtgaaggatgcgcaatgccgaccaaggaagagctccatgtctcccgtgattcctgtcccagtaaaggacgcacagcgccggcctgccgcaatcccagtgcagatgaaggacgtgcaaacccaagccccaaaggaaccgctggcagctccaattccagcagccaggccttcagttatgaccgacacgcctgcccaagtcaaggaagcttcagctggtgctaccagcgaggcgccatcgtctgctactggcaataacgctgctgtggaatgcagtgcatcatcggaaactgtcttggcaaggcaatctggggctgcggatgaggacacgctggtactaatgcggaagctaagcatgaggcccgaggctcaatcagcggcagaggcagccaccaccatgcggttggagaccaattgacttgatataaaaaaaatgcgcgccgccatcttctcccagattttgtaattatagccgcctcccgtgcacatccccgttctgttttagttcttgtatgccttgggtttcggattagggctgtctgggcaacctgcattgtggttggtaggaaggaacacctagtttttttttttttttggtctgttgagaagagagagagagaaaaaaaacaatgaggtggtggtggtaggtggcttgcccagtgtttttagttggagacggttatacttccctggacatgcagttggtctgcttttttttacccccaatgatgaggcgggctgtgcggtgcctctagggaaggaaggattctgatgaggcggcagttacatctaac

SEQ ID NO: 48466 - DNA, 2886 bp, Zea Mays
caacaagccaaggatgcaggactgaaataacaaactggtttcaagcctgtaaacaaaatggacggaataggtcaatcccaaaaggttactggagatgtttgagaggctgtccgatgttgcattactcaagcactaagcaaatttggagcaaactaagacgccgatttgctgttctatggtaaaatggactgcaagcttaatatataaaaaaagaacggacacagttttctcagcccctcctgttgacctcttctaaagaagacaatgtagaagaacagaacacagtgactttagcattaaggtgaaaacaggcaatgcaacatgctctcggttactgctcgactgatgttatactcattcaagtaacggaataatgttgggtacaccacggatttgtgatgtttgattatttaaataccaacatgactccatcatagaagtaagcatgaaagttaaaatatatgttaacaatgggttctgcctgttatccaacctaagaatgcaacagaccaaacatcgaactttgcaaaggagtttttttctccgaatcatcaaacagaatttgattagaaacataaaaaaaaaattgaggatagagaggaaaatcaacttatcttacaacagcataatgcataccaaatgcaagaataacgaccgggagcatatgaagcactcataagatcaaacacttctcttcaaaacatgaatataacataaacatgtttatgcctccacagtttagacaaacaaaccccatgtttagcaggataacttgataaataacttaacaaatcagttaccgataaaaagaagatacataaatgagcagggttcaataattgttctcctaaaaagggttcaataattgcagtctgaagttgaaacgaagaaagcaatcctaatccaccaaccgtaccatcccaaaagtatcaccatctgatgtatacactgcatctatatccaaatccgagggacccccaaatatatatcagatatgttcagtcttaccttttttattcaacaagtgctcaacaagcaaggtaccaaacctaaaatgaattatccgtaaagaagaaagttaaattggactaaagcaccaaaccaatcgccaccaaaagaatctggaaaaaagtagcacaccctccgttccaaattatagttataaatttataggtcgttttagcttacattgatttggctatgcatctagatatatgataggtataaatatataataaaagttatgcatctagaaaagctcaaacgacctataaacaaaagaacagacggagtaaaaaatcgcttttgagatgaacgaactagtgctgatgtgatacatgagtaaaagatcaaaaaatgtgcggatcggagttagcacccaacatgctaattgtcaaggataactaaattccctattctcaacgtagcatttcggcaatcagcatctcgagcacctgccggagcctagcgggcaccaggcagcaagcaatagcgtaatcaggaattcctcgctctccgataattaacattcactgaaagcaccagagctcatgagagacaagatgtgaattgccttacatccggccgcgggcgccgtccccttagtgcttcttgctccgcgcgggctgcctggacccgaaggtgaggctgctgatgaggagcagaagaaactgaagaaggatgcaaagaagaagggtgcatcttccaaggagtctactgccaagggttcaaagaagaaggctactgctggtggctctgatgaggaccactcaacctctccaactcgcagccgtgatggtgaccatgcagctgcggacgaggaagaggatgatgatgatgtccagtggcagactgacacttctattgaggctgcgaagcagcgtatgcaggagcagctgagtgcagcaaccgctgaaatggtgatgctgtccactgaggagactgagaagaagaaacatgcaacccacaaagatggcactgctaatggttcagcaaaagaaatacctgatgaaaagcctgccgtcactaagcctagtccctataaagaactgattggagacatcaaggctagcctgggaagtgctcccacacctacccagctcaaggctatgctggcctcctcgacccttccttcccaggacgtgatgaatgctctcctcgaggctctctttgacggtgtgggcaagggatttgcaaaggaggtcgtgaagaacaagaagtaccttgcagttgctgtgccagatgagggtgcccagaccctgctggttcaagccatcgaggcttttggcagcaagtgcaaccccgaggcgctgaaggaggtcccagttgtcctgaaagccctgtacgacggagatatcctggaggaggaaaccgttgtggactggtacaacgctgctgtcgcagctggaaaggactcccaggtcgtcaagaatgccaagccgtttgtcgagtggctccagagcgccgagtctgacgacgaggatggcgatgaatgaagaggcgatgctgctctactgttcatggcttcacttgataatattaattcaataagtttattttgcttgtctggtgtcatcgatgtcagtcttcgtttggtgtcagtcggtctggtgtcgatgtctaaaaactgttattgtcgtgccgcgcagcataccctatgtggttggctgcgtttggtgtcagtccgttttgtgtttggatgtcacggtttattatgttcctgtgggctgccactatatattatagttgcttgggatgtgttttttataaccttttggggtgttgcactttcttattgcattgttttatagtattttaagggttgatgagattttatatcaaacttatatggaatccttatcatgtgttggtactggtgagtcttct

SEQ ID NO: 48467 - DNA, 1952 bp, Zea Mays
atgccggccgatgccgctgccgccgcgcccgcccccgcccccgcaccgcatccacctccggcgatcctggacgctcgcacgggcggccgcatcctacgccgcgcggcggggcatctcgtccacccagcctctctcccgccgctcctcctcgcggcgctcctcctcctcctcttccgctccgctctcctggctggcacgctccgtctcgcctcctttgctgaccgcgacccggccctccgctcccttctcgcccgcctctcctctcccaatccgccatcgccgccgcctcccccacaccacctcccgcgacgccgctcgccgttcacctccccctcgtcctctctctccgacgatgatatcctggtcagccccctcgatcccaccgcctcaactccctccagccgccgcaacgcctcctaccaccatgtccaattcacctcctactccaccgtgcccaaaccctatacgttgccgctcccggcctccgcttcccccttcttcatcgccgtctataatgagacggcgcctccgaagcccgcctcgcggcggggcagcgagcttggcctgcttgacttgaccaggcgggacgcagcggccatcgtcaacctcctcgcgctgctgtcgtccgcacatatcttcgcgatcctcgggtacatcgccgtgcactccattgcgctgggcgcagtgtttgcgtccgtggcggggcaccacagacctgggcagcgtctagtgttcctcctcaccggtgctgccaagggcgctaagagactcacagggttcgcgttcctccggtgggccacgagggacgccgttgtgcagatgctctgcctctggttctttgccgatgtgcacgaccaggcccagctgttcaggctctttgtggtcgccaaactcatgccattctccgcttctgttaatccgtggcttggtgcagcggttgcaggcccagagctcggtggtttctttgttgcctgggctgtttttgatgcagttgtatcggttttgttcactgtggtgccttgggtggttgtcatggaccgtgatccacggccgcctgggcgcaatgctgtgaaggaagggtgctatcttgtatctctgatggcaactgatgccacaatgctcaagtgctgggaaacagttgtttgtggcagcatggggcggctcatcatggtgacatttggtggaaaggtttttggtggatttctgcattcaattgcgcaggtctacttcatggtggtatggctgctgttctactttgcagcaaggtgtaaggaggtgaggctgggtggtcgtcaatttggactggaggatgttgcagctgctcttgatggatttaggtagtgtctagttgccgcttgccgcctggatcatacatgaagagaggtatatttcatggcccatagtgtttattgatgaaacgctgctggtcttggctaagtagaggtttttttagttatcttggtcttctaaatcttgctgagatggtaaatgatttggatgagagagagaacttgacaatgttgtatgtacagtttttgccacagagtggtaatctgcttatagtccaccacatggcatacaaagaaaggatgtttggtccccttttccatggaaggttagaagcaagatacctggtgataggtgttctagctgcaacatgatttgtgaagtttatatacttgtgttgtgccagcaaaatttctctgggtaataggtcaaaacatgtgacgtgcatccaatcataggtaataaccctattgtatacgtggttggctcatgattgaattcctctatataacgattacttttatctggttgatgtctctggcgttttattatgggcgaagtcctggaccagtaaatattttcatgtttgcatagatttttttttgtcacctggctagttcataccaccggttctgtatcctttattctgtcatattttaagcaat

SEQ ID NO: 48468 - DNA, 3082 bp, Zea Mays
atgagatgttcggcggcggtacgctcgctcctcccgctatccctccattctcccgccggacccgccccctcccccatccacacctccgcccttcccctcgccgccgagctcgaagccggcgacgccctccacgcgctcctctccacgctcccgccgtcgctcccttccctcttcccttgcctctccctcctctcgcgccgactcaccccgcactccgtcgccgacgccctcctctgcgacgcgctcccgcccgcgtcccgcatccgcctcttcctcttctccgcgctcaccccgcgcctccgctcccccctcctccactcccgcgccgtcgtccccatcctccttgccaccgacgcggatgccgccatgtacgacgccatcgccgacgcccaagccgccggcctccaaccccccaccgccgcattcgaggcgctcatattcgcccacgcctccgccggccggcaccatgaggcggtcgaggccttctcccggatggagggcgagttcgggtgccgccccaccaccttcgtctacaacgccgtcctcagggtcctcgttgccagtggtggtgccgttccccttgccctggcgctgtataacaggatggtcgccgcaggctgcttgcccaacagggccacgtacaatgtgctcatccatggtctctgcaagcggggaacgccagtggacgcgctcaagctgtttgacgaaatgatctcgaggggtatcactcccaacgtcaagacacacaccatcttactatcgtcgatgtgcaatgctgggcagctgaaggaagctgagaacctgttacattccatggaagacaaagggtgtccacctgatgaagtcacatacaatgcatttcttagtgggttatgcaaggctggcagagttgacgaggccattgagcggctcgaggcactccgtcatactgggacctttgtacttggtttgaaggggtacagttgcttgattgacggtttgtttctggcaggtaggtatgaagagggattccagtgttacatggaggtcttggagcaagctgatgtctcaccggacattgttctgtacactataatgatccgtgggtgtgcggaggctggaagaaccaatgatgcatttgcgttctttgacgagatgaaagagaaaggttttactcctgataccttctgctacaacacgctgctgaaggccctctgtgatgctggtgatctggatggagctcgctcgttgatgtcagagatggtgcggaataatgtagtcctagacatccatacatatactaccatgataattgggttgtgcaaagaacagcttgtagatgaggcaatgcaggtttttgatgggatggtggaagttggctgtcatccaagtgttatgacatacaacgtgctcatcgatggactctaccgggcacacaggcttgaggaagctcggatgcttttctataagatggaggtgggaaataacccttccttgttccttcggttaacacttggtgcaaaccaggtgagagacagtgagaccttgcaaaagctggttgagagtatgtgccagtctgggcaggtgcttaaagcttacaagcttcttcgaggtataatagacagtggtgtggtccctgatgttgtcacgtataacacactgctaaatggactgtgtaaagtgaggaatcttgatggagccctgaggctcttcagggagcttcaagtgaaggggttccctcttgatgagatcacttatgggactcttatcgacagcctcttgagggcgcacagatataatgatgccttgacattgttccaggacatattacacagtggtggcactcctagtatgccgatctacaatagcatgatgagatcgctttgtaggatgcagaaattgtcacaagcaatcaacctctggtttgatcacctgccccgaaagtacaatctcttagcccaagatgaagtaatttctagtgcccgaaaaaagtttgaagagggttgcctgcatgaagcagttagggagctaatcaagattgatcaagaatatggttcagtaaattcatgtccttacaccatttggctcataggcctaattcaagcagggagaatagaagatgccctcaagatttttcatatacttgaggaatcaggcattgatatcacaccagcttgctgtgttcatcttagcaaatacttatgtttggaaggaaatctaggtgcggcggttgatgttatgctctatacattgaagaaaggattcaccatgcgaagatatgtaggcaaccggttactttgtagtctttgtatccatcacaggaggaaggacgcacaggcccttgcatggcgaatgcatcttgtaggatatgatatggatgcatatcttcatgagtctacaaaaggtttgttatacaatcaatagaaatgtccatagtgtttgtagggctacagggcttgctctcgagagaaatggtgaaatggtggtttctagtgactctcaatcttccttctcacctcatatttttttcaattaatcttttttaagcgggacaagttaaaatgggttcttcatccaggaaaaaggttggattttttaagtatattttttatttgactttttttgtgaattcgaacacagcctatcagccaagcgatttcacaaagtgattctgattcatcatatccaaaacgtttctacaagaatccggacatccggagccctgccatttaacaaattagggtagttaacacccagagtgatatctagctctacagacatttaacaaattcaacatcagaagtgaaactaaggccctgtttgaatgcactataaccaatagttagctgctaaaattagctaaagatatccaaacaactcaactaatagtttaggtattagctacttttaattggagacatccaaaaaccccccaactaatagagtccagctaactattagctacatcctcaaatacccattagttattagttcgttgaacccacagctaaaattagctaatagttagctagctatttgttagtcagcaaattccactagtaactttttagccagctaactattagatctagtacattcaaac

SEQ ID NO: 48469 - DNA, 2430 bp, Zea Mays
atgagatgttcggcggcggtacgctcgctcctcccgctatccctccattctcccgccggacccgccccctcccccatccacacctccgcccttcccctcgccgccgagctcgaagccggcgacgccctccacgcgctcctctccacgctcccgccgtcgctcccttccctcttcccttgcctctccctcctctcgcgccgactcaccccgcactccgtcgccgacgccctcctctgcgacgcgctcccgcccgcgtcccgcatccgcctcttcctcttctccgcgctcaccccgcgcctccgctcccccctcctccactcccgcgccgtcgtccccatcctccttgccaccgacgcggatgccgccatgtacgacgccatcgccgacgcccaagccgccggcctccaaccccccaccgccgcattcgaggcgctcatattcgcccacgcctccgccggccggcaccatgaggcggtcgaggccttctcccggatggagggcgagttcgggtgccgccccaccaccttcgtctacaacgccgtcctcagggtcctcgttgccagtggtggtgccgttccccttgccctggcgctgtataacaggatggtcgccgcaggctgcttgcccaacagggccacgtacaatgtgctcatccatggtctctgcaagcggggaacgccagtggacgcgctcaagctgtttgacgaaatgatctcgaggggtatcactcccaacgtcaagacacacaccatcttactatcgtcgatgtgcaatgctgggcagctgaaggaagctgagaacctgttacattccatggaagacaaagggtgtccacctgatgaagtcacatacaatgcatttcttagtgggttatgcaaggctggcagagttgacgaggccattgagcggctcgaggcactccgtcatactgggacctttgtacttggtttgaaggggtacagttgcttgattgacggtttgtttctggcaggtaggtatgaagagggattccagtgttacatggaggtcttggagcaagctgatgtctcaccggacattgttctgtacactataatgatccgtgggtgtgcggaggctggaagaaccaatgatgcatttgcgttctttgacgagatgaaagagaaaggttttactcctgataccttctgctacaacacgctgctgaaggccctctgtgatgctggtgatctggatggagctcgctcgttgatgtcagagatggtgcggaataatgtagtcctagacatccatacatatactaccatgataattgggttgtgcaaagaacagcttgtagatgaggcaatgcaggtttttgatgggatggtggaagttggctgtcatccaagtgttatgacatacaacgtgctcatcgatggactctaccgggcacacaggcttgaggaagctcggatgcttttctataagatggaggtgggaaataacccttccttgttccttcggttaacacttggtgcaaaccaggtgagagacagtgagaccttgcaaaagctggttgagagtatgtgccagtctgggcaggtgcttaaagcttacaagcttcttcgaggtataatagacagtggtgtggtccctgatgttgtcacgtataacacactgctaaatggactgtgtaaagtgaggaatcttgatggagccctgaggctcttcagggagcttcaagtgaaggggttccctcttgatgagatcacttatgggactcttatcgacagcctcttgagggcgcacagatataatgatgccttgacattgttccaggacatattacacagtggtggcactcctagtatgccgatctacaatagcatgatgagatcgctttgtaggatgcagaaattgtcacaagcaatcaacctctggtttgatcacctgccccgaaagtacaatctcttagcccaagatgaagtaatttctagtgcccgaaaaaagtttgaagagggttgcctgcatgaagcagttagggagctaatcaagattgatcaagaatatggttcagtaaattcatgtccttacaccatttggctcataggcctaattcaagcagggagaatagaagatgccctcaagatttttcatatacttgaggaatcaggcattgatatcacaccagcttgctgtgttcatcttagcaaatacttatgtttggaaggaaatctaggtgcggcggttgatgttatgctctatacattgaagaaaggattcaccatgcgaagatatgtaggcaaccggttactttgtagtctttgtatccatcacaggaggaaggacgcacaggcccttgcatggcgaatgcatcttgtaggatatgatatggatgcatatcttcatgagtctacaaaagttacaggaacttacatggagtacagcagtctctgtcacaatatcctg

SEQ ID NO: 48470 - DNA, 2424 bp, Zea Mays
atgagatgttcggcggcggtacgctcgctcctcccgctatccctccattctcccgccggacccgccccctcccccatccacacctccgcccttcccctcgccgccgagctcgaagccggcgacgccctccacgcgctcctctccacgctcccgccgtcgctcccttccctcttcccttgcctctccctcctctcgcgccgactcaccccgcactccgtcgccgacgccctcctctgcgacgcgctcccgcccgcgtcccgcatccgcctcttcctcttctccgcgctcaccccgcgcctccgctcccccctcctccactcccgcgccgtcgtccccatcctccttgccaccgacgcggatgccgccatgtacgacgccatcgccgacgcccaagccgccggcctccaaccccccaccgccgcattcgaggcgctcatattcgcccacgcctccgccggccggcaccatgaggcggtcgaggccttctcccggatggagggcgagttcgggtgccgccccaccaccttcgtctacaacgccgtcctcagggtcctcgttgccagtggtggtgccgttccccttgccctggcgctgtataacaggatggtcgccgcaggctgcttgcccaacagggccacgtacaatgtgctcatccatggtctctgcaagcggggaacgccagtggacgcgctcaagctgtttgacgaaatgatctcgaggggtatcactcccaacgtcaagacacacaccatcttactatcgtcgatgtgcaatgctgggcagctgaaggaagctgagaacctgttacattccatggaagacaaagggtgtccacctgatgaagtcacatacaatgcatttcttagtgggttatgcaaggctggcagagttgacgaggccattgagcggctcgaggcactccgtcatactgggacctttgtacttggtttgaaggggtacagttgcttgattgacggtttgtttctggcaggtaggtatgaagagggattccagtgttacatggaggtcttggagcaagctgatgtctcaccggacattgttctgtacactataatgatccgtgggtgtgcggaggctggaagaaccaatgatgcatttgcgttctttgacgagatgaaagagaaaggttttactcctgataccttctgctacaacacgctgctgaaggccctctgtgatgctggtgatctggatggagctcgctcgttgatgtcagagatggtgcggaataatgtagtcctagacatccatacatatactaccatgataattgggttgtgcaaagaacagcttgtagatgaggcaatgcaggtttttgatgggatggtggaagttggctgtcatccaagtgttatgacatacaacgtgctcatcgatggactctaccgggcacacaggcttgaggaagctcggatgcttttctataagatggaggtgggaaataacccttccttgttccttcggttaacacttggtgcaaaccaggtgagagacagtgagaccttgcaaaagctggttgagagtatgtgccagtctgggcaggtgcttaaagcttacaagcttcttcgaggtataatagacagtggtgtggtccctgatgttgtcacgtataacacactgctaaatggactgtgtaaagtgaggaatcttgatggagccctgaggctcttcagggagcttcaagtgaaggggttccctcttgatgagatcacttatgggactcttatcgacagcctcttgagggcgcacagatataatgatgccttgacattgttccaggacatattacacagtggtggcactcctagtatgccgatctacaatagcatgatgagatcgctttgtaggatgcagaaattgtcacaagcaatcaacctctggtttgatcacctgccccgaaagtacaatctcttagcccaagatgaagtaatttctagtgcccgaaaaaagtttgaagagggttgcctgcatgaagcagttagggagctaatcaagattgatcaagaatatggttcagtaaattcatgtccttacaccatttggctcataggcctaattcaagcagggagaatagaagatgccctcaagatttttcatatacttgaggaatcaggcattgatatcacaccagcttgctgtgttcatcttagcaaatacttatgtttggaaggaaatctaggtgcggcggttgatgttatgctctatacattgaagaaaggattcaccatgcgaagatatgtaggcaaccggttactttgtagtctttgtatccatcacaggaggaaggacgcacaggcccttgcatggcgaatgcatcttgtaggatatgatatggatgcatatcttcatgagtctacaaaaggaacttacatggagtacagcagtctctgtcacaatatcctg

SEQ ID NO: 48471 - DNA, 1880 bp, Zea Mays
gctagatgaggtcaggacatcgttctcatccctgaactccggtttgtttcacgtatacgccgtggatgccgctggggtgctcgcctgaagccgttgtccatcagctggactcgttcctggtccaagggctttttatatactggacgactttatccctcgtccaactatccaaagcaagaacaaacaatgccaccatcgaggctagcggagagagagagggtgaagctgccgcgtataggggagatagagacttcagcggcgggaatcgctgaccaccgacaccgagcgggagatcgagcacaccagtgtcaagaaagatgcgacccaaagacccatcggtgaacagccgctcatcgagtatcagcatcaccgctcgagcttcgagcttcacctgtcgtcgccgtctcaggtaagcgtcctctctgttgtgatcaccgctttgtttgggtgcgtctacggtctgtcctgtgctcggggactctgggtggcgccgggcagtgcaccgtcgtggacggcgggcatgccatggttagcttgcggagagagatgggagtgtgcggttgaagacaagcatgtgtcactaattggcaattggatggcccaatcattttgggtgtatcgcttcatcattcgtagtttgaaacgtcgatctccgattgtgtggctctgattagattaggagtagcgatcggttttgaagcactggtcgagtaatagacggtgtagattagatctgtgttatttaaaaggtgggtcgtcaatcccatagtggacagctaggattatatcgtcacatatcccttcgtgatttggatcggagccgcagatctagcgatcaacggctcatgtccgtctgcatgtgtgttagccgggtaataattcataaagagactctcgactttatcctatttaacccgcggtctcgactagtgctaagagtgttaccactaggtcctagaatttacaagtgaccctctgagatcctagagaatagtggtcgtagttggtggaacttgaaaatacccaaaataaatctggaaactagttttcactgtgaaactaaatataaaatcttagaaaattcatatcttctcttttttaactccgattagatccattcaaattgcgttagcttcatagtaaagttacttacgcaataacaacactatttgtatcatgtcacatacttctataaccatatatttgtttaaatctatgtttagtagattaagcttgctaatcaaagttaataggtctataattataacctaactaaatatgatctctacacaagtaccatagattaagattgaattaattagttatttggaatatattttctcacatgagtatattaatcaaacctagattatagttctccttgttgatcacctaaaacttataaagcccataactttctcatttaactccgattttagtggttctcgaacctacgatctcgtagagacgcgtagaatattcttacgctatttattcatatgctttggtgtaatgttaccatatacattatttgcttgattgtatgattgctacgagtagcagcgaggtcacgagaaacccgaagaccaagttggtgaagtacttggaatctcaagtaaaaggcaagttgtgcccttgatcactcttctttacctaataatgttctctattaatcactatgacatgctcaagttgattttgatgagacctaataggtttccttagttttgtttaccccataccttgcaaacaaatgaactatttggtacacttgctaatgctctacctagttttgggattaatgttataatgaattatgatcatgttccattaatactactggtttaattattgttcatgttaagattattatattaaat

SEQ ID NO: 48472 - DNA, 636 bp, Zea Mays
cctgctggccgcagcatgcaactgtgtgggacccacgcaattgagcccccttctccctccgtattgctcgcatccatcgtaacaacctcacgaagtgcttaatccaatcctccacccacgtcgtggataaaagcaaggccatgaccccctgcgcatatctgcctacccatgcggtcctcccccaaacgtcttcatcacggacgaagccaagaagctgccagcgtcgatccacacatatcgtttggtcctcctctggcgccaagagatttgctgccggtccaacctcggcgactatcggagagggagcagagtgcatggcgaagtcgtgcggggtgcaacgtccggtgccgctgttacctgtggccgtggtaccgctgtcatctgttgcttccgaaaagccggtgccttctgtgggcctcgacaacctggctgtcgctgctgcaagcccagtcgttgccgcgcgctctgctccaggctgggacaccatcgctgcgctagataaagcttggagacgaagagagccaccgtgtggctgctaaggcgaggtcgaagccactatccagtatcgagtgcgaggttacgagtcatctgaagatcatcctggtacctagaatctcaagtcccaggcaagttgtg

SEQ ID NO: 48473 - DNA, 2598 bp, Zea Mays
agcttgtaagcatgttaaatggcagttctatttgattatgatcatgtgtgtttatgccttttaccttcgccacctgaagacaacatcatcttagcttttgccacaagcccacaacttatcattggtttttagcactttagttggatatcacatgttgaccatttttttaagccatcacatggttccttacttgaccatgggctgttcaaaggtctattaagataataatgatgttgctaccttaccctctctgcccaaaaacacacacatacaaacaccaaaatgtaaggtgttcttttttgttttaacctaagtcaaactttgctttgccgaagtttatagaaaaaacgcaccaacatgtacaacatcaagttggtttcatcaagtccaccatgatactgcatttatttggtatagtagatggctagatgctagacccctcctattccaaatgttgtttaagacttgtgcacaaggattaagaatgtgggtcaaatggccttgttactcttcattattctgcatttggaaagagggctcattcatctgtgagagtattggcatttattaagtagggaagagaaggggtaaaagatgcatagaagttttaggctgacttgcattttgagaatagttgggagggctagaaagacctacatttgtaaattttcctttttgggggtgggtggtactacattttccataaatttctcataagttagagaaatttgacttgacaaaactaaaacacctgatgttttggaaatggagtatacattttggtcagttagttttatcttgttcatgcaaatgcttacagtttttagcggtgtatcatgcttggctggtacctgaactatttgggcatgacgtttcaagggatgcatttgttgagtactggatggatgacaataagattacaatggatatggctagtcaaatatttgaaattttaagaaaaccaggttgcacatatctcactcaggatgacttcaagcctgtcctgaaagaactacttgcaactcaccctggcttagagtttttacaagggacccccgagtttcaggagagatatgcggagactgtaatatacagaatcttttactccataaatagatctgggaatggccatctgactctcagagagctcaaacgtggaaatttaattgctgcacttcagcagttagatgaggaagaagatatcaacaaagtgttgagatacttctcatatgagcacttttatgtgatctattgcaaattctgggagctggatgcagaccacgattttttgattgataaggagaacctcatcaaatatggaaatcattcgttgacctataggatagttgatagaattttcacacagataccaaggaaattcacaagcatgacagaagggaagatgggctatgaagactttgtttattttatattatcagaggaagacaaatcatctgagcctagtcttgaatactggtttaagtgcatcgatcttgatggtaatggtattttaacttacaatgaaatgcaatttttctatgaggagcaattgcaccgaatggagtgcatggcacaggaacctgtggtttttggggacatattatgccagatgattgatatgattggaccagagaatgagagctattttactctacgggacttaaaacggtgtaaactctcaggaaatatattcaatattcttttcaatctgaacaagttcatggcatttgaaactcgtgatccattcctcattcgccaggaacgtgaaaatccaacgctgactgagtgggatcggtttgcgcatagagaatatattagattgtccatggaagaagatggtgaagatgcttcaaatggaagtggtgatgtgtgggacgaatcacttgaggctccattctgaatggtatcttgctgcacgaatttggttgaacatgggtgattatggttgtgaagcggaagaattgtaaagtcggtggctacagtgctgaggccattgtaggctcacagcagattcagtgacactgaagactacttacaagttttactgtgcagatctgattcgatatttttggctggaaaattggggaggttggtgggcgccctgcagtttcaagtcaacaccctcagcagtcgcaaatgataatatagtgatggacccttcctggtcgactagttgcatttgtgttctgattggtccttagggtggatatctgttaattcaattgttgtgctaaaattttggagctgaactgttaatgtttgcctgcattttctttgttaatcttggaagcgtgggctagcacttccatcaaactaagatcgtggcatgtagctttccagttctgctttatcatcagcgtgttgttctgtaattcttggtgcatcttgggcggatggatactgttgtcattttgtaacatcaccgagaagctgtggattgggtgcatagtaacacaaaggtagataacattgtcaatccaatttttgttaaggtgtaaattcagagaagttttaggtttcaagtactattcgttgggttcgatctcttatctgaaagtgctttccctattgagctacttatgtcgtgatgagcggaaa

SEQ ID NO: 48474 - DNA, 2785 bp, Zea Mays
gttttgggactaggcccgcaacgttcaagtggttagtttgcgatctcgctgtattccactcccatcacgcgtcgcactgccacaccgtggcgcagtgtggccgtcgctgtcgagcatttgaaccgcgtcaaattcaaagcatttttaatgcgtctcagcgtctgttgtgcgtctggctgcctaatccaaaaattgcgtcaaatccgaattttcattccgtgtatgcttggccgcctaatccaagttcttaaggttcggtgcgggggaacggaattccgaattccaagcccgcttcccccaacaagagccctcgagatcggaatccgcgagtaaaataacccgcaaaagggtgctttatttaaagggatcagtgtgactgagaggggagggtttccagtcagtcatttatgaatcctgaggcctgtgcttactagagggagggcaaggctcgttgggatccgggatgaaggggagaaatgactcggggcacagcaagaggccggttgtgctgtgctgtgtgatgattgtgtgcctatgtctcctcttcttgtatttctcgggctccaatggacaggctgggagcgccgcatttgagtacgggaccaaattctcacggtcacttggatggggcagtgatgatggtgaggatggctctgaagagtccatttttggaaccggggatgcagatgatgtcaagcccaagagctttcctgtgtgtgatgaccggcactctgaactgatcccctgcttggataggaacttgatatatcaaatgaggctgaagctggatttaaacctgatggagcactatgagaggcattgccctccacctgaaaggcgttttaattgcttgattcctccaccacatggctataaggttcctataaaatggccaaaaagtcgtgatgtagtgtggaaagcaaacattccacacactcaccttgcaaaagagaagtcagaccagaactggatggttgaagctggtgaaaagatcaagtttccaggtggtggaacccattttcaccatggagctgacaaatatatatcaaatattgcaaatatgctaaatttcaaggataacaatataaacaatgatgggatgcttcgtacagttcttgatgttggttgtggagttgctagttttggaggatatcttctttcttctaatgtgatagcaatgtctttggcaccaaatgatgtgcatcagaatcagattcagtttgcactcgaaagagggatccctgcatatcttggtgttttgggaacaaaaaggcttccgtacccaagtagatcatttgaactagcccattgttcacgttgtaggatcgattggcttcaaagagatgggattcttctgcttgaactagatagattgctcaggcctggaggttattttgcttactcctctcctgaagcatatgcacaggatgaggaggatctccgaatctggaaagaaatgagtgcccttgtagaaaggatgtgctggaaaatcgcagagaaaagaaaccaaactgttatttgggtgaaacctctggacaatgattgttacaagaggcgagcacatggtacaaagccacctctatgcaaaagtggcaatgatccagattcagtatggggagttccaatggaagcttgcattactccgtatcctgaacaaatgcacagagatgggggaactgggctagctccctggcctgcccgattgacagccccgcctccccgtcttgctgatttgtacattactgctgacacatttgaaaaggacacggaaatgtggcagcaaagagtagaaaactattggagtttgctgggcccaaaggtaaaaccagacactattagaaacatcatggacatgaaggcaaactttgggtcatttgctgctgcactcaaggagaaagacgtatgggtgatgaatgttgtgccacatgatggaccaagcaccctcaagataatctatgatagagggctgataggcagcaatcacgactggtgtgaagccttctcaacctatcctcgaacatacgatcttctccacgcatgggcagtcttttctgaccttgataaaagaggctgcagtgccgaagacctgctccttgaaatggatcgtatcctcaggccgactgggtttgccatcgtgagggacaagggcaccgtcattgagttcatcaagaagtacctccacgcacttcactgggaggcattgactgtcgtggacgctgagcccagcccagaatcagaggagagcgaaatgatcttgataatccggaagaagctgtggctaccaaaagcaggcccgcaggattccggcacgtagttcttctcgtacctgttcctctcccagcacctgcagctcagaagccaggcgcagctgcaccatccaaaatggttcgacacttgtagctcctgagatagagtcagtcatgatttctagccctaccgcccacatgaagataggttgtttacgaggatactgcaagtagtatgtagcaggcttggattaaaaaaaaggcccttttttgtcgcgacagatatggattggtgtttgttatctagtttggttaggaaataaacattctttttcttttaggtgtttcgtgtcctttttttttgaagtctgctatagtctgtagcaagtgtatttggtgttttcttgaaagaactactgcgctcacatttttgggatatgtgctttgccctagagcctcaaggctgcgggtcctcagctcgaaactactcgtgcaaatctcaaccgggagagcacttcaatataaacaggtaattttac

SEQ ID NO: 48475 - DNA, 2814 bp, Zea Mays
gccgtcgctgtcgagcatttgaaccgcgtcaaattcaaagcatttttaatgcgtctcagcgtctgttgtgcgtctggctgcctaatccaaaaattgcgtcaaatccgaattttcattccgtgtatgcttggccgcctaatccaagttcttaaggttcggtgcgggggaacggaattccgaattccaagcccgcttcccccaacaagagccctcgagatcggaatccgcgagtaaaataacccgcaaaagggtgctttatttaaaggggaaatgacccgtttaattgcatcttgtacaagtcttggggcgtttggtgggagagtttatttttttctcgttgatttccgttatcggggggcttccatcttggttcagttctgcaggctgtgtttgtgatcagtgtgactgagaggggagggtttccagtcagtcatttatgaatcctgaggcctgtgcttactagagggagggcaaggctcgttgggatccgggatgaaggggagaaatgactcggggcacagcaagaggccggttgtgctgtgctgtgtgatgattgtgtgcctatgtctcctcttcttgtatttctcgggctccaatggacaggctgggagcgccgcatttgagtacgggaccaaattctcacggtcacttggatggggcagtgatgatggtgaggatggctctgaagagtccatttttggaaccggggatgcagatgatgtcaagcccaagagctttcctgtgtgtgatgaccggcactctgaactgatcccctgcttggataggaacttgatatatcaaatgaggctgaagctggatttaaacctgatggagcactatgagaggcattgccctccacctgaaaggcgttttaattgcttgattcctccaccacatggctataaggttcctataaaatggccaaaaagtcgtgatgtagtgtggaaagcaaacattccacacactcaccttgcaaaagagaagtcagaccagaactggatggttgaagctggtgaaaagatcaagtttccaggtggtggaacccattttcaccatggagctgacaaatatatatcaaatattgcaaatatgctaaatttcaaggataacaatataaacaatgatgggatgcttcgtacagttcttgatgttggttgtggagttgctagttttggaggatatcttctttcttctaatgtgatagcaatgtctttggcaccaaatgatgtgcatcagaatcagattcagtttgcactcgaaagagggatccctgcatatcttggtgttttgggaacaaaaaggcttccgtacccaagtagatcatttgaactagcccattgttcacgttgtaggatcgattggcttcaaagagatgggattcttctgcttgaactagatagattgctcaggcctggaggttattttgcttactcctctcctgaagcatatgcacaggatgaggaggatctccgaatctggaaagaaatgagtgcccttgtagaaaggatgtgctggaaaatcgcagagaaaagaaaccaaactgttatttgggtgaaacctctggacaatgattgttacaagaggcgagcacatggtacaaagccacctctatgcaaaagtggcaatgatccagattcagtatggggagttccaatggaagcttgcattactccgtatcctgaacaaatgcacagagatgggggaactgggctagctccctggcctgcccgattgacagccccgcctccccgtcttgctgatttgtacattactgctgacacatttgaaaaggacacggaaatgtggcagcaaagagtagaaaactattggagtttgctgggcccaaaggtaaaaccagacactattagaaacatcatggacatgaaggcaaactttgggtcatttgctgctgcactcaaggagaaagacgtatgggtgatgaatgttgtgccacatgatggaccaagcaccctcaagataatctatgatagagggctgataggcagcaatcacgactggtgtgaagccttctcaacctatcctcgaacatacgatcttctccacgcatgggcagtcttttctgaccttgataaaagaggctgcagtgccgaagacctgctccttgaaatggatcgtatcctcaggccgactgggtttgccatcgtgagggacaagggcaccgtcattgagttcatcaagaagtacctccacgcacttcactgggaggcattgactgtcgtggacgctgagcccagcccagaatcagaggagagcgaaatgatcttgataatccggaagaagctgtggctaccaaaagcaggcccgcaggattccggcacgtagttcttctcgtacctgttcctctcccagcacctgcagctcagaagccaggcgcagctgcaccatccaaaatggttcgacacttgtagctcctgagatagagtcagtcatgatttctagccctaccgcccacatgaagataggttgtttacgaggatactgcaagtagtatgtagcaggcttggattaaaaaaaaggcccttttttgtcgcgacagatatggattggtgtttgttatctagtttggttaggaaataaacattctttttcttttaggtgtttcgtgtcctttttttttgaagtctgctatagtctgtagcaagtgtatttggtgttttcttgaaagaactactgcgctcacatttttgggatatgtgctttgccctagagcctcaaggctgcgggtcctcagctcgaaactactcgtgcaaatctcaaccgggagagcacttcaatataaacaggtaattttac

SEQ ID NO: 48476 - DNA, 2631 bp, Zea Mays
cgagcatttgaaccgcgtcaaattcaaagcatttttaatgcgtctcagcgtctgttgtgcgtctggctgcctaatccaaaaattgcgtcaaatccgaattttcattccgtgtatgcttggccgcctaatccaagttcttaaggttcggtgcgggggaacggaattccgaattccaagcccgcttcccccaacaagagccctcgagatcggaatccgcgagtaaaataacccgcaaaagggtgctttatttaaagggatcagtgtgactgagaggggagggtttccagtcagtcatttatgaatcctgaggcctgtgcttactagagggagggcaaggctcgttgggatccgggatgaaggggagaaatgactcggggcacagcaagaggccggttgtgctgtgctgtgtgatgattgtgtgcctatgtctcctcttcttgtatttctcgggctccaatggacaggctgggagcgccgcatttgagtacgggaccaaattctcacggtcacttggatggggcagtgatgatggtgaggatggctctgaagagtccatttttggaaccggggatgcagatgatgtcaagcccaagagctttcctgaacttgatatatcaaatgaggctgaagctggatttaaacctgatggagcactatgagaggcattgccctccacctgaaaggcgttttaattgcttgattcctccaccacatggctataaggttcctataaaatggccaaaaagtcgtgatgtagtgtggaaagcaaacattccacacactcaccttgcaaaagagaagtcagaccagaactggatggttgaagctggtgaaaagatcaagtttccaggtggtggaacccattttcaccatggagctgacaaatatatatcaaatattgcaaatatgctaaatttcaaggataacaatataaacaatgatgggatgcttcgtacagttcttgatgttggttgtggagttgctagttttggaggatatcttctttcttctaatgtgatagcaatgtctttggcaccaaatgatgtgcatcagaatcagattcagtttgcactcgaaagagggatccctgcatatcttggtgttttgggaacaaaaaggcttccgtacccaagtagatcatttgaactagcccattgttcacgttgtaggatcgattggcttcaaagagatgggattcttctgcttgaactagatagattgctcaggcctggaggttattttgcttactcctctcctgaagcatatgcacaggatgaggaggatctccgaatctggaaagaaatgagtgcccttgtagaaaggatgtgctggaaaatcgcagagaaaagaaaccaaactgttatttgggtgaaacctctggacaatgattgttacaagaggcgagcacatggtacaaagccacctctatgcaaaagtggcaatgatccagattcagtatggggagttccaatggaagcttgcattactccgtatcctgaacaaatgcacagagatgggggaactgggctagctccctggcctgcccgattgacagccccgcctccccgtcttgctgatttgtacattactgctgacacatttgaaaaggacacggaaatgtggcagcaaagagtagaaaactattggagtttgctgggcccaaaggtaaaaccagacactattagaaacatcatggacatgaaggcaaactttgggtcatttgctgctgcactcaaggagaaagacgtatgggtgatgaatgttgtgccacatgatggaccaagcaccctcaagataatctatgatagagggctgataggcagcaatcacgactggtgtgaagccttctcaacctatcctcgaacatacgatcttctccacgcatgggcagtcttttctgaccttgataaaagaggctgcagtgccgaagacctgctccttgaaatggatcgtatcctcaggccgactgggtttgccatcgtgagggacaagggcaccgtcattgagttcatcaagaagtacctccacgcacttcactgggaggcattgactgtcgtggacgctgagcccagcccagaatcagaggagagcgaaatgatcttgataatccggaagaagctgtggctaccaaaagcaggcccgcaggattccggcacgtagttcttctcgtacctgttcctctcccagcacctgcagctcagaagccaggcgcagctgcaccatccaaaatggttcgacacttgtagctcctgagatagagtcagtcatgatttctagccctaccgcccacatgaagataggttgtttacgaggatactgcaagtagtatgtagcaggcttggattaaaaaaaaggcccttttttgtcgcgacagatatggattggtgtttgttatctagtttggttaggaaataaacattctttttcttttaggtgtttcgtgtcctttttttttgaagtctgctatagtctgtagcaagtgtatttggtgttttcttgaaagaactactgcgctcacatttttgggatatgtgctttgccctagagcctcaaggctgcgggtcctcagctcgaaactactcgtgcaaatctcaaccgggagagcacttcaatataaacaggtaattttac

SEQ ID NO: 48477 - DNA, 2495 bp, Zea Mays
gacctttcctcttcgtgatctgtcccccacttcactgctgctgctgctgtttctgtttcacccttgggcattgaagatcagtgtgactgagaggggagggtttccagtcagtcatttatgaatcctgaggcctgtgcttactagagggagggcaaggctcgttgggatccgggatgaaggggagaaatgactcggggcacagcaagaggccggttgtgctgtgctgtgtgatgattgtgtgcctatgtctcctcttcttgtatttctcgggctccaatggacaggctgggagcgccgcatttgagtacgggaccaaattctcacggtcacttggatggggcagtgatgatggtgaggatggctctgaagagtccatttttggaaccggggatgcagatgatgtcaagcccaagagctttcctgtgtgtgatgaccggcactctgaactgatcccctgcttggataggaacttgatatatcaaatgaggctgaagctggatttaaacctgatggagcactatgagaggcattgccctccacctgaaaggcgttttaattgcttgattcctccaccacatggctataaggttcctataaaatggccaaaaagtcgtgatgtagtgtggaaagcaaacattccacacactcaccttgcaaaagagaagtcagaccagaactggatggttgaagctggtgaaaagatcaagtttccaggtggtggaacccattttcaccatggagctgacaaatatatatcaaatattgcaaatatgctaaatttcaaggataacaatataaacaatgatgggatgcttcgtacagttcttgatgttggttgtggagttgctagttttggaggatatcttctttcttctaatgtgatagcaatgtctttggcaccaaatgatgtgcatcagaatcagattcagtttgcactcgaaagagggatccctgcatatcttggtgttttgggaacaaaaaggcttccgtacccaagtagatcatttgaactagcccattgttcacgttgtaggatcgattggcttcaaagagatgggattcttctgcttgaactagatagattgctcaggcctggaggttattttgcttactcctctcctgaagcatatgcacaggatgaggaggatctccgaatctggaaagaaatgagtgcccttgtagaaaggatgtgctggaaaatcgcagagaaaagaaaccaaactgttatttgggtgaaacctctggacaatgattgttacaagaggcgagcacatggtacaaagccacctctatgcaaaagtggcaatgatccagattcagtatggggagttccaatggaagcttgcattactccgtatcctgaacaaatgcacagagatgggggaactgggctagctccctggcctgcccgattgacagccccgcctccccgtcttgctgatttgtacattactgctgacacatttgaaaaggacacggaaatgtggcagcaaagagtagaaaactattggagtttgctgggcccaaaggtaaaaccagacactattagaaacatcatggacatgaaggcaaactttgggtcatttgctgctgcactcaaggagaaagacgtatgggtgatgaatgttgtgccacatgatggaccaagcaccctcaagataatctatgatagagggctgataggcagcaatcacgactggtgtgaagccttctcaacctatcctcgaacatacgatcttctccacgcatgggcagtcttttctgaccttgataaaagaggctgcagtgccgaagacctgctccttgaaatggatcgtatcctcaggccgactgggtttgccatcgtgagggacaagggcaccgtcattgagttcatcaagaagtacctccacgcacttcactgggaggcattgactgtcgtggacgctgagcccagcccagaatcagaggagagcgaaatgatcttgataatccggaagaagctgtggctaccaaaagcaggcccgcaggattccggcacgtagttcttctcgtacctgttcctctcccagcacctgcagctcagaagccaggcgcagctgcaccatccaaaatggttcgacacttgtagctcctgagatagagtcagtcatgatttctagccctaccgcccacatgaagataggttgtttacgaggatactgcaagtagtatgtagcaggcttggattaaaaaaaaggcccttttttgtcgcgacagatatggattggtgtttgttatctagtttggttaggaaataaacattctttttcttttaggtgtttcgtgtcctttttttttgaagtctgctatagtctgtagcaagtgtatttggtgttttcttgaaagaactactgcgctcacatttttgggatatgtgctttgccctagagcctcaaggctgcgggtcctcagctcgaaactactcgtgcaaatctcaaccgggagagcacttcaatataaacaggtaattttac

SEQ ID NO: 48478 - DNA, 2426 bp, Zea Mays
cccacttcactgctgctgctgctgtttctgtttcacccttgggcattgaagatcagtgtgactgagaggggagggtttccagtcagtcatttatgaatcctgaggcctgtgcttactagagggagggcaaggctcgttgggatccgggatgaaggggagaaatgactcggggcacagcaagaggccggttgtgctgtgctgtgtgatgattgtgtgcctatgtctcctcttcttgtatttctcgggctccaatggacaggctgggagcgccgcatttgagtacgggaccaaattctcacggtcacttggatggggcagtgatgatggtgaggatggctctgaagagtccatttttggaaccggggatgcagatgatgtcaagcccaagagctttcctgaacttgatatatcaaatgaggctgaagctggatttaaacctgatggagcactatgagaggcattgccctccacctgaaaggcgttttaattgcttgattcctccaccacatggctataaggttcctataaaatggccaaaaagtcgtgatgtagtgtggaaagcaaacattccacacactcaccttgcaaaagagaagtcagaccagaactggatggttgaagctggtgaaaagatcaagtttccaggtggtggaacccattttcaccatggagctgacaaatatatatcaaatattgcaaatatgctaaatttcaaggataacaatataaacaatgatgggatgcttcgtacagttcttgatgttggttgtggagttgctagttttggaggatatcttctttcttctaatgtgatagcaatgtctttggcaccaaatgatgtgcatcagaatcagattcagtttgcactcgaaagagggatccctgcatatcttggtgttttgggaacaaaaaggcttccgtacccaagtagatcatttgaactagcccattgttcacgttgtaggatcgattggcttcaaagagatgggattcttctgcttgaactagatagattgctcaggcctggaggttattttgcttactcctctcctgaagcatatgcacaggatgaggaggatctccgaatctggaaagaaatgagtgcccttgtagaaaggatgtgctggaaaatcgcagagaaaagaaaccaaactgttatttgggtgaaacctctggacaatgattgttacaagaggcgagcacatggtacaaagccacctctatgcaaaagtggcaatgatccagattcagtatggggagttccaatggaagcttgcattactccgtatcctgaacaaatgcacagagatgggggaactgggctagctccctggcctgcccgattgacagccccgcctccccgtcttgctgatttgtacattactgctgacacatttgaaaaggacacggaaatgtggcagcaaagagtagaaaactattggagtttgctgggcccaaaggtaaaaccagacactattagaaacatcatggacatgaaggcaaactttgggtcatttgctgctgcactcaaggagaaagacgtatgggtgatgaatgttgtgccacatgatggaccaagcaccctcaagataatctatgatagagggctgataggcagcaatcacgactggtgtgaagccttctcaacctatcctcgaacatacgatcttctccacgcatgggcagtcttttctgaccttgataaaagaggctgcagtgccgaagacctgctccttgaaatggatcgtatcctcaggccgactgggtttgccatcgtgagggacaagggcaccgtcattgagttcatcaagaagtacctccacgcacttcactgggaggcattgactgtcgtggacgctgagcccagcccagaatcagaggagagcgaaatgatcttgataatccggaagaagctgtggctaccaaaagcaggcccgcaggattccggcacgtagttcttctcgtacctgttcctctcccagcacctgcagctcagaagccaggcgcagctgcaccatccaaaatggttcgacacttgtagctcctgagatagagtcagtcatgatttctagccctaccgcccacatgaagataggttgtttacgaggatactgcaagtagtatgtagcaggcttggattaaaaaaaaggcccttttttgtcgcgacagatatggattggtgtttgttatctagtttggttaggaaataaacattctttttcttttaggtgtttcgtgtcctttttttttgaagtctgctatagtctgtagcaagtgtatttggtgttttcttgaaagaactactgcgctcacatttttgggatatgtgctttgccctagagcctcaaggctgcgggtcctcagctcgaaactactcgtgcaaatctcaaccgggagagcacttcaatataaacaggtaattttac

SEQ ID NO: 48479 - DNA, 2405 bp, Zea Mays
cttggttcagttctgcaggctgtgtttgtgatcagtgtgactgagaggggagggtttccagtcagtcatttatgaatcctgaggcctgtgcttactagagggagggcaaggctcgttgggatccgggatgaaggggagaaatgactcggggcacagcaagaggccggttgtgctgtgctgtgtgatgattgtgtgcctatgtctcctcttcttgtatttctcgggctccaatggacaggctgggagcgccgcatttgagtacgggaccaaattctcacggtcacttggatggggcagtgatgatggtgaggatggctctgaagagtccatttttggaaccggggatgcagatgatgtcaagcccaagagctttcctgaacttgatatatcaaatgaggctgaagctggatttaaacctgatggagcactatgagaggcattgccctccacctgaaaggcgttttaattgcttgattcctccaccacatggctataaggttcctataaaatggccaaaaagtcgtgatgtagtgtggaaagcaaacattccacacactcaccttgcaaaagagaagtcagaccagaactggatggttgaagctggtgaaaagatcaagtttccaggtggtggaacccattttcaccatggagctgacaaatatatatcaaatattgcaaatatgctaaatttcaaggataacaatataaacaatgatgggatgcttcgtacagttcttgatgttggttgtggagttgctagttttggaggatatcttctttcttctaatgtgatagcaatgtctttggcaccaaatgatgtgcatcagaatcagattcagtttgcactcgaaagagggatccctgcatatcttggtgttttgggaacaaaaaggcttccgtacccaagtagatcatttgaactagcccattgttcacgttgtaggatcgattggcttcaaagagatgggattcttctgcttgaactagatagattgctcaggcctggaggttattttgcttactcctctcctgaagcatatgcacaggatgaggaggatctccgaatctggaaagaaatgagtgcccttgtagaaaggatgtgctggaaaatcgcagagaaaagaaaccaaactgttatttgggtgaaacctctggacaatgattgttacaagaggcgagcacatggtacaaagccacctctatgcaaaagtggcaatgatccagattcagtatggggagttccaatggaagcttgcattactccgtatcctgaacaaatgcacagagatgggggaactgggctagctccctggcctgcccgattgacagccccgcctccccgtcttgctgatttgtacattactgctgacacatttgaaaaggacacggaaatgtggcagcaaagagtagaaaactattggagtttgctgggcccaaaggtaaaaccagacactattagaaacatcatggacatgaaggcaaactttgggtcatttgctgctgcactcaaggagaaagacgtatgggtgatgaatgttgtgccacatgatggaccaagcaccctcaagataatctatgatagagggctgataggcagcaatcacgactggtgtgaagccttctcaacctatcctcgaacatacgatcttctccacgcatgggcagtcttttctgaccttgataaaagaggctgcagtgccgaagacctgctccttgaaatggatcgtatcctcaggccgactgggtttgccatcgtgagggacaagggcaccgtcattgagttcatcaagaagtacctccacgcacttcactgggaggcattgactgtcgtggacgctgagcccagcccagaatcagaggagagcgaaatgatcttgataatccggaagaagctgtggctaccaaaagcaggcccgcaggattccggcacgtagttcttctcgtacctgttcctctcccagcacctgcagctcagaagccaggcgcagctgcaccatccaaaatggttcgacacttgtagctcctgagatagagtcagtcatgatttctagccctaccgcccacatgaagataggttgtttacgaggatactgcaagtagtatgtagcaggcttggattaaaaaaaaggcccttttttgtcgcgacagatatggattggtgtttgttatctagtttggttaggaaataaacattctttttcttttaggtgtttcgtgtcctttttttttgaagtctgctatagtctgtagcaagtgtatttggtgttttcttgaaagaactactgcgctcacatttttgggatatgtgctttgccctagagcctcaaggctgcgggtcctcagctcgaaactactcgtgcaaatctcaaccgggagagcacttcaatataaacaggtaattttac

SEQ ID NO: 48480 - DNA, 355 bp, Zea Mays
ccgcaaggcacggccggactcgtgtgctcacattctcactagtttcaaattttcatctgttaaaccctacccacccggcgaatcccttgacaaatccaaccagcttgccggaggaatacaccgggaggtacgtcaaacggcggggagagggaggagtaggtcgctgagggagggttagagctgggcaaggccgtcgctgtcatggaggcgcaggcgacggcgacggtgaaggaggcgcttgcggcgctgtaccaccacccggacgacgccatccgcaccgccgcggaccgctggcttcaggagttccagcacacgctcgacgcctggcaggacttctatgcgagctcgatgtgat

SEQ ID NO: 48481 - DNA, 692 bp, Zea Mays
ccgcaaggcacggccggactcgtgtgctcacattctcactagtttcaaattttcatctgttaaaccctacccacccggcgaatcccttgacaaatccaaccagcttgccggaggaatacaccgggaggtacgtcaaacggcggggagagggaggagtaggtcgctgagggagggttagagctgggcaaggccgtcgctgtcatggaggcgcaggcgacggcgacggtgaaggaggcgcttgcggcgctgtaccaccacccggacgacgccatccgcaccgccgcggaccgctggcttcaggagttccagcacacgctcgacgcctggcaggtagctgacagtttgcttcatgatgaaagcagtaatttggaaactctcatattctgttctcagacccttagaagcaaggtacaaagggactttgaagagttaccctcggaagcttttcgatcattacaggattctttatacgtattgctaaaaaagttcaataagggaccacaaaaagttagaacacagatttgtattgcaattgctgctctggctgtgcatgtacctgtagaggactggggagctggtggaattgtgaattggctaagtgatgaaatgaaaactcatccagaatttattccaggcttccttgaactgcttatagttttgccgcaggatgaggctaccaccactgtgtaggt

SEQ ID NO: 48482 - DNA, 2090 bp, Zea Mays
ccgcaaggcacggccggactcgtgtgctcacattctcactagtttcaaattttcatctgttaaaccctacccacccggcgaatcccttgacaaatccaaccagcttgccggaggaatacaccgggaggtacgtcaaacggcggggagagggaggagtaggtcgctgagggagggttagagctgggcaaggccgtcgctgtcatggaggcgcaggcgacggcgacggtgaaggaggcgcttgcggcgctgtaccaccacccggacgacgccatccgcaccgccgcggaccgctggcttcaggagttccagcacacgctcgacgcctggcaggtagctgacagtttgcttcatgatgaaagcagtaatttggaaactctcatattctgttctcagacccttagaagcaaggtacaaagggactttgaagagttaccctcggaagcttttcgatcattacaggattctttatacgtattgctaaaaaagttcaataagggaccacaaaaagttagaacacagatttgtattgcaattgctgctctggctgtgcatgtacctgtagaggactggggagctggtggaattgtgaattggctaagtgatgaaatgaaaactcatccagaatttattccaggcttccttgaactgcttatagttttgccgcaggaaacttctagttataaaattgcggctcgtcctgaaaggcgcagacaatttgaaattgacctttgttcgtctgctaatgttgctattgatttattaactgcttgcatggccattgatcagctgaaagagcaggttttggagggattttcttcttggcttcgtttctgtcatggaatctctgcctctgaactcgcatcacatcctttggtccatctggcactctcttcattgaactctggtcaattcttggaggcagctgtaaatgttacatctgaactgatacatgctactgtatctcatggcgctggtactatggctgagcaagtgccactcattcaaattcttgtccctcatattatgggtctgaaagagcagctcaaagatccatctaaggatgaagaagatgtaaaagctattgctcgtttatatgcagacatgggtgaatcctatgttgacttgattgccacagggactctgatgtatcatatggattagatgtgacggttgaaattgagaaaaacagaagattacaaatatttcgtccaaagtttgaaactctggtgtctctggtcagttttcgagttgaataccctgaggactaccacaccttttccgaggaagaccgcaaggattttagacatgttagatatgctgttagtgatgtgctacttgatgcaactgaagttcttgggggtgactcgacgctaaaactactttccaccaagcttgctcaggcatatgggagctgcaacaatgagcagaactccaagtggcaacctgtagaggctaccctgttttgtatacaagcaattgctagatcagtctcaattgaggagcgagaaattttaccacagattatgtcactgcttccctgccttcctcaacatgagcagttgctacaaacagtttgtttgaccattggagcattttcaaaatggattgatgctgcaccagctgaattatctattctaccacctctagttgatattctcaataagggtatgagtacatcagaggatacagctgcggctgcttctatggcctttaagtacatatgtgaaggacgaagttctcagggtccctggatggcctcttccagatataccatattgcaatcagtggagttggtggttataaagtttcttcagaggactcgttgcatttggttgaagccctaagtgtgattatcacaacgcttccaccagaatctgctagtagagccctggagttaatctgccagccagtaatcaatcccttgcaagaatttatccagcagggtgatcaagttcttcaacgagtccctgctcggcatttaactgtacatatagaccgactatcaagcattttcagtaatgtgaaacaaccagaagttgttgctgaagctgtatatagatattggccgacactcaagagtatctttgatc

SEQ ID NO: 48483 - DNA, 2218 bp, Zea Mays
ccgcaaggcacggccggactcgtgtgctcacattctcactagtttcaaattttcatctgttaaaccctacccacccggcgaatcccttgacaaatccaaccagcttgccggaggaatacaccgggaggtacgtcaaacggcggggagagggaggagtaggtcgctgagggagggttagagctgggcaaggccgtcgctgtcatggaggcgcaggcgacggcgacggtgaaggaggcgcttgcggcgctgtaccaccacccggacgacgccatccgcaccgccgcggaccgctggcttcaggagttccagcacacgctcgacgcctggcaggtagctgacagtttgcttcatgatgaaagcagtaatttggaaactctcatattctgttctcagacccttagaagcaaggtacaaagggactttgaagagttaccctcggaagcttttcgatcattacaggattctttatacgtattgctaaaaaagttcaataagggaccacaaaaagttagaacacagatttgtattgcaattgctgctctggctgtgcatgtacctgtagaggactggggagctggtggaattgtgaattggctaagtgatgaaatgaaaactcatccagaatttattccaggcttccttgaactgcttatagttttgccgcaggaaacttctagttataaaattgcggctcgtcctgaaaggcgcagacaatttgaaattgacctttgttcgtctgctaatgttgctattgatttattaactgcttgcatggccattgatcagctgaaagagcaggttttggagggattttcttcttggcttcgtttctgtcatggaatctctgcctctgaactcgcatcacatcctttggtccatctggcactctcttcattgaactctggtcaattcttggaggcagctgtaaatgttacatctgaactgatacatgctactgtatctcatggcgctggtactatggctgagcaagtgccactcattcaaattcttgtccctcatattatgggtctgaaagagcagctcaaagatccatctaaggatgaagaagatgtaaaagctattgctcgtttatatgcagacatgggtgaatcctatgttgacttgattgccacaggctcagacgattcaattcaaatagtgaacgcattactagaagttacttctcttctcgaatttgccatttcctccatgacgtttaatttctggcattgccttaagcgtaacctcattcgaagggactctgatgtatcatatggattagatgtgacggttgaaattgagaaaaacagaagattacaaatatttcgtccaaagtttgaaactctggtgtctctggtcagttttcgagttgaataccctgaggactaccacaccttttccgaggaagaccgcaaggattttagacatgttagatatgctgttagtgatgtgctacttgatgcaactgaagttcttgggggtgactcgacgctaaaactactttccaccaagcttgctcaggcatatgggagctgcaacaatgagcagaactccaagtggcaacctgtagaggctaccctgttttgtatacaagcaattgctagatcagtctcaattgaggagcgagaaattttaccacagattatgtcactgcttccctgccttcctcaacatgagcagttgctacaaacagtttgtttgaccattggagcattttcaaaatggattgatgctgcaccagctgaattatctattctaccacctctagttgatattctcaataagggtatgagtacatcagaggatacagctgcggctgcttctatggcctttaagtacatatgtgaagattgtaggacgaagttctcagggtccctggatggcctcttccagatataccatattgcaatcagtggagttggtggttataaagtttcttcagaggactcgttgcatttggttgaagccctaagtgtgattatcacaacgcttccaccagaatctgctagtagagccctggagttaatctgccagccagtaatcaatcccttgcaagaatttatccagcagggtgatcaagttcttcaacgagtccctgctcggcatttaactgtacatatagaccgactatcaagcattttcagtaatgtgaaacaaccagaagttgttgctgaagctgtatatagatattggccgacactcaagagtatctttgatc

SEQ ID NO: 48484 - DNA, 2135 bp, Zea Mays
ccgcaaggcacggccggactcgtgtgctcacattctcactagtttcaaattttcatctgttaaaccctacccacccggcgaatcccttgacaaatccaaccagcttgccggaggaatacaccgggaggtacgtcaaacggcggggagagggaggagtaggtcgctgagggagggttagagctgggcaaggccgtcgctgtcatggaggcgcaggcgacggcgacggtgaaggaggcgcttgcggcgctgtaccaccacccggacgacgccatccgcaccgccgcggaccgctggcttcaggagttccagcacacgctcgacgcctggcaggtagctgacagtttgcttcatgatgaaagcagtaatttggaaactctcatattctgttctcagacccttagaagcaaggtacaaagggactttgaagagttaccctcggaagcttttcgatcattacaggattctttatacgtattgctaaaaaagttcaataagggaccacaaaaagttagaacacagatttgtattgcaattgctgctctggctgtgcatgtacctgtagaggactggggagctggtggaattgtgaattggctaagtgatgaaatgaaaactcatccagaatttattccaggcttccttgaactgcttatagttttgccgcaggaaacttctagttataaaattgcggctcgtcctgaaaggcgcagacaatttgaaattgacctttgttcgtctgctaatgttgctattgatttattaactgcttgcatggccattgatcagctgaaagagcaggttttggagggattttcttcttggcttcgtttctgtcatggaatctctgcctctgaactcgcatcacatcctttggtccatctggcactctcttcattgaactctggtcaattcttggaggcagctgtaaatgttacatctgaactgatacatgctactgtatctcatggcgctggtactatggctgagcaagtgccactcattcaaattcttgtccctcatattatgggtctgaaagagcagctcaaagatccatctaaggatgaagaagatgtaaaagctattgctcgtttatatgcagacatgggtgaatcctatgttgacttgattgccacaggctcagacgattcaattcaaatagtgaacgcattactagaagttacttctcttctcgaatttgccatttcctccatgacgtttaatttctggcattgccttaagcgtaacctcattcgaagggactctgatgtatcatatggattagatgtgacggttgaaattgagaaaaacagaagattacaaatatttcgtccaaagtttgaaactctggtgtctctggtcagttttcgagttgaataccctgaggactaccacaccttttccgaggaagaccgcaaggattttagacatgttagatatggcatatgggagctgcaacaatgagcagaactccaagtggcaacctgtagaggctaccctgttttgtatacaagcaattgctagatcagtctcaattgaggagcgagaaattttaccacagattatgtcactgcttccctgccttcctcaacatgagcagttgctacaaacagtttgtttgaccattggagcattttcaaaatggattgatgctgcaccagctgaattatctattctaccacctctagttgatattctcaataagggtatgagtacatcagaggatacagctgcggctgcttctatggcctttaagtacatatgtgaagattgtaggacgaagttctcagggtccctggatggcctcttccagatataccatattgcaatcagtggagttggtggttataaagtttcttcagaggactcgttgcatttggttgaagccctaagtgtgattatcacaacgcttccaccagaatctgctagtagagccctggagttaatctgccagccagtaatcaatcccttgcaagaatttatccagcagggtgatcaagttcttcaacgagtccctgctcggcatttaactgtacatatagaccgactatcaagcattttcagtaatgtgaaacaaccagaagttgttgctgaagctgtatatagatattggccgacactcaagagtatctttgatc

SEQ ID NO: 48485 - DNA, 1756 bp, Zea Mays
ccgcaaggcacggccggactcgtgtgctcacattctcactagtttcaaattttcatctgttaaaccctacccacccggcgaatcccttgacaaatccaaccagcttgccggaggaatacaccgggaggtacgtcaaacggcggggagagggaggagtaggtcgctgagggagggttagagctgggcaaggccgtcgctgtcatggaggcgcaggcgacggcgacggtgaaggaggcgcttgcggcgctgtaccaccacccggacgacgccatccgcaccgccgcggaccgctggcttcaggagttccagcacacgctcgacgcctggcaggtagctgacagtttgcttcatgatgaaagcagtaatttggaaactctcatattctgttctcagacccttagaagcaaggtacaaagggactttgaagagttaccctcggaagcttttcgatcattacaggattctttatacgtattgctaaaaaagttcaataagggaccacaaaaagttagaacacagatttgtattgcaattgctgctctggctgtgcatgtacctgtagaggactggggagctggtggaattgtgaattggctaagtgatgaaatgaaaactcatccagaatttattccaggcttccttgaactgcttatagttttgccgcaggaaacttctagttataaaattgcggctcgtcctgaaaggcgcagacaatttgaaattgacctttgttcgtctgctaatgttgctattgatttattaactgcttgcatggccattgatcagctgaaagagcaggttttggagggattttcttcttggcttcgtttctgtcatggaatctctgcctctgaactcgcatcacatcctttggtccatctggcactctcttcattgaactctggtcaattcttggaggcagctgtaaatgttacatctgaactgatacatgctactgtatctcatggcgctggtactatggctgagcaagtgccactcattcaaattcttgtccctcatattatgggtctgaaagagcagctcaaagatccatctaaggcatatgggagctgcaacaatgagcagaactccaagtggcaacctgtagaggctaccctgttttgtatacaagcaattgctagatcagtctcaattgaggagcgagaaattttaccacagattatgtcactgcttccctgccttcctcaacatgagcagttgctacaaacagtttgtttgaccattggagcattttcaaaatggattgatgctgcaccagctgaattatctattctaccacctctagttgatattctcaataagggtatgagtacatcagaggatacagctgcggctgcttctatggcctttaagtacatatgtgaagattgtaggacgaagttctcagggtccctggatggcctcttccagatataccatattgcaatcagtggagttggtggttataaagtttcttcagaggactcgttgcatttggttgaagccctaagtgtgattatcacaacgcttccaccagaatctgctagtagagccctggagttaatctgccagccagtaatcaatcccttgcaagaatttatccagcagggtgatcaagttcttcaacgagtccctgctcggcatttaactgtacatatagaccgactatcaagcattttcagtaatgtgaaacaaccagaagttgttgctgaagctgtatatagatattggccgacactcaagagtatctttgatc

SEQ ID NO: 48486 - DNA, 2053 bp, Zea Mays
ccgcaaggcacggccggactcgtgtgctcacattctcactagtttcaaattttcatctgttaaaccctacccacccggcgaatcccttgacaaatccaaccagcttgccggaggaatacaccgggaggtacgtcaaacggcggggagagggaggagtaggtcgctgagggagggttagagctgggcaaggccgtcgctgtcatggaggcgcaggcgacggcgacggtgaaggaggcgcttgcggcgctgtaccaccacccggacgacgccatccgcaccgccgcggaccgctggcttcaggagttccagcacacgctcgacgcctggcaggtagctgacagtttgcttcatgatgaaagcagtaatttggaaactctcatattctgttctcagacccttagaagcaaggtacaaagggactttgaagagttaccctcggaagcttttcgatcattacaggattctttatacgtattgctaaaaaagttcaataagggaccacaaaaagttagaacacagatttgtattgcaattgctgctctggctgtgcatgtacctgtagaggactggggagctggtggaattgtgaattggctaagtgatgaaatgaaaactcatccagaatttattccaggcttccttgaactgcttatagttttgccgcaggaaacttctagttataaaattgcggctcgtcctgaaaggcgcagacaatttgaaattgacctttgttcgtctgctaatgttgctattgatttattaactgcttgcatggccattgatcagctgaaagagcaggttttggagggattttcttcttggcttcgtttctgtcatggaatctctgcctctgaactcgcatcacatcctttggtccatctggcactctcttcattgaactctggtcaattcttggaggcagctgtaaatgttacatctgaactgatacatgctactgtatctcatggcgctggtactatggctgagcaagtgccactcattcaaattcttgtccctcatattatgggtctgaaagagcagctcaaagatccatctaaggatgaagaagatgtaaaagctattgctcgtttatatgcagacatgggtgaatcctatgttgacttgattgccacaggctcagacgattcaattcaaatagtgaacgcattactagaagttacttctcttctcgaatttgccatttcctccatgacgtttaatttctggcattgccttaagcgtaacctcattcgaagggactctgatgtatcatatggattagatgtgacggttgaaattgagaaaaacagaagattacaaatatttcgtccaaagtttgaaactctggtgtctctggcatatgggagctgcaacaatgagcagaactccaagtggcaacctgtagaggctaccctgttttgtatacaagcaattgctagatcagtctcaattgaggagcgagaaattttaccacagattatgtcactgcttccctgccttcctcaacatgagcagttgctacaaacagtttgtttgaccattggagcattttcaaaatggattgatgctgcaccagctgaattatctattctaccacctctagttgatattctcaataagggtatgagtacatcagaggatacagctgcggctgcttctatggcctttaagtacatatgtgaagattgtaggacgaagttctcagggtccctggatggcctcttccagatataccatattgcaatcagtggagttggtggttataaagtttcttcagaggactcgttgcatttggttgaagccctaagtgtgattatcacaacgcttccaccagaatctgctagtagagccctggagttaatctgccagccagtaatcaatcccttgcaagaatttatccagcagggtgatcaagttcttcaacgagtccctgctcggcatttaactgtacatatagaccgactatcaagcattttcagtaatgtgaaacaaccagaagttgttgctgaagctgtatatagatattggccgacactcaagagtatctttgatc

SEQ ID NO: 48487 - DNA, 2178 bp, Zea Mays
ccgcaaggcacggccggactcgtgtgctcacattctcactagtttcaaattttcatctgttaaaccctacccacccggcgaatcccttgacaaatccaaccagcttgccggaggaatacaccgggaggtacgtcaaacggcggggagagggaggagtaggtcgctgagggagggttagagctgggcaaggccgtcgctgtcatggaggcgcaggcgacggcgacggtgaaggaggcgcttgcggcgctgtaccaccacccggacgacgccatccgcaccgccgcggaccgctggcttcaggagttccagcacacgctcgacgcctggcaggtagctgacagtttgcttcatgatgaaagcagtaatttggaaactctcatattctgttctcagacccttagaagcaaggtacaaagggactttgaagagttaccctcggaagcttttcgatcattacaggattctttatacgtattgctaaaaaagttcaataagggaccacaaaaagttagaacacagatttgtattgcaattgctgctctggctgtgcatgtacctgtagaggactggggagctggtggaattgtgaattggctaagtgatgaaatgaaaactcatccagaatttattccaggcttccttgaactgcttatagttttgccgcaggaaacttctagttataaaattgcggctcgtcctgaaaggcgcagacaatttgaaattgacctttgttcgtctgctaatgttgctattgatttattaactgcttgcatggccattgatcagctgaaagagcaggttttggagggattttcttcttggcttcgtttctgtcatggaatctctgcctctgaactcgcatcacatcctttggtccatctggcactctcttcattgaactctggtcaattcttggaggcagctgtaaatgttacatctgaactgatacatgctactgtatctcatggcgctggtactatggctgagcaagtgccactcattcaaattcttgtccctcatattatgggtctgaaagagcagctcaaagatccatctaagacatgggtgaatcctatgttgacttgattgccacaggctcagacgattcaattcaaatagtgaacgcattactagaagttacttctcttctcgaatttgccatttcctccatgacgtttaatttctggcattgccttaagcgtaacctcattcgaagggactctgatgtatcatatggattagatgtgacggttgaaattgagaaaaacagaagattacaaatatttcgtccaaagtttgaaactctggtgtctctggtcagttttcgagttgaataccctgaggactaccacaccttttccgaggaagaccgcaaggattttagacatgttagatatgctgttagtgatgtgctacttgatgcaactgaagttcttgggggtgactcgacgctaaaactactttccaccaagcttgctcaggcatatgggagctgcaacaatgagcagaactccaagtggcaacctgtagaggctaccctgttttgtatacaagcaattgctagatcagtctcaattgaggagcgagaaattttaccacagattatgtcactgcttccctgccttcctcaacatgagcagttgctacaaacagtttgtttgaccattggagcattttcaaaatggattgatgctgcaccagctgaattatctattctaccacctctagttgatattctcaataagggtatgagtacatcagaggatacagctgcggctgcttctatggcctttaagtacatatgtgaagattgtaggacgaagttctcagggtccctggatggcctcttccagatataccatattgcaatcagtggagttggtggttataaagtttcttcagaggactcgttgcatttggttgaagccctaagtgtgattatcacaacgcttccaccagaatctgctagtagagccctggagttaatctgccagccagtaatcaatcccttgcaagaatttatccagcagggtgatcaagttcttcaacgagtccctgctcggcatttaactgtacatatagaccgactatcaagcattttcagtaatgtgaaacaaccagaagttgttgctgaagctgtatatagatattggccgacactcaagagtatctttgatc

SEQ ID NO: 48488 - DNA, 2228 bp, Zea Mays
ccgcaaggcacggccggactcgtgtgctcacattctcactagtttcaaattttcatctgttaaaccctacccacccggcgaatcccttgacaaatccaaccagcttgccggaggaatacaccgggaggtacgtcaaacggcggggagagggaggagtaggtcgctgagggagggttagagctgggcaaggccgtcgctgtcatggaggcgcaggcgacggcgacggtgaaggaggcgcttgcggcgctgtaccaccacccggacgacgccatccgcaccgccgcggaccgctggcttcaggagttccagcacacgctcgacgcctggcaggtagctgacagtttgcttcatgatgaaagcagtaatttggaaactctcatattctgttctcagacccttagaagcaaggtacaaagggactttgaagagttaccctcggaagcttttcgatcattacaggattctttatacgtattgctaaaaaagttcaataagggaccacaaaaagttagaacacagatttgtattgcaattgctgctctggctgtgcatgtacctgtagaggactggggagctggtggaattgtgaattggctaagtgatgaaatgaaaactcatccagaatttattccaggcttccttgaactgcttatagttttgccgcaggaaacttctagttataaaattgcggctcgtcctgaaaggcgcagacaatttgaaattgacctttgttcgtctgctaatgttgctattgatttattaactgcttgcatggccattgatcagctgaaagagcaggttttggagggattttcttcttggcttcgtttctgtcatggaatctctgcctctgaactcgcatcacatcctttggtccatctggcactctcttcattgaactctggtcaattcttggaggcagctgtaaatgttacatctgaactgatacatgctactgtatctcatggcgctggtactatggctgagcaagtgccactcattcaaattcttgtccctcatattatgggtctgaaagagcagctcaaagatccatctaaggatgaagaagatgtaaaagctattgctcgtttatatgcagacatgggtgaatcctatgttgacttgattgccacaggctcagacgattcaattcaaatagtgaacgcattactagaagttacttctcttctcgaatttgccatttcctccatgacgtttaatttctggcattgccttaagcgtaacctcattcgaagggactctgatgtatcatatggattagatgtgacggttgaaattgagaaaaacagaagattacaaatatttcgtccaaagtttgaaactctggtgtctctggtcagttttcgagttgaataccctgaggactaccacaccttttccgaggaagaccgcaaggattttagacatgttagatatgggccattcgtgtttcagctgttagtgatgtgctacttgatgcaactgaagttcttgggggtgactcgacgctaaaactactttccaccaagcttgctcaggcatatgggagctgcaacaatgagcagaactccaagtggcaacctgtagaggctaccctgttttgtatacaagcaattgctagatcagtctcaattgaggagcgagaaattttaccacagattatgtcactgcttccctgccttcctcaacatgagcagttgctacaaacagtttgtttgaccattggagcattttcaaaatggattgatgctgcaccagctgaattatctattctaccacctctagttgatattctcaataagggtatgagtacatcagaggatacagctgcggctgcttctatggcctttaagtacatatgtgaaggacgaagttctcagggtccctggatggcctcttccagatataccatattgcaatcagtggagttggtggttataaagtttcttcagaggactcgttgcatttggttgaagccctaagtgtgattatcacaacgcttccaccagaatctgctagtagagccctggagttaatctgccagccagtaatcaatcccttgcaagaatttatccagcagggtgatcaagttcttcaacgagtccctgctcggcatttaactgtacatatagaccgactatcaagcattttcagtaatgtgaaacaaccagaagttgttgctgaagctgtatatagatattggccgacactcaagagtatctttgatc

SEQ ID NO: 48489 - DNA, 3624 bp, Zea Mays
ccgcaaggcacggccggactcgtgtgctcacattctcactagtttcaaattttcatctgttaaaccctacccacccggcgaatcccttgacaaatccaaccagcttgccggaggaatacaccgggaggtacgtcaaacggcggggagagggaggagtaggtcgctgagggagggttagagctgggcaaggccgtcgctgtcatggaggcgcaggcgacggcgacggtgaaggaggcgcttgcggcgctgtaccaccacccggacgacgccatccgcaccgccgcggaccgctggcttcaggagttccagcacacgctcgacgcctggcaggtagctgacagtttgcttcatgatgaaagcagtaatttggaaactctcatattctgttctcagacccttagaagcaaggtacaaagggactttgaagagttaccctcggaagcttttcgatcattacaggattctttatacgtattgctaaaaaagttcaataagggaccacaaaaagttagaacacagatttgtattgcaattgctgctctggctgtgcatgtacctgtagaggactggggagctggtggaattgtgaattggctaagtgatgaaatgaaaactcatccagaatttattccaggcttccttgaactgcttatagttttgccgcaggaaacttctagttataaaattgcggctcgtcctgaaaggcgcagacaatttgaaattgacctttgttcgtctgctaatgttgctattgatttattaactgcttgcatggccattgatcagctgaaagagcaggttttggagggattttcttcttggcttcgtttctgtcatggaatctctgcctctgaactcgcatcacatcctttggtccatctggcactctcttcattgaactctggtcaattcttggaggcagctgtaaatgttacatctgaactgatacatgctactgtatctcatggcgctggtactatggctgagcaagtgccactcattcaaattcttgtccctcatattatgggtctgaaagagcagctcaaagatccatctaaggatgaagaagatgtaaaagctattgctcgtttatatgcagacatgggtgaatcctatgttgacttgattgccacaggctcagacgattcaattcaaatagtgaacgcattactagaagttacttctcttctcgaatttgccatttcctccatgacgtttaatttctggcattgccttaagcgtaacctcattcgaagggactctgatgtatcatatggattagatgtgacggttgaaattgagaaaaacagaagattacaaatatttcgtccaaagtttgaaactctggtgtctctggtcagttttcgagttgaataccctgaggactaccacaccttttccgaggaagaccgcaaggattttagacatgttagatatgggccattcgtgtttcagctgttagtgatgtgctacttgatgcaactgaagttcttgggggtgactcgacgctaaaactactttccaccaagcttgctcaggcatatgggagctgcaacaatgagcagaactccaagtggcaacctgtagaggctaccctgttttgtatacaagcaattgctagatcagtctcaattgaggagcgagaaattttaccacagattatgtcactgcttccctgccttcctcaacatgagcagttgctacaaacagtttgtttgaccattggagcattttcaaaatggattgatgctgcaccagctgaattatctattctaccacctctagttgatattctcaataagggtatgagtacatcagaggatacagctgcggctgcttctatggcctttaagtacatatgtgaagattgtaggacgaagttctcagggtccctggatggcctcttccagatataccatattgcaatcagtggagttggtggttataaagtttcttcagaggactcgttgcatttggttgaagccctaagtgtgattatcacaacgcttccaccagaatctgctagtagagccctggagttaatctgccagccagtaatcaatcccttgcaagaatttatccagcagggtgatcaagttcttcaacgagtccctgctcggcatttaactgtacatatagaccgactatcaagcattttcagtaatgtgaaacaaccagaagttgttgctgaagctgtatatagatattggccgacactcaagagtatctttgatcaacgagcatgggatacccgtaccatggagtcaatatgccgatcttgcaaatttgctgtaaggacatgtggaaggttcatgggaatgacgattggtgcaatgcttgaagaaatccaaactctctaccaacaacacaaacagtcttgcttcctttacttgtccagtgaagttatcaagatttttggatctgatccatcttgtgcgggctatcttactagcttgatacaaatacttttcagccatacagtgcagcttctcagaacgattcaagattttacagccagaccagatatagctgatgattgctatttgttagcatcaagatgtattcgttactgtcctgatctgtttatacctacagaaacgtttcaaagattggttgactgcgcaatggctggtataactatacatcacagggaagcctgtaaatcgatcttgtcttttctatctgatgtcattgatcttccaaactcatctggcgggggacagtaccgtgaagttattaacacaatcatacttcagcgtggtacaacccttactagaataatgattgctgccttaacaggggcgctaccatctggtcgtctggaggaggtttcatatgttctgctgtcacttagcagagcctttggtgaggatatgctgaactgggcaagggaaagcattaatcttataccaccacaagccttaacggatgctgaacgtttgcgattcttcaacatcatatctgatgctacttccgggtctagtcttcataacataacagatagattcggagaaatctcagatatctgtagacgaaacaaaacagtgcaagacctagttcaaagtgccttgcggcctcaggatttgaccgtcacggtggttcgacaacagatgtgataactggatgtctctgcaaggcaagtttagaaagccagtgagtcagtgttgattgaagactcacgtcatcttgggaattttttcttagttcatacaggtttgagttgcggcggcatacagttcagatttgttcagagcatagataggccagttagcattgtaattctttcgtgtttcccctttgtacatgtgccacaaattgtgtatttggggagggagataagttgtgttgtattatctcaaaaaacagtgttatacttggtataactggcagatcatgaggtatggtgatctaccgtgggcctgattttgcgttggccgttcagcttctttttgtaaagtagggtggccatcgattttattatgtaagcttataccggttgttaaagaaaattctagtctgtgttcccttatggtcaccaaatgtaatggccctaaaggtaattcaagtttgatgattagaacttgtgcaattttaagctcaccttgaatcgtgggcagaagtttg

SEQ ID NO: 48490 - DNA, 3709 bp, Zea Mays
ccgcaaggcacggccggactcgtgtgctcacattctcactagtttcaaattttcatctgttaaaccctacccacccggcgaatcccttgacaaatccaaccagcttgccggaggaatacaccgggaggtacgtcaaacggcggggagagggaggagtaggtcgctgagggagggttagagctgggcaaggccgtcgctgtcatggaggcgcaggcgacggcgacggtgaaggaggcgcttgcggcgctgtaccaccacccggacgacgccatccgcaccgccgcggaccgctggcttcaggagttccagcacacgctcgacgcctggcaggtagctgacagtttgcttcatgatgaaagcagtaatttggaaactctcatattctgttctcagacccttagaagcaaggtacaaagggactttgaagagttaccctcggaagcttttcgatcattacaggattctttatacgtattgctaaaaaagttcaataagggaccacaaaaagttagaacacagatttgtattgcaattgctgctctggctgtgcatgtacctgtagaggactggggagctggtggaattgtgaattggctaagtgatgaaatgaaaactcatccagaatttattccaggcttccttgaactgcttatagttttgccgcaggaaacttctagttataaaattgcggctcgtcctgaaaggcgcagacaatttgaaattgacctttgttcgtctgctaatgttgctattgatttattaactgcttgcatggccattgatcagctgaaagagcaggttttggagggattttcttcttggcttcgtttctgtcatggaatctctgcctctgaactcgcatcacatcctttggtccatctggcactctcttcattgaactctggtcaattcttggaggcagctgtaaatgttacatctgaactgatacatgctactgtatctcatggcgctggtactatggctgagcaagtgccactcattcaaattcttgtccctcatattatgggtctgaaagagcagctcaaagatccatctaaggatgaagaagatgtaaaagctattgctcgtttatatgcagacatgggtgaatcctatgttgacttgattgccacaggctcagacgattcaattcaaatagtgaacgcattactagaagttacttctcttctcgaatttgccatttcctccatgacgtttaatttctggcattgccttaagcgtaacctcattcgaagggactctgatgtatcatatggattagatgtgacggttgaaattgagaaaaacagaagattacaaatatttcgtccaaagtttgaaactctggtgtctctggtcagttttcgagttgaataccctgaggactaccacaccttttccgaggaagaccgcaaggattttagacatgttagatatggtacaatacctgatttctcttagttggtttcattagtccattttgcctatcttgtgcaatacaattgtaaaacagaactagggccattcgtgtttcagctgttagtgatgtgctacttgatgcaactgaagttcttgggggtgactcgacgctaaaactactttccaccaagcttgctcaggcatatgggagctgcaacaatgagcagaactccaagtggcaacctgtagaggctaccctgttttgtatacaagcaattgctagatcagtctcaattgaggagcgagaaattttaccacaggtatattatgtcactgcttccctgccttcctcaacatgagcagttgctacaaacagtttgtttgaccattggagcattttcaaaatggattgatgctgcaccagctgaattatctattctaccacctctagttgatattctcaataagggtatgagtacatcagaggatacagctgcggctgcttctatggcctttaagtacatatgtgaagattgtaggacgaagttctcagggtccctggatggcctcttccagatataccatattgcaatcagtggagttggtggttataaagtttcttcagaggactcgttgcatttggttgaagccctaagtgtgattatcacaacgcttccaccagaatctgctagtagagccctggagttaatctgccagccagtaatcaatcccttgcaagaatttatccagcagggtgatcaagttcttcaacgagtccctgctcggcatttaactgtacatatagaccgactatcaagcattttcagtaatgtgaaacaaccagaagttgttgctgaagctgtatatagatattggccgacactcaagagtatctttgatcaacgagcatgggatacccgtaccatggagtcaatatgccgatcttgcaaatttgctgtaaggacatgtggaaggttcatgggaatgacgattggtgcaatgcttgaagaaatccaaactctctaccaacaacacaaacagtcttgcttcctttacttgtccagtgaagttatcaagatttttggatctgatccatcttgtgcgggctatcttactagcttgatacaaatacttttcagccatacagtgcagcttctcagaacgattcaagattttacagccagaccagatatagctgatgattgctatttgttagcatcaagatgtattcgttactgtcctgatctgtttatacctacagaaacgtttcaaagattggttgactgcgcaatggctggtataactatacatcacagggaagcctgtaaatcgatcttgtcttttctatctgatgtcattgatcttccaaactcatctggcgggggacagtaccgtgaagttattaacacaatcatacttcagcgtggtacaacccttactagaataatgattgctgccttaacaggggcgctaccatctggtcgtctggaggaggtttcatatgttctgctgtcacttagcagagcctttggtgaggatatgctgaactgggcaagggaaagcattaatcttataccaccacaagccttaacggatgctgaacgtttgcgattcttcaacatcatatctgatgctacttccgggtctagtcttcataacataacagatagattcggagaaatctcagatatctgtagacgaaacaaaacagtgcaagacctagttcaaagtgccttgcggcctcaggatttgaccgtcacggtggttcgacaacagatgtgataactggatgtctctgcaaggcaagtttagaaagccagtgagtcagtgttgattgaagactcacgtcatcttgggaattttttcttagttcatacaggtttgagttgcggcggcatacagttcagatttgttcagagcatagataggccagttagcattgtaattctttcgtgtttcccctttgtacatgtgccacaaattgtgtatttggggagggagataagttgtgttgtattatctcaaaaaacagtgttatacttggtataactggcagatcatgaggtatggtgatctaccgtgggcctgattttgcgttggccgttcagcttctttttgtaaagtagggtggccatcgattttattatgtaagcttataccggttgttaaagaaaattctagtctgtgttcccttatggtcaccaaatgtaatggccctaaaggtaattcaagtttgatgattagaacttgtgcaattttaagctcaccttgaatcgtgggcagaagtttg

SEQ ID NO: 48491 - DNA, 4216 bp, Zea Mays
atgggtgaatcctatgttgacttgattgccacaggctcagacgattcaattcaaatagtgaacgcattactagaagttacttctcttctcgaatttgccatttcctccatgacgtttaatttctggcattgccttaagcgtaacctcattcgaagggactctgatgtatcatatggattagatgtgacggttgaaattgagaaaaacagaagattacaaatatttcgtccaaagtttgaaactctggtgtctctgatacaccaaggaattaaaaccatctttgaggtctttaggaacaagctcggccgatctgctccaccaatcttcaaaacacatttcatccagtcccggggaaagggcagccaagcgcccaagcccacatagcaagtcggtcagccgtccaacacctattatgtgtaaccaactagaggaaaaaacggcacttaggcggcgcccaagtcctccagattctcttgaaggcagccaaggaggtagaaccactgaacatcagttcataggcagatttggcagagtagagaccattgctagagaatctccaaaggtgcttatctggaaccccaggctgaagagcgaaattagtgatagcatctgtaagagtgaggaaatcagcaatgatctcccatgtcaccatttcacaattctgttaggaaccatactaaatacatgaggtgccaagtcttgaatcctctgtcccaatatccatctatcatgccaaaagagagtggaccgcccatcccccatctcagaagccattgctactgagaataaacactccaaaaactggtttgactggataggcaaatcagcccacggtttggatgtgtctgtcttttgcagtcagatccatctaacacgtaatgctctattcaaacattgaatatcagagataccaaggcccccccaattctttgggacgcgttaccttgccccaggccaccatacagtgcccaccattagcttctttgcgcactctccagaggaatccgcgacggattttatcaatggccttaatagcccacctaggcaaatccaacgccatcgtatgataaataacagtagcagtgagcacaattgcacttgcgtagctctgccagcacgggtcatcaaatcagccttccaagccggtaagaggtctgccagtttatcgatgagaggttgaagctgggctttggttaacttcttcagggagagaggtaaacccaagtatttgataggaaaagcttccaatcttcagggtagaagttgctggaccacatctagatcagcaggggagcactggataggatcaacactactcttagtcatgttagtcttcaatcccgaagcctgcccaaaaagatccaaaatctgcacagtagtattcaggtcgctgtacactggtctaagaaagagcgccacatcgtcagcataaagtgagatctggtgtttgatgaaaatagtagacaggggctgcagcaacccattatcctcagctttgaccataagcgcattgaggacatccataacaaaaatgaaaagcagcggtgacaaggggtcgccctgacgcaaacccctcttatgagaaatgaagatcccaggcacaccattgagcatgatctgagtggaagtggtcataagaagaccactaatcacatccctccacacaggaccaaaacccaaccgctccacctcaagaagaaaaggccaagagaccgagtcgaaggccttggagatgtctaacttgagaagaattctaggttgtttttgagcatgaaaaaatcttgccgtctgctggacgagcataaaattgtcttgtatgaatcgacctttgatgaaagcactttgagctttggaaatcagcccctcaacctattggcaagaaccttagtaaccaatttggggcgaagctgtggatcaaactaattggcctgaagtccttggcaacaagagcatcattatgctttggcagcaggacaatgaaggctatgttaagaaacctgaagtttctgaaatctctcccaaattgttgaaacagcagccataatgtcatttttttataataggctagcagcacttatagaaacgcccagtgaagccatcgggcccaggggccttgtctgatggaagttgcttgatagtgctcaatacttcaacttctgtaatcaagagctcaagagcctaaagatcatgctgctgtatgtctatggcttccaggttgatagcttggtttctttgctccccacttccaattagattcgaattaaaatccaggaagacttcggccttcccatcatgagaggtgatcagctgatccccatcctttattgcagcaatgaaattcttcctcttacgaaaccttcagcatgaatgaaaaaacttggtgttagcatcaccattcttgagccaaagaagccgagatctggttctagccactgtcctgagcagggaggcaagcgccaaagaatgtttttcaacctctgcagcagctagcattcaagatcattgagatatctgctctccctagccgtttccagctgcaacatcacctctctatccaactcaagctgcatcttgaaattgcccactttcttgtcactcccaacactgcagccccttagctgtagccttcaacttgagggagagggttttgagagggcaagagatgttctggacagagttccatgcactggaaaccgcatcatgaaagccttcaaatttcggccaaaagggctcaaaatgaaatcgcctcttaccccaatgattgtccttcaatccaaggagaagagggcaatgatctgagtcttccgatgcagagcactgaagcaagaaatctgggaacttctgctcccaatctaaggaacagaacatcctgtccagccgcaccaagacgtcatgagcctttgcccaggtgaacttccttccctgaaggtcaatatcttttattcccaggtcatgtatgcatttcctgaatcttcccatcatggctcagttgagattagaattatttttgtcctcatctgtttagattaggttgaagtccccaccaacaagccatggtccagaacacgcagatctaattaggttcaattcttgaaggaacaagagcttcctatcattactttgaggtccatagacacatgtaagccaccacccatcaccactagccgggcaaaacttgacagaaacactgaaattatccacacgtgaggcaacaatggttcccaacttgacctccaggccggcaacaccccaccactaggaccaacggatgagagaaccacaaaattgttgtcgaagtcagaacccaacaaggaaagaataaaacggttgctgcaacttggcatcttagtctcttgcaaactgataatatcagcatgaaccgactccatcagactctttacaaaatcctgtctcgaggtggagtttaagccacgaacattccagaacagaattaaagagggatccattagataaacagaatgagaaacacccacaaaccaccctatcagtaaactagagtggccaccacacccacgttatctggaactgaccatctgaaaagtgaggcaagagcttgaacctggggacaggagagaggtcgactgaagagcttagcataatcttctagttcctgttgattgatatgatctctgtccagatcaaactgaagaactctcatcaccattttcttagtcttggggatctgctgaatgtgctcagcgcccaatttggccacccgcctacttctgtggagctcctgcggaggtggagcaggaagtttttttttcttcataatcttgggaggaggcagtaagctgccgatggtcctggacacaagcctgaagaaaagctgctgcttgctaggtggttcatcccctggcgcctcatcttggcaccttaagtcctgtcgtcttctcctgctgtatactttcaacgctgtgctgtcatggttaggaagcattctgctgttcggggctctgttactgctggggtttacattggtacaacaagggggtgagactaagttggctggtcccagcgacccaaccccagaatgctgaggcgagatcagcccaccctgtcccagcgacccaaaaggccaaaagactcaatagggagggaaatggttcctgtagactcgggttgcccaaattggcattggggcgagactgacccatcagactccagcagcctatgtaagtagagggactctaac

SEQ ID NO: 48492 - DNA, 1228 bp, Zea Mays
tgacgaggaccaagtgccgcgtgtctagatctcctacgcaccacttcccgccacctgtcttcagaacgggtaggaagcgctggcgcctaactttgcagcaccgggcgcacacagactatcttcttcaccgcttgcaactggtgggcacccctcaactgagaagaagcagcaacacacaacggagaagaggctactctcccatcattggagagcacacctttataagagtaaggcacgacacatgagcctccagaaaacgagggggtaggactgtcgtcactccatctctggaacttagcccgccaagactaggaagccaaaacgatgtttgctgtgggccctgatgcaggaagaggggggttcgtggaggtgttcgccgggtttggagtgaggtccggcgaggggttgaggtggtggacgttgacgccaaggagggaagtgacggggctggggttgggagatgatggtctagggctaggggctgagcgtgaagaggccattctctaccgagtgtctttcattgtctctgttttcgagttgaataccctgaggactaccacaccttttccgaggaagaccgcaaggattttagacatgttagatatggcatatgggagctgcaacaatgagcagaactccaagtggcaacctgtagaggctaccctgttttgtatacaagcaattgctagatcagtctcaattgaggagcgagaaattttaccacagattatgtcactgcttccctgccttcctcaacatgagcagttgctacaaacagttgatattctcaataagggtatgagtacatcagaggatacagctgcggctgcttctatggcctttaagtacatatgtgaagattgtaggacgaagttctcagggtccctggatggcctcttccagatataccatattgcaatcagtggagttggtggttataaagtttcttcagaggactcgttgcatttggttgaagccctaagtgtgattatcacaacgcttccaccagaatctgctagtagagccctggagttaatctgccagccagtaatcaatcccttgcaagaatttatccagcagggtgatcaagttcttcaacgagtccctgctcggcatttaactgtacatatagaccgactatcaagcattttcagtaatgtgaaacaaccagaagttgttgctgaagctgtatatagatattggccgacactcaagagtatctttgatc

SEQ ID NO: 48493 - DNA, 890 bp, Zea Mays
ctctaccgagtgtctttcattgtctctggtcagttttcgagttgaataccctgaggactaccacaccttttccgaggaagaccgcaaggattttagacatgttagatatgctgttagtgatgtgctacttgatgcaactgaagttcttgggggtgactcgacgctaaaactactttccaccaagcttgctcaggcatatgggagctgcaacaatgagcagaactccaagtggcaacctgtagaggctaccctgttttgtatacaagcaattgctagatcagtctcaattgaggagcgagaaattttaccacagattatgtcactgcttccctgccttcctcaacatgagcagttgctacaaacagtttgtttgaccattggagcattttcaaaatggattgatgctgcaccagctgaattatctattctaccacctctagttgatattctcaataagggtatgagtacatcagaggatacagctgcggctgcttctatggcctttaagtacatatgtgaagattgtaggacgaagttctcagggtccctggatggcctcttccagatataccatattgcaatcagtggagttggtggttataaagtttcttcagaggactcgttgcatttggttgaagccctaagtgtgattatcacaacgcttccaccagaatctgctagtagagccctggagttaatctgccagccagtaatcaatcccttgcaagaatttatccagcagggtgatcaagttcttcaacgagtccctgctcggcatttaactgtacatatagaccgactatcaagcattttcagtaatgtgaaacaaccagaagttgttgctgaagctgtatatagatattggccgacactcaagagtatctttgatc

SEQ ID NO: 48494 - DNA, 1235 bp, Zea Mays
gcttcctttacttgtccagtgaagttatcaagatttttggatctgatccatcttgtgcgggctatcttactagcttgatacaaatacttttcagccatacagtgcagcttctcagaacgattcaaccagaccagatatagctgatgattgctatttgttagcatcaagatgtattcgttactgtcctgatctgtttatacctacagaaacgtttcaaagattggttgactgcgcaatggctggtataactatacatcacagggaagcctgtaaatcgatcttgtcttttctatctgatgtcattgatcttccaaactcatctggcgggggacagtaccgtgaagttattaacacaatcatacttcagcgtggtacaacccttactagaataatgattgctgccttaacaggggcgctaccatctggtcgtctggaggaggtttcatatgttctgctgtcacttagcagagcctttggtgaggatatgctgaactgggcaagggaaagcattaatcttataccaccacaagccttaacggatgctgaacgtttgcgattcttcaacatcatatctgatgctacttccgggtctagtcttcataacataacagatagattcggagaaatctcagatatctgtagacgaaacaaaacagtgcaagacctagttcaaagtgccttgcggcctcaggatttgaccgtcacggtggttcgacaacagatgtgataactggatgtctctgcaaggcaagtttagaaagccagtgagtcagtgttgattgaagactcacgtcatcttgggaattttttcttagttcatacaggtttgagttgcggcggcatacagttcagatttgttcagagcatagataggccagttagcattgtaattctttcgtgtttcccctttgtacatgtgccacaaattgtgtatttggggagggagataagttgtgttgtattatctcaaaaaacagtgttatacttggtataactggcagatcatgaggtatggtgatctaccgtgggcctgattttgcgttggccgttcagcttctttttgtaaagtagggtggccatcgattttattatgtaagcttataccggttgttaaagaaaattctagtctgtgttcccttatggtcaccaaatgtaatggccctaaaggtaattcaagtttgatgattagaacttgtgcaattttaagctcaccttgaatcgtgggcagaagtttg

SEQ ID NO: 48495 - DNA, 1003 bp, Zea Mays
ctgaagattggctgactgcgcaatggctgggaagcctgtaaatcgatcttgtcttttctatctgatgtcattgatcttccaaactcatctggcgggggacagtaccgtgaagttattaacacaatcatacttcagcgtggtacaacccttactagaataatgattgctgccttaacaggggcgctaccatctggtcgtctggaggaggtttcatatgttctgctgtcacttagcagagcctttggtgaggatatgctgaactgggcaagggaaagcattaatcttataccaccacaagccttaacggatgctgaacgtttgcgattcttcaacatcatatctgatgctacttccgggtctagtcttcataacataacagatagattcggagaaatctcagatatctgtagacgaaacaaaacagtgcaagacctagttcaaagtgccttgcggcctcaggatttgaccgtcacggtggttcgacaacagatgtgataactggatgtctctgcaaggcaagtttagaaagccagtgagtcagtgttgattgaagactcacgtcatcttgggaattttttcttagttcatacaggtttgagttgcggcggcatacagttcagatttgttcagagcatagataggccagttagcattgtaattctttcgtgtttcccctttgtacatgtgccacaaattgtgtatttggggagggagataagttgtgttgtattatctcaaaaaacagtgttatacttggtataactggcagatcatgaggtatggtgatctaccgtgggcctgattttgcgttggccgttcagcttctttttgtaaagtagggtggccatcgattttattatgtaagcttataccggttgttaaagaaaattctagtctgtgttcccttatggtcaccaaatgtaatggccctaaaggtaattcaagtttgatgattagaacttgtgcaattttaagctcaccttgaatcgtgggcagaagtttg

SEQ ID NO: 48496 - DNA, 2812 bp, Zea Mays
ctatacatcgcacgggccagacgtggagcaggccagggtcgaggcccaactggagctccaggaaggcacacaggccgaaagccgccaccgtttcttcatctcccatctgccggcgctccatcttcgactccctccccgactcgcgctcggcacgcaggcgacgacggcggcgctcaggctcgggctcgggctctcagcgacggcggggcagtcccaatttcggcggcggcgtcagcggctccccctcccgcctcttgccaatcgcctcgcgccctcgcctccggtcctccgcacaccggccggtgaccctgcgtgcgcgcctcccgctcccctcccgcctccggtggaccgttgacagcgcccggccccggcggctgcactgcgcgccgcgtacggccggcgggcagcgggagccagcagccgctgctctaccaaggcggccgcaccgctttggtagcgcttatgccccaacgaagcgttacccgtccgcttagcgctgaagcgtgcgcttagtgccgcctgttggaaccctgatctatagttggtcttcttataacttctcatagtacactttcagcaacacattggactacaatggagaatatgcgttatgctgaggagctcgtgagggagtttctagttttcaggggtttcacaagtacgctgcaagcgtatgagacagagttgtctactgagattggcaggaactttcaaggagacaagatcgtggatttagtgttctcagagtatgtaccgaaataccaactggacaagttgctcggtctgtttgcctttttcaagcagtgtttcatgtcacctgcggacacagagttgttctcaacccttgttaagttggagctgtcagtattaaggtactatgttattaatgctttgaaatctggaagacaagacaaagtaattgaattctttggtgagagtggcaattatctgatgcaaaagcgtggagattggctggcatggtttgctattccatatattaagaacccaagcttggatccacaattccgtctatatttctccaaagagtggctggacactttggttctttcatttaggaattttttgagtgggatattcaatgatactcctcttatgagaattagtagtgaaaagaataccatcaaatccctcaagaatgacataaaacaactgaataataaattggcagagctacaagcatccttagaggagaaggaagatgaaatctctctgttgaggaggaactataatagtggtggttatggaaacaagaatgtagttggtactagtacagctggttcccctcatgaagagatgtcagaaaactatgaagaatcctcggcctcgagtagcatgatacagggttttgattctcggtcctcaagttcagtgaaatcttatacaagaggtggaaaattccatgaatcttctgagatcaaccatacagaggatcagcaggttttggtgactgaggaagagtttcctgaggtgaaagtagatttccaggaaacatttttaggccataacagtccaattagccgatgtcgattttctgcatctgggtcaaatattgctagttcatcaattgatggcacagttagaaatgctactatatactgtgggtctgaagtcagtgcactttcatgggaatgcagatctgacagattggcacagctaatggaggaattaaagcttggaatgctgatgcaaagagagttgtttgcgacctgagtacatctagaaactttccaagcatcttagatttgaaatgcagccctgttgaacctgtgtttgtctctgcagctgcatcaagacggcatggatcaactacatttgagagaacaggatttgccaacttgacagtgtggcatatgaaaacatggaagccattgactgtcctccctcttggtgaggatccacctgccattacttctctttgcttcaatcacaatgggaagattttggcagcttctgctacagatggaatgattcacatgtttgacatgtctgctggtcttcaaattacaggatggcctgcccatgattcacctgtgagctctgttctttttgggccagcagaaactagcatcttcagcttaggctcggacggaaagatacttgaatggagtttgcacaatcaaggtcagattctttggtcaagagattgcagcagattctgcaatccggagagctttaaaacacgaatgcatgaaatagcattggattcaaatggcaagaggctgctggtcacctccggtttggttcgggccccaatataccaggtacaaggccatgaaagcgaactgaggacactgccgcacagttcatctatcacaagtgtggattggcatccaacactgccaatgtacatcactggatccgcagaccactctgtccgggtcacgtctatcttatgatgatctataaaacaaggtgctggcaacaacctttcccagctagctagcatgcatcaacccttattgacagtcttatccatgcgtgaggctcggtgtcacgctatttcctcgcatggaagatgagctgtgttcttgttttgtggctttggtgtgcgtctaattctgtaccctttggtgggttgctccaacatttttttttcttgttgtaaacaggcatagagttctgtggtcatttgctttaaaatgagtgatagatcaaaataagtaaactttgtagcccgtctctcgaaatctcacgtctgcatacgcagatatgctatatactgtatgtacttgtaaatgaatttgtagcccgtctcagatagtacttcgcattacaatctatcatccttcac

SEQ ID NO: 48497 - DNA, 2867 bp, Zea Mays
ctatacatcgcacgggccagacgtggagcaggccagggtcgaggcccaactggagctccaggaaggcacacaggccgaaagccgccaccgtttcttcatctcccatctgccggcgctccatcttcgactccctccccgactcgcgctcggcacgcaggcgacgacggcggcgctcaggctcgggctcgggctctcagcgacggcggggcagtcccaatttcggcggcggcgtcagcggctccccctcccgcctcttgccaatcgcctcgcgccctcgcctccggtcctccgcacaccggccggtgaccctgcgtgcgcgcctcccgctcccctcccgcctccggtggaccgttgacagcgcccggccccggcggctgcactgcgcgccgcgtacggccggcgggcagcgggagccagcagccgctgctctaccaaggcggccgcaccgctttggtagcgcttatgccccaacgaagcgttacccgtccgcttagcgctgaagcgtgcgcttagtgccgcctgttggaaccctgatctatagttggtcttcttataacttctcatagtacactttcagcaacacattggactacaatggagaatatgcgttatgctgaggagctcgtgagggagtttctagttttcaggggtttcacaagtacgctgcaagcgtatgagacagagttgtctactgagattggcaggaactttcaaggagacaagatcgtggatttagtgttctcagagtatgtaccgaaataccaactggacaagttgctcggtctgtttgcctttttcaagcagtgtttcatgtcacctgcggacacagagttgttctcaacccttgttaagttggagctgtcagtattaaggtactatgttattaatgctttgaaatctggaagacaagacaaagtaattgaattctttggtgagagtggcaattatctgatgcaaaagcgtggagattggctggcatggtttgctattccatatattaagaacccaagcttggatccacaattccgtctatatttctccaaagagtggctggacactttggttctttcatttaggaattttttgagtgggatattcaatgatactcggaccccagctcttatgagaattagtagtgaaaagaataccatcaaatccctcaagaatgacataaaacaactgaataataaattggcagagctacaagcatccttagaggagaaggaagatgaaatctctctgttgaggaggaactataatagtggtggttatggaaacaagaatgtagttggtactagtacagctggttcccctcatgaagagatgtcagaaaactatgaagaatcctcggcctcgagtagcatgatacagggttttgattctcggtcctcaagttcagtgaaatcttatacaagaggtggaaaattccatgaatcttctgagatcaaccatacagaggatcagcaggttttggtgactgaggaagagtttcctgaggtgaaagtagatttccaggaaacatttttaggccataacagtccaattagccgatgtcgattttctgcatctgggtcaaatattgctagttcatcaattgatggcacagttaggatttggacatatgattcgtcaactgcatcatccagaaatgctactatatactgtgggtctgaagtcagtgcactttcatgggaatgcagatctgacagattgctgctcataggcacagctaatggaggaattaaagcttggaatgctgatgcaaagagagttgtttgcgacctgagtacatctagaaactttccaagcatcttagatttgaaatgcagccctgttgaacctgtgtttgtctctgcagctgcatcaagacggcatggatcaactacatttgagagaacaggatttgccaacttgacagtgtggcatatgaaaacatggaagccattgactgtcctccctcttggtgaggatccacctgccattacttctctttgcttcaatcacaatgggaagattttggcagcttctgctacagatggaatgattcacatgtttgacatgtctgctggtcttcaaattacaggatggcctgcccatgattcacctgtgagctctgttctttttgggccagcagaaactagcatcttcagcttaggctcggacggaaagatacttgaatggagtttgcacaatcaaggtcagattctttggtcaagagattgcagcagattctgcaatccggagagctttaaaacacgaatgcatgaaatagcattggattcaaatggcaagaggctgctggtcacctccggtttggttcgggccccaatataccaggtacaaggccatgaaagcgaactgaggacactgccgcacagttcatctatcacaagtgtggattggcatccaacactgccaatgtacatcactggatccgcagaccactctgtccgggtcacgtctatcttatgatgatctataaaacaaggtgctggcaacaacctttcccagctagctagcatgcatcaacccttattgacagtcttatccatgcgtgaggctcggtgtcacgctatttcctcgcatggaagatgagctgtgttcttgttttgtggctttggtgtgcgtctaattctgtaccctttggtgggttgctccaacatttttttttcttgttgtaaacaggcatagagttctgtggtcatttgctttaaaatgagtgatagatcaaaataagtaaactttgtagcccgtctctcgaaatctcacgtctgcatacgcagatatgctatatactgtatgtacttgtaaatgaatttgtagcccgtctcagatagtacttcgcattacaatctatcatccttcac

SEQ ID NO: 48498 - DNA, 2725 bp, Zea Mays
ctatacatcgcacgggccagacgtggagcaggccagggtcgaggcccaactggagctccaggaaggcacacaggccgaaagccgccaccgtttcttcatctcccatctgccggcgctccatcttcgactccctccccgactcgcgctcggcacgcaggcgacgacggcggcgctcaggctcgggctcgggctctcagcgacggcggggcagtcccaatttcggcggcggcgtcagcggctccccctcccgcctcttgccaatcgcctcgcgccctcgcctccggtcctccgcacaccggccggtgaccctgcgtgcgcgcctcccgctcccctcccgcctccggtggaccgttgacagcgcccggccccggcggctgcactgcgcgccgcgtacggccggcgggcagcgggagccagcagccgctgctctaccaaggcggccgcaccgctttggtagcgcttatgccccaacgaagcgttacccgtccgcttagcgctgaagcgtgcgcttagtgccgcctgttggaaccctgatctatagttggtcttcttataacttctcatagtacactttcagcaacacattggactacaatggagaatatgcgttatgctgaggagctcgtgagggagtttctagttttcaggggtttcacaagtacgctgcaagcgtatgagacagagttgtctactgagattggcaggaactttcaaggagacaagatcgtggatttagtgttctcagagtatgtaccgaaataccaactggacaagttgctcggtctgtttgcctttttcaagcagtgtttcatgtcacctgcggacacagagttgttctcaacccttgttaagttggagctgtcagtattaaggtactatgttattaatgctttgaaatctggaagacaagacaaagtaattgaattctttggtgagagtggcaattatctgatgcaaaagcgtggagattggctggcatggtttgctattccatatattaagaacccaagcttggatccacaattccgtctatatttctccaaagagtggctggacactttggttctttcatttaggaattttttgagtgggatattcaatgatactcggaccccagctcttatgagaattagtagtgaaaagaataccatcaaatccctcaagaatgacataaaacaactgaataataaattggcagagctacaagcatccttagaggagaaggaagatgaaatctctctgttgaggaggaactataatagtggtggttatggaaacaagaatgtagttggtactagtacagctggttcccctcatgaagagatgtcagaaaactatgaagaatcctcggcctcgagtagcatgatacagggttttgattctcggtcctcaagttcagtgaaatcttatacaagaggtggaaaattccatgaatcttctgagatcaaccatacagaggatcagcaggttttggtgactgaggaagagtttcctgaggtgaaagtagatttccagtccaattagccgatgtcgattttctgcatctgggtcaaatattgctagttcatcaattgatggcacagttaggatttggacatatgattcgtcaactgcatcatccagaaatgctactatatactgtgggtctgaagtcagtgcactttcatgggaatgcagatctgacagattggcacagctaatggaggaattaaagcttggaatgctgatgcaaagagagttgtttgcgacctgagtacatctagaaactttccaagcatcttagatttgaaatgcagccctgttgaacctgtgtttgtctctgcagctgcatcaagacggcatggatcaactacatttgagagaacaggatttgccaacttgacagtgtggcatatgaaaacatggaagccattgacatgtctgctggtcttcaaattacaggatggcctgcccatgattcacctgtgagctctgttctttttgggccagcagaaactagcatcttcagcttaggctcggacggaaagatacttgaatggagtttgcacaatcaaggtcagattctttggtcaagagattgcagcagattctgcaatccggagagctttaaaacacgaatgcatgaaatagcattggattcaaatggcaagaggctgctggtcacctccggtttggttcgggccccaatataccaggtacaaggccatgaaagcgaactgaggacactgccgcacagttcatctatcacaagtgtggattggcatccaacactgccaatgtacatcactggatccgcagaccactctgtccgggtcacgtctatcttatgatgatctataaaacaaggtgctggcaacaacctttcccagctagctagcatgcatcaacccttattgacagtcttatccatgcgtgaggctcggtgtcacgctatttcctcgcatggaagatgagctgtgttcttgttttgtggctttggtgtgcgtctaattctgtaccctttggtgggttgctccaacatttttttttcttgttgtaaacaggcatagagttctgtggtcatttgctttaaaatgagtgatagatcaaaataagtaaactttgtagcccgtctctcgaaatctcacgtctgcatacgcagatatgctatatactgtatgtacttgtaaatgaatttgtagcccgtctcagatagtacttcgcattacaatctatcatccttcac

SEQ ID NO: 48499 - DNA, 2621 bp, Zea Mays
ctatacatcgcacgggccagacgtggagcaggccagggtcgaggcccaactggagctccaggaaggcacacaggccgaaagccgccaccgtttcttcatctcccatctgccggcgctccatcttcgactccctccccgactcgcgctcggcacgcaggcgacgacggcggcgctcaggctcgggctcgggctctcagcgacggcggggcagtcccaatttcggcggcggcgtcagcggctccccctcccgcctcttgccaatcgcctcgcgccctcgcctccggtcctccgcacaccggccggtgaccctgcgtgcgcgcctcccgctcccctcccgcctccggtggaccgttgacagcgcccggccccggcggctgcactgcgcgccgcgtacggccggcgggcagcgggagccagcagccgctgctctaccaaggcggccgcaccgctttggtagcgcttatgccccaacgaagcgttacccgtccgcttagcgctgaagcgtgcgcttagtgccgcctgttggaaccctgatctatagttggtcttcttataacttctcatagtacactttcagcaacacattggactacaatggagaatatgcgttatgctgaggagctcgtgagggagtttctagttttcaggggtttcacaagtacgctgcaagcgtatgagacagagttgtctactgagattggcaggaactttcaaggagacaagatcgtggatttagtgttctcagagtatgtaccgaaataccaactggacaagttgctcggtctgtttgcctttttcaagcagtgtttcatgtcacctgcggacacagagttgttctcaacccttgttaagttggagctgtcagtattaaggtactatgttattaatgctttgaaatctggaagacaagacaaagtaattgaattctttggtgagagtggcaattatctgatgcaaaagcgtggagattggctggcatggtttgctattccatatattaagaacccaagcttggatccacaattccgtctatatttctccaaagagtggctggacactttggttctttcatttaggaattttttgagtgggatattcaatgatactcggaccccagctcttatgagaattagtagtgaaaagaataccatcaaatccctcaagaatgacataaaacaactgaataataaattggcagagctacaagcatccttagaggagaaggaagatgaaatctctctgttgaggagaggatcagcaggttttggtgactgaggaagagtttcctgaggtgaaagtagatttccaggccataacagtccaattagccgatgtcgattttctgcatctgggtcaaatattgctagttcatcaattgatggcacagttaggatttggacatatgattcgtcaactgcatcatccagaaatgctactatatactgtgggtctgaagtcagtgcactttcatgggaatgcagatctgacagattgctgctcataggcacagctaatggaggaattaaagcttggaatgctgatgcaaagagagttgtttgcgacctgagtacatctagaaactttccaagcatcttagatttgaaatgcagccctgttgaacctgtgtttgtctctgcagctgcatcaagacggcatggatcaactacatttgagagaacaggatttgccaacttgacagtgtggcatatgaaaacatggaagccattgactgtcctccctcttggtgaggatccacctgccattacttctctttgcttcaatcacaatgggaagattttggcagcttctgctacagatggaatgattcacatgtttggatggcctgcccatgattcacctgtgagctctgttctttttgggccagcagaaactagcatcttcagcttaggctcggacggaaagatacttgaatggagtttgcacaatcaaggtcagattctttggtcaagagattgcagcagattctgcaatccggagagctttaaaacacgaatgcatgaaatagcattggattcaaatggcaagaggctgctggtcacctccggtttggttcgggccccaatataccaggtacaaggccatgaaagcgaactgaggacactgccgcacagttcatctatcacaagtgtggattggcatccaacactgccaatgtacatcactggatccgcagaccactctgtccgggtcacgtctatcttatgatgatctataaaacaaggtgctggcaacaacctttcccagctagctagcatgcatcaacccttattgacagtcttatccatgcgtgaggctcggtgtcacgctatttcctcgcatggaagatgagctgtgttcttgttttgtggctttggtgtgcgtctaattctgtaccctttggtgggttgctccaacatttttttttcttgttgtaaacaggcatagagttctgtggtcatttgctttaaaatgagtgatagatcaaaataagtaaactttgtagcccgtctctcgaaatctcacgtctgcatacgcagatatgctatatactgtatgtacttgtaaatgaatttgtagcccgtctcagatagtacttcgcattacaatctatcatccttcac

SEQ ID NO: 48500 - DNA, 2851 bp, Zea Mays
ctatacatcgcacgggccagacgtggagcaggccagggtcgaggcccaactggagctccaggaaggcacacaggccgaaagccgccaccgtttcttcatctcccatctgccggcgctccatcttcgactccctccccgactcgcgctcggcacgcaggcgacgacggcggcgctcaggctcgggctcgggctctcagcgacggcggggcagtcccaatttcggcggcggcgtcagcggctccccctcccgcctcttgccaatcgcctcgcgccctcgcctccggtcctccgcacaccggccggtgaccctgcgtgcgcgcctcccgctcccctcccgcctccggtggaccgttgacagcgcccggccccggcggctgcactgcgcgccgcgtacggccggcgggcagcgggagccagcagccgctgctctaccaaggcggccgcaccgctttggtagcgcttatgccccaacgaagcgttacccgtccgcttagcgctgaagcgtgcgcttagtgccgcctgttggaaccctgatctatagttggtcttcttataacttctcatagtacactttcagcaacacattggactacaatggagaatatgcgttatgctgaggagctcgtgagggagtttctagttttcaggggtttcacaagtacgctgcaagcgtatgagacagagttgtctactgagattggcaggaactttcaaggagacaagatcgtggatttagtgttctcagagtatgtaccgaaataccaactggacaagttgctcggtctgtttgcctttttcaagcagtgtttcatgtcacctgcggacacagagttgttctcaacccttgttaagttggagctgtcagtattaaggtactatgttattaatgctttgaaatctggaagacaagacaaagtaattgaattctttggtgagagtggcaattatctgatgcaaaagcgtggagattggctggcatggtttgctattccatatattaagaacccaagcttggatccacaattccgtctatatttctccaaagagtggctggacactttggttctttcatttaggaattttttgagtgggatattcaatgatactcggaccccagctcttatgagaattagtagtgaaaagaataccatcaaatccctcaagaatgacataaaacaactgaataataaattggcagagctacaagcatccttagaggagaaggaagatgaaatctctctgttgaggaggaactataatagtggtggttatggaaacaagaatgtagttggtactagtacagctggttcccctcatgaagagatgtcagaaaactatgaagaatcctcggcctcgagtagcatgatacagggttttgattctcggtcctcaagttcagtgaaatcttatacaagaggtggaaaattccatgaatcttctgagatcaaccatacagaggatcagcaggttttggtgactgaggaagagtttcctgaggtgaaagtagatttccaggaaacatttttaggccataacagtccaattagccgatgtcgattttctgcatctgggtcaaatattgctagttcatcaattgatggcacagttaggatttggacatatgattcgtcaactgcatcatccagaaatgctactatatactgtgggtctgaagtcagtgcactttcatgggaatgcagatctgacagattgctaatggaggaattaaagcttggaatgctgatgcaaagagagttgtttgcgacctgagtacatctagaaactttccaagcatcttagatttgaaatgcagccctgttgaacctgtgtttgtctctgcagctgcatcaagacggcatggatcaactacatttgagagaacaggatttgccaacttgacagtgtggcatatgaaaacatggaagccattgactgtcctccctcttggtgaggatccacctgccattacttctctttgcttcaatcacaatgggaagattttggcagcttctgctacagatggaatgattcacatgtttgacatgtctgctggtcttcaaattacaggatggcctgcccatgattcacctgtgagctctgttctttttgggccagcagaaactagcatcttcagcttaggctcggacggaaagatacttgaatggagtttgcacaatcaaggtcagattctttggtcaagagattgcagcagattctgcaatccggagagctttaaaacacgaatgcatgaaatagcattggattcaaatggcaagaggctgctggtcacctccggtttggttcgggccccaatataccaggtacaaggccatgaaagcgaactgaggacactgccgcacagttcatctatcacaagtgtggattggcatccaacactgccaatgtacatcactggatccgcagaccactctgtccgggtcacgtctatcttatgatgatctataaaacaaggtgctggcaacaacctttcccagctagctagcatgcatcaacccttattgacagtcttatccatgcgtgaggctcggtgtcacgctatttcctcgcatggaagatgagctgtgttcttgttttgtggctttggtgtgcgtctaattctgtaccctttggtgggttgctccaacatttttttttcttgttgtaaacaggcatagagttctgtggtcatttgctttaaaatgagtgatagatcaaaataagtaaactttgtagcccgtctctcgaaatctcacgtctgcatacgcagatatgctatatactgtatgtacttgtaaatgaatttgtagcccgtctcagatagtacttcgcattacaatctatcatccttcac

SEQ ID NO: 48501 - DNA, 2845 bp, Zea Mays
ctatacatcgcacgggccagacgtggagcaggccagggtcgaggcccaactggagctccaggaaggcacacaggccgaaagccgccaccgtttcttcatctcccatctgccggcgctccatcttcgactccctccccgactcgcgctcggcacgcaggcgacgacggcggcgctcaggctcgggctcgggctctcagcgacggcggggcagtcccaatttcggcggcggcgtcagcggctccccctcccgcctcttgccaatcgcctcgcgccctcgcctccggtcctccgcacaccggccggtgaccctgcgtgcgcgcctcccgctcccctcccgcctccggtggaccgttgacagcgcccggccccggcggctgcactgcgcgccgcgtacggccggcgggcagcgggagccagcagccgctgctctaccaaggcggccgcaccgctttggtagcgcttatgccccaacgaagcgttacccgtccgcttagcgctgaagcgtgcgcttagtgccgcctgttggaaccctgatctatagttggtcttcttataacttctcatagtacactttcagcaacacattggactacaatggagaatatgcgttatgctgaggagctcgtgagggagtttctagttttcaggggtttcacaagtacgctgcaagcgtatgagacagagttgtctactgagattggcaggaactttcaaggagacaagatcgtggatttagtgttctcagagtatgtaccgaaataccaactggacaagttgctcggtctgtttgcctttttcaagcagtgtttcatgtcacctgcggacacagagttgttctcaacccttgttaagttggagctgtcagtattaaggtactatgttattaatgctttgaaatctggaagacaagacaaagtaattgaattctttggtgagagtggcaattatctgatgcaaaagcgtggagattggctggcatggtttgctattccatatattaagaacccaagcttggatccacaattccgtctatatttctccaaagagtggctggacactttggttctttcatttaggaattttttgagtgggatattcaatgatactcctcttatgagaattagtagtgaaaagaataccatcaaatccctcaagaatgacataaaacaactgaataataaattggcagagctacaagcatccttagaggagaaggaagatgaaatctctctgttgaggaggaactataatagtggtggttatggaaacaagaatgtagttggtactagtacagctggttcccctcatgaagagatgtcagaaaactatgaagaatcctcggcctcgagtagcatgatacagggttttgattctcggtcctcaagttcagtgaaatcttatacaagaggtggaaaattccatgaatcttctgagatcaaccatacagaggatcagcaggttttggtgactgaggaagagtttcctgaggtgaaagtagatttccaggccataacagtccaattagccgatgtcgattttctgcatctgggtcaaatattgctagttcatcaattgatggcacagttaggatttggacatatgattcgtcaactgcatcatccagaaatgctactatatactgtgggtctgaagtcagtgcactttcatgggaatgcagatctgacagattgctgctcataggcacagctaatggaggaattaaagcttggaatgctgatgcaaagagagttgtttgcgacctgagtacatctagaaactttccaagcatcttagatttgaaatgcagccctgttgaacctgtgtttgtctctgcagctgcatcaagacggcatggatcaactacatttgagagaacaggatttgccaacttgacagtgtggcatatgaaaacatggaagccattgactgtcctccctcttggtgaggatccacctgccattacttctctttgcttcaatcacaatgggaagattttggcagcttctgctacagatggaatgattcacatgtttgacatgtctgctggtcttcaaattacaggatggcctgcccatgattcacctgtgagctctgttctttttgggccagcagaaactagcatcttcagcttaggctcggacggaaagatacttgaatggagtttgcacaatcaaggtcagattctttggtcaagagattgcagcagattctgcaatccggagagctttaaaacacgaatgcatgaaatagcattggattcaaatggcaagaggctgctggtcacctccggtttggttcgggccccaatataccaggtacaaggccatgaaagcgaactgaggacactgccgcacagttcatctatcacaagtgtggattggcatccaacactgccaatgtacatcactggatccgcagaccactctgtccgggtcacgtctatcttatgatgatctataaaacaaggtgctggcaacaacctttcccagctagctagcatgcatcaacccttattgacagtcttatccatgcgtgaggctcggtgtcacgctatttcctcgcatggaagatgagctgtgttcttgttttgtggctttggtgtgcgtctaattctgtaccctttggtgggttgctccaacatttttttttcttgttgtaaacaggcatagagttctgtggtcatttgctttaaaatgagtgatagatcaaaataagtaaactttgtagcccgtctctcgaaatctcacgtctgcatacgcagatatgctatatactgtatgtacttgtaaatgaatttgtagcccgtctcagatagtacttcgcattacaatctatcatccttcac

SEQ ID NO: 48502 - DNA, 2857 bp, Zea Mays
ctatacatcgcacgggccagacgtggagcaggccagggtcgaggcccaactggagctccaggaaggcacacaggccgaaagccgccaccgtttcttcatctcccatctgccggcgctccatcttcgactccctccccgactcgcgctcggcacgcaggcgacgacggcggcgctcaggctcgggctcgggctctcagcgacggcggggcagtcccaatttcggcggcggcgtcagcggctccccctcccgcctcttgccaatcgcctcgcgccctcgcctccggtcctccgcacaccggccggtgaccctgcgtgcgcgcctcccgctcccctcccgcctccggtggaccgttgacagcgcccggccccggcggctgcactgcgcgccgcgtacggccggcgggcagcgggagccagcagccgctgctctaccaaggcggccgcaccgctttggtagcgcttatgccccaacgaagcgttacccgtccgcttagcgctgaagcgtgcgcttagtgccgcctgttggaaccctgatctatagttggtcttcttataacttctcatagtacactttcagcaacacattggactacaatggagaatatgcgttatgctgaggagctcgtgagggagtttctagttttcaggggtttcacaagtacgctgcaagcgtatgagacagagttgtctactgagattggcaggaactttcaaggagacaagatcgtggatttagtgttctcagagtatgtaccgaaataccaactggacaagttgctcggtctgtttgcctttttcaagcagtgtttcatgtcacctgcggacacagagttgttctcaacccttgttaagttggagctgtcagtattaaggtactatgttattaatgctttgaaatctggaagacaagacaaagtaattgaattctttggtgagagtggcaattatctgatgcaaaagcgtggagattggctggcatggtttgctattccatatattaagaacccaagcttggatccacaattccgtctatatttctccaaagagtggctggacactttggttctttcatttaggaattttttgagtgggatattcaatgatactcggaccccagctcttatgagaattagtagtgaaaagaataccatcaaatccctcaagaatgacataaaacaactgaataataaattggcagagctacaagcatccttagaggagaaggaagatgaaatctctctgttgaggaggaactataatagtggtggttatggaaacaagaatgtagttggtactagtacagctggttcccctcatgaagagatgtcagaaaactatgaagaatcctcggcctcgagtagcatgatacagggttttgattctcggtcctcaagttcagtgaaatcttatacaagaggtggaaaattccatgaatcttctgagatcaaccatacagaggatcagcaggttttggtgactgaggaagagtttcctgaggtgaaagtagatttccaggaaacatttttaggccataacagtccaattagccgatgtcgattttctgcatctgggtcaaatattgctagttcatcaattgatggcacagttaggatttggacatatgattcgtcaactgcatcatccagaaatgctactatatactgtgggtctgaagtcagtgcactttcatgggaatgcagatctgacagattggcacagctaatggaggaattaaagcttggaatgctgatgcaaagagagttgtttgcgacctgagtacatctagaaactttccaagcatcttagatttgaaatgcagccctgttgaacctgtgtttgtctctgcagctgcatcaagacggcatggatcaactacatttgagagaacaggatttgccaacttgacagtgtggcatatgaaaacatggaagccattgactgtcctccctcttggtgaggatccacctgccattacttctctttgcttcaatcacaatgggaagattttggcagcttctgctacagatggaatgattcacatgtttgacatgtctgctggtcttcaaattacaggatggcctgcccatgattcacctgtgagctctgttctttttgggccagcagaaactagcatcttcagcttaggctcggacggaaagatacttgaatggagtttgcacaatcaaggtcagattctttggtcaagagattgcagcagattctgcaatccggagagctttaaaacacgaatgcatgaaatagcattggattcaaatggcaagaggctgctggtcacctccggtttggttcgggccccaatataccaggtacaaggccatgaaagcgaactgaggacactgccgcacagttcatctatcacaagtgtggattggcatccaacactgccaatgtacatcactggatccgcagaccactctgtccgggtcacgtctatcttatgatgatctataaaacaaggtgctggcaacaacctttcccagctagctagcatgcatcaacccttattgacagtcttatccatgcgtgaggctcggtgtcacgctatttcctcgcatggaagatgagctgtgttcttgttttgtggctttggtgtgcgtctaattctgtaccctttggtgggttgctccaacatttttttttcttgttgtaaacaggcatagagttctgtggtcatttgctttaaaatgagtgatagatcaaaataagtaaactttgtagcccgtctctcgaaatctcacgtctgcatacgcagatatgctatatactgtatgtacttgtaaatgaatttgtagcccgtctcagatagtacttcgcattacaatctatcatccttcac

SEQ ID NO: 48503 - DNA, 2731 bp, Zea Mays
ctatacatcgcacgggccagacgtggagcaggccagggtcgaggcccaactggagctccaggaaggcacacaggccgaaagccgccaccgtttcttcatctcccatctgccggcgctccatcttcgactccctccccgactcgcgctcggcacgcaggcgacgacggcggcgctcaggctcgggctcgggctctcagcgacggcggggcagtcccaatttcggcggcggcgtcagcggctccccctcccgcctcttgccaatcgcctcgcgccctcgcctccggtcctccgcacaccggccggtgaccctgcgtgcgcgcctcccgctcccctcccgcctccggtggaccgttgacagcgcccggccccggcggctgcactgcgcgccgcgtacggccggcgggcagcgggagccagcagccgctgctctaccaaggcggccgcaccgctttggtagcgcttatgccccaacgaagcgttacccgtccgcttagcgctgaagcgtgcgcttagtgccgcctgttggaaccctgatctatagttggtcttcttataacttctcatagtacactttcagcaacacattggactacaatggagaatatgcgttatgctgaggagctcgtgagggagtttctagttttcaggggtttcacaagtacgctgcaagcgtatgagacagagttgtctactgagattggcaggaactttcaaggagacaagatcgtggatttagtgttctcagagtatgtaccgaaataccaactggacaagttgctcggtctgtttgcctttttcaagcagtgtttcatgtcacctgcggacacagagttgttctcaacccttgttaagttggagctgtcagtattaagctattccatatattaagaacccaagcttggatccacaattccgtctatatttctccaaagagtggctggacactttggttctttcatttaggaattttttgagtgggatattcaatgatactcggaccccagctcttatgagaattagtagtgaaaagaataccatcaaatccctcaagaatgacataaaacaactgaataataaattggcagagctacaagcatccttagaggagaaggaagatgaaatctctctgttgaggaggaactataatagtggtggttatggaaacaagaatgtagttggtactagtacagctggttcccctcatgaagagatgtcagaaaactatgaagaatcctcggcctcgagtagcatgatacagggttttgattctcggtcctcaagttcagtgaaatcttatacaagaggtggaaaattccatgaatcttctgagatcaaccatacagaggatcagcaggttttggtgactgaggaagagtttcctgaggtgaaagtagatttccagtccaattagccgatgtcgattttctgcatctgggtcaaatattgctagttcatcaattgatggcacagttaggatttggacatatgattcgtcaactgcatcatccagaaatgctactatatactgtgggtctgaagtcagtgcactttcatgggaatgcagatctgacagattgctgctcataggcacagctaatggaggaattaaagcttggaatgctgatgcaaagagagttgtttgcgacctgagtacatctagaaactttccaagcatcttagatttgaaatgcagccctgttgaacctgtgtttgtctctgcagctgcatcaagacggcatggatcaactacatttgagagaacaggatttgccaacttgacagtgtggcatatgaaaacatggaagccattgactgtcctccctcttggtgaggatccacctgccattacttctctttgcttcaatcacaatgggaagattttggcagcttctgctacagatggaatgattcacatgtttgacatgtctgctggtcttcaaattacaggatggcctgcccatgattcacctgtgagctctgttctttttgggccagcagaaactagcatcttcagcttaggctcggacggaaagatacttgaatggagtttgcacaatcaaggtcagattctttggtcaagagattgcagcagattctgcaatccggagagctttaaaacacgaatgcatgaaatagcattggattcaaatggcaagaggctgctggtcacctccggtttggttcgggccccaatataccaggtacaaggccatgaaagcgaactgaggacactgccgcacagttcatctatcacaagtgtggattggcatccaacactgccaatgtacatcactggatccgcagaccactctgtccgggtcacgtctatcttatgatgatctataaaacaaggtgctggcaacaacctttcccagctagctagcatgcatcaacccttattgacagtcttatccatgcgtgaggctcggtgtcacgctatttcctcgcatggaagatgagctgtgttcttgttttgtggctttggtgtgcgtctaattctgtaccctttggtgggttgctccaacatttttttttcttgttgtaaacaggcatagagttctgtggtcatttgctttaaaatgagtgatagatcaaaataagtaaactttgtagcccgtctctcgaaatctcacgtctgcatacgcagatatgctatatactgtatgtacttgtaaatgaatttgtagcccgtctcagatagtacttcgcattacaatctatcatccttcac

SEQ ID NO: 48504 - DNA, 2844 bp, Zea Mays
ctatacatcgcacgggccagacgtggagcaggccagggtcgaggcccaactggagctccaggaaggcacacaggccgaaagccgccaccgtttcttcatctcccatctgccggcgctccatcttcgactccctccccgactcgcgctcggcacgcaggcgacgacggcggcgctcaggctcgggctcgggctctcagcgacggcggggcagtcccaatttcggcggcggcgtcagcggctccccctcccgcctcttgccaatcgcctcgcgccctcgcctccggtcctccgcacaccggccggtgaccctgcgtgcgcgcctcccgctcccctcccgcctccggtggaccgttgacagcgcccggccccggcggctgcactgcgcgccgcgtacggccggcgggcagcgggagccagcagccgctgctctaccaaggcggccgcaccgctttggtagcgcttatgccccaacgaagcgttacccgtccgcttagcgctgaagcgtgcgcttagtgccgcctgttggaaccctgatctatagttggtcttcttataacttctcatagtacactttcagcaacacattggactacaatggagaatatgcgttatgctgaggagctcgtgagggagtttctagttttcaggggtttcacaagtacgctgcaagcgtatgagacagagttgtctactgagattggcaggaactttcaaggagacaagatcgtggatttagtgttctcagagtatgtaccgaaataccaactggacaagttgctcggtctgtttgcctttttcaagcagtgtttcatgtcacctgcggacacagagttgttctcaacccttgttaagttggagctgtcagtattaaggtactatgttattaatgctttgaaatctggaagacaagacaaagtaattgaattctttggtgagagtggcaattatctgatgcaaaagcgtggagattggctggcatggtttgctattccatatattaagaacccaagcttggatccacaattccgtctatatttctccaaagagtggctggacactttggttctttcatttaggaattttttgagtgggatattcaatgatactcggaccccagctcttatgagaattagtagtgaaaagaataccatcaaatccctcaagaatgacataaaacaactgaataataaattggcagagctacaagcatccttagaggagaaggaagatgaaatctctctgttgaggaggaactataatagtggtggttatggaaacaagaatgtagttggtactagtacagctggttcccctcatgaagagatgtcagaaaactatgaagaatcctcggcctcgagtagcatgatacagggttttgattctcggtcctcaagttcagtgaaatcttatacaagaggtggaaaattccatgaatcttctgagatcaaccatacagaggatcagcaggttttggtgactgaggaagagtttcctgaggtgaaagtagatttccaggccataacagtccaattagccgatgtcgattttctgcatctgggtcaaatattgctagttcatcaattgatggcacagttaggatttggacatatgattcgtcaactgcatcatccagaaatgctactatatactgtgggtctgaagtcagtgcactttcatgggaatgcagatctgacagattggcacagctaatggaggaattaaagcttggaatgctgatgcaaagagagttgtttgcgacctgagtacatctagaaactttccaagcatcttagatttgaaatgcagccctgttgaacctgtgtttgtctctgcagctgcatcaagacggcatggatcaactacatttgagagaacaggatttgccaacttgacagtgtggcatatgaaaacatggaagccattgactgtcctccctcttggtgaggatccacctgccattacttctctttgcttcaatcacaatgggaagattttggcagcttctgctacagatggaatgattcacatgtttgacatgtctgctggtcttcaaattacaggatggcctgcccatgattcacctgtgagctctgttctttttgggccagcagaaactagcatcttcagcttaggctcggacggaaagatacttgaatggagtttgcacaatcaaggtcagattctttggtcaagagattgcagcagattctgcaatccggagagctttaaaacacgaatgcatgaaatagcattggattcaaatggcaagaggctgctggtcacctccggtttggttcgggccccaatataccaggtacaaggccatgaaagcgaactgaggacactgccgcacagttcatctatcacaagtgtggattggcatccaacactgccaatgtacatcactggatccgcagaccactctgtccgggtcacgtctatcttatgatgatctataaaacaaggtgctggcaacaacctttcccagctagctagcatgcatcaacccttattgacagtcttatccatgcgtgaggctcggtgtcacgctatttcctcgcatggaagatgagctgtgttcttgttttgtggctttggtgtgcgtctaattctgtaccctttggtgggttgctccaacatttttttttcttgttgtaaacaggcatagagttctgtggtcatttgctttaaaatgagtgatagatcaaaataagtaaactttgtagcccgtctctcgaaatctcacgtctgcatacgcagatatgctatatactgtatgtacttgtaaatgaatttgtagcccgtctcagatagtacttcgcattacaatctatcatccttcac

SEQ ID NO: 48505 - DNA, 2854 bp, Zea Mays
ctatacatcgcacgggccagacgtggagcaggccagggtcgaggcccaactggagctccaggaaggcacacaggccgaaagccgccaccgtttcttcatctcccatctgccggcgctccatcttcgactccctccccgactcgcgctcggcacgcaggcgacgacggcggcgctcaggctcgggctcgggctctcagcgacggcggggcagtcccaatttcggcggcggcgtcagcggctccccctcccgcctcttgccaatcgcctcgcgccctcgcctccggtcctccgcacaccggccggtgaccctgcgtgcgcgcctcccgctcccctcccgcctccggtggaccgttgacagcgcccggccccggcggctgcactgcgcgccgcgtacggccggcgggcagcgggagccagcagccgctgctctaccaaggcggccgcaccgctttggtagcgcttatgccccaacgaagcgttacccgtccgcttagcgctgaagcgtgcgcttagtgccgcctgttggaaccctgatctatagttggtcttcttataacttctcatagtacactttcagcaacacattggactacaatggagaatatgcgttatgctgaggagctcgtgagggagtttctagttttcaggggtttcacaagtacgctgcaagcgtatgagacagagttgtctactgagattggcaggaactttcaaggagacaagatcgtggatttagtgttctcagagtatgtaccgaaataccaactggacaagttgctcggtctgtttgcctttttcaagcagtgtttcatgtcacctgcggacacagagttgttctcaacccttgttaagttggagctgtcagtattaaggtactatgttattaatgctttgaaatctggaagacaagacaaagtaattgaattctttggtgagagtggcaattatctgatgcaaaagcgtggagattggctggcatggtttgctattccatatattaagaacccaagcttggatccacaattccgtctatatttctccaaagagtggctggacactttggttctttcatttaggaattttttgagtgggatattcaatgatactcggaccccagctcttatgagaattagtagtgaaaagaataccatcaaatccctcaagaatgacataaaacaactgaataataaattggcagagctacaagcatccttagaggagaaggaagatgaaatctctctgttgaggaggaactataatagtggtggttatggaaacaagaatgtagttggtactagtacagctggttcccctcatgaagagatgtcagaaaactatgaagaatcctcggcctcgagtagcatgatacagggttttgattctcggtcctcaagttcagtgaaatcttatacaagaggtggaaaattccatgaatcttctgagatcaaccatacagaggatcagcaggttttggtgactgaggaagagtttcctgaggtgaaagtagatttccaggccataacagtccaattagccgatgtcgattttctgcatctgggtcaaatattgctagttcatcaattgatggcacagttaggatttggacatatgattcgtcaactgcatcatccagaaatgctactatatactgtgggtctgaagtcagtgcactttcatgggaatgcagatctgacagattgctgctcataggcacagctaatggaggaattaaagcttggaatgctgatgcaaagagagttgtttgcgacctgagtacatctagaaactttccaagcatcttagatttgaaatgcagccctgttgaacctgtgtttgtctctgcagctgcatcaagacggcatggatcaactacatttgagagaacaggatttgccaacttgacagtgtggcatatgaaaacatggaagccattgactgtcctccctcttggtgaggatccacctgccattacttctctttgcttcaatcacaatgggaagattttggcagcttctgctacagatggaatgattcacatgtttgacatgtctgctggtcttcaaattacaggatggcctgcccatgattcacctgtgagctctgttctttttgggccagcagaaactagcatcttcagcttaggctcggacggaaagatacttgaatggagtttgcacaatcaaggtcagattctttggtcaagagattgcagcagattctgcaatccggagagctttaaaacacgaatgcatgaaatagcattggattcaaatggcaagaggctgctggtcacctccggtttggttcgggccccaatataccaggtacaaggccatgaaagcgaactgaggacactgccgcacagttcatctatcacaagtgtggattggcatccaacactgccaatgtacatcactggatccgcagaccactctgtccgggtcacgtctatcttatgatgatctataaaacaaggtgctggcaacaacctttcccagctagctagcatgcatcaacccttattgacagtcttatccatgcgtgaggctcggtgtcacgctatttcctcgcatggaagatgagctgtgttcttgttttgtggctttggtgtgcgtctaattctgtaccctttggtgggttgctccaacatttttttttcttgttgtaaacaggcatagagttctgtggtcatttgctttaaaatgagtgatagatcaaaataagtaaactttgtagcccgtctctcgaaatctcacgtctgcatacgcagatatgctatatactgtatgtacttgtaaatgaatttgtagcccgtctcagatagtacttcgcattacaatctatcatccttcac

SEQ ID NO: 48506 - DNA, 1617 bp, Zea Mays
gtttctttctgctattaatgttaagcttggttagattgaactataatagtggtggttatggaaacaagaatgtagttggtactagtacagctggttcccctcatgaagagatgtcagaaaactatgaagaatcctcggcctcgagtagcatgatacagggttttgattctcggtcctcaagttcagtgaaatcttatacaagaggtggaaaattccatgaatcttctgagatcaaccatacagaggatcagcaggttttggtgactgaggaagagtttcctgaggtgaaagtagatttccaggaaacatttttaggccataacagtccaattagccgatgtcgattttctgcatctgggtcaaatattgctagttcatcaattgatggcacagttaggatttggacatatgattcgtcaactgcatcatccagaaatgctactatatactgtgggtctgaagtcagtgcactttcatgggaatgcagatctgacagattggcacagctaatggaggaattaaagcttggaatgctgatgcaaagagagttgtttgcgacctgagtacatctagaaactttccaagcatcttagatttgaaatgcagccctgttgaacctgtgtttgtctctgcagctgcatcaagacggcatggatcaactacatttgagagaacaggatttgccaacttgacagtgtggcatatgaaaacatggaagccattgactgtcctccctcttggtgaggatccacctgccattacttctctttgcttcaatcacaatgggaagattttggcagcttctgctacagatggaatgattcacatgtttggatggcctgcccatgattcacctgtgagctctgttctttttgggccagcagaaactagcatcttcagcttaggctcggacggaaagatacttgaatggagtttgcacaatcaaggtcagattctttggtcaagagattgcagcagattctgcaatccggagagctttaaaacacgaatgcatgaaatagcattggattcaaatggcaagaggctgctggtcacctccggtttggttcgggccccaatataccaggtacaaggccatgaaagcgaactgaggacactgccgcacagttcatctatcacaagtgtggattggcatccaacactgccaatgtacatcactggatccgcagaccactctgtccgggtcacgtctatcttatgatgatctataaaacaaggtgctggcaacaacctttcccagctagctagcatgcatcaacccttattgacagtcttatccatgcgtgaggctcggtgtcacgctatttcctcgcatggaagatgagctgtgttcttgttttgtggctttggtgtgcgtctaattctgtaccctttggtgggttgctccaacatttttttttcttgttgtaaacaggcatagagttctgtggtcatttgctttaaaatgagtgatagatcaaaataagtaaactttgtagcccgtctctcgaaatctcacgtctgcatacgcagatatgctatatactgtatgtacttgtaaatgaatttgtagcccgtctcagatagtacttcgcattacaatctatcatccttcac

SEQ ID NO: 48507 - DNA, 1676 bp, Zea Mays
gttagattgaactataatagtggtggttatggaaacaagaatgtagttggtactagtacagctggttcccctcatgaagagatgtcagaaaactatgaagaatcctcggcctcgagtagcatgatacagggttttgattctcggtcctcaagttcagtgaaatcttatacaagaggtggaaaattccatgaatcttctgagatcaaccatacagaggatcagcaggttttggtgactgaggaagagtttcctgaggtgaaagtagatttccagtccaattagccgatgtcgattttctgcatctgggtcaaatattgctagttcatcaattgatggcacagttaggatttggacatatgattcgtcaactgcatcatccagaaatgctactatatactgtgggtctgaagtcagtgcactttcatgggaatgcagatctgacagattgctgctcataggcacagctaatggaggaattaaagcttggaatgctgatgcaaagagagttgtttgcgacctgagtacatctagaaactttccaagcatcttagatttgaaatgcagccctgttgaacctgtgtttgtctctgcagctgcatcaagacggcatggatcaactacatttgagagaacaggatttgccaacttgacagtgtggcatatgaaaacatggaagccattggtagttcatttgctttcatcctctcttgaacttgtatgtggatttgtagccagtatcttttctaaaggcttccccccccttttttttcttctactgtgaagactgtcctccctcttggtgaggatccacctgccattacttctctttgcttcaatcacaatgggaagattttggcagcttctgctacagatggaatgattcacatgtttggatggcctgcccatgattcacctgtgagctctgttctttttgggccagcagaaactagcatcttcagcttaggctcggacggaaagatacttgaatggagtttgcacaatcaaggtcagattctttggtcaagagattgcagcagattctgcaatccggagagctttaaaacacgaatgcatgaaatagcattggattcaaatggcaagaggctgctggtcacctccggtttggttcgggccccaatataccaggtacaaggccatgaaagcgaactgaggacactgccgcacagttcatctatcacaagtgtggattggcatccaacactgccaatgtacatcactggatccgcagaccactctgtccgggtcacgtctatcttatgatgatctataaaacaaggtgctggcaacaacctttcccagctagctagcatgcatcaacccttattgacagtcttatccatgcgtgaggctcggtgtcacgctatttcctcgcatggaagatgagctgtgttcttgttttgtggctttggtgtgcgtctaattctgtaccctttggtgggttgctccaacatttttttttcttgttgtaaacaggcatagagttctgtggtcatttgctttaaaatgagtgatagatcaaaataagtaaactttgtagcccgtctctcgaaatctcacgtctgcatacgcagatatgctatatactgtatgtacttgtaaatgaatttgtagcccgtctcagatagtacttcgcattacaatctatcatccttcac

SEQ ID NO: 48508 - DNA, 1528 bp, Zea Mays
ctccttgctcctcaatggcggctgacctctccttgttcctcaatggcggctgccctctccttgtctgtcaacggttgcagcctcctcggcagcggcggccagcagcctgcacagcggcaagatgagtacattgtctgaagaggatcagcaggttttggtgactgaggaagagtttcctgaggtgaaagtagatttccagtccaattagccgatgtcgattttctgcatctgggtcaaatattgctagttcatcaattgatggcacagttaggatttggacatatgattcgtcaactgcatcatccagaaatgctactatatactgtgggtctgaagtcagtgcactttcatgggaatgcagatctgacagattgctgctcataggcacagctaatggaggaattaaagcttggaatgctgatgcaaagagagttgtttgcgacctgagtacatctagaaactttccaagcatcttagatttgaaatgcagccctgttgaacctgtgtttgtctctgcagctgcatcaagacggcatggatcaactacatttgagagaacaggatttgccaacttgacagtgtggcatatgaaaacatggaagccattgactgtcctccctcttggtgaggatccacctgccattacttctctttgcttcaatcacaatgggaagattttggcagcttctgctacagatggaatgattcacatgtttgacatgtctgctggtcttcaaattacaggatggcctgcccatgattcacctgtgagctctgttctttttgggccagcagaaactagcatcttcagcttaggctcggacggaaagatacttgaatggagtttgcacaatcaaggtcagattctttggtcaagagattgcagcagattctgcaatccggagagctttaaaacacgaatgcatgaaatagcattggattcaaatggcaagaggctgctggtcacctccggtttggttcgggccccaatataccaggtacaaggccatgaaagcgaactgaggacactgccgcacagttcatctatcacaagtgtggattggcatccaacactgccaatgtacatcactggatccgcagaccactctgtccgggtcacgtctatcttatgatgatctataaaacaaggtgctggcaacaacctttcccagctagctagcatgcatcaacccttattgacagtcttatccatgcgtgaggctcggtgtcacgctatttcctcgcatggaagatgagctgtgttcttgttttgtggctttggtgtgcgtctaattctgtaccctttggtgggttgctccaacatttttttttcttgttgtaaacaggcatagagttctgtggtcatttgctttaaaatgagtgatagatcaaaataagtaaactttgtagcccgtctctcgaaatctcacgtctgcatacgcagatatgctatatactgtatgtacttgtaaatgaatttgtagcccgtctcagatagtacttcgcattacaatctatcatccttcac

SEQ ID NO: 48509 - DNA, 1490 bp, Zea Mays
ctgacctctccttgttcctcaatggcggctgccctctccttgtctgtcaacggttgcagcctcctcggcagcggcggccagcagcctgcacagcggcaagatgagtacattgtctgaagaggatcagcaggttttggtgactgaggaagagtttcctgaggtgaaagtagatttccaggccataacagtccaattagccgatgtcgattttctgcatctgggtcaaatattgctagttcatcaattgatggcacagttaggatttggacatatgattcgtcaactgcatcatccagaaatgctactatatactgtgggtctgaagtcagtgcactttcatgggaatgcagatctgacagattgctgctcataggcacagctaatggaggaattaaagcttggaatgctgatgcaaagagagttgtttgcgacctgagtacatctagaaactttccaagcatcttagatttgaaatgcagccctgttgaacctgtgtttgtctctgcagctgcatcaagacggcatggatcaactacatttgagagaacaggatttgccaacttgacagtgtggcatatgaaaacatggaagccattgactgtcctccctcttggtgaggatccacctgccattacttctctttgcttcaatcacaatgggaagattttggcagcttctgctacagatggaatgattcacatgtttggatggcctgcccatgattcacctgtgagctctgttctttttgggccagcagaaactagcatcttcagcttaggctcggacggaaagatacttgaatggagtttgcacaatcaaggtcagattctttggtcaagagattgcagcagattctgcaatccggagagctttaaaacacgaatgcatgaaatagcattggattcaaatggcaagaggctgctggtcacctccggtttggttcgggccccaatataccaggtacaaggccatgaaagcgaactgaggacactgccgcacagttcatctatcacaagtgtggattggcatccaacactgccaatgtacatcactggatccgcagaccactctgtccgggtcacgtctatcttatgatgatctataaaacaaggtgctggcaacaacctttcccagctagctagcatgcatcaacccttattgacagtcttatccatgcgtgaggctcggtgtcacgctatttcctcgcatggaagatgagctgtgttcttgttttgtggctttggtgtgcgtctaattctgtaccctttggtgggttgctccaacatttttttttcttgttgtaaacaggcatagagttctgtggtcatttgctttaaaatgagtgatagatcaaaataagtaaactttgtagcccgtctctcgaaatctcacgtctgcatacgcagatatgctatatactgtatgtacttgtaaatgaatttgtagcccgtctcagatagtacttcgcattacaatctatcatccttcac

SEQ ID NO: 48510 - DNA, 1451 bp, Zea Mays
agcggcggccagcagcctgcacagcggcaagatgagtacattgtctgaagaggatcagcaggttttggtgactgaggaagagtttcctgaggtgaaagtagatttccaggaaacatttttaggccataacagtccaattagccgatgtcgattttctgcatctgggtcaaatattgctagttcatcaattgatggcacagttaggatttggacatatgattcgtcaactgcatcatccagaaatgctactatatactgtgggtctgaagtcagtgcactttcatgggaatgcagatctgacagattggcacagctaatggaggaattaaagcttggaatgctgatgcaaagagagttgtttgcgacctgagtacatctagaaactttccaagcatcttagatttgaaatgcagccctgttgaacctgtgtttgtctctgcagctgcatcaagacggcatggatcaactacatttgagagaacaggatttgccaacttgacagtgtggcatatgaaaacatggaagccattgactgtcctccctcttggtgaggatccacctgccattacttctctttgcttcaatcacaatgggaagattttggcagcttctgctacagatggaatgattcacatgtttgacatgtctgctggtcttcaaattacaggatggcctgcccatgattcacctgtgagctctgttctttttgggccagcagaaactagcatcttcagcttaggctcggacggaaagatacttgaatggagtttgcacaatcaaggtcagattctttggtcaagagattgcagcagattctgcaatccggagagctttaaaacacgaatgcatgaaatagcattggattcaaatggcaagaggctgctggtcacctccggtttggttcgggccccaatataccaggtacaaggccatgaaagcgaactgaggacactgccgcacagttcatctatcacaagtgtggattggcatccaacactgccaatgtacatcactggatccgcagaccactctgtccgggtcacgtctatcttatgatgatctataaaacaaggtgctggcaacaacctttcccagctagctagcatgcatcaacccttattgacagtcttatccatgcgtgaggctcggtgtcacgctatttcctcgcatggaagatgagctgtgttcttgttttgtggctttggtgtgcgtctaattctgtaccctttggtgggttgctccaacatttttttttcttgttgtaaacaggcatagagttctgtggtcatttgctttaaaatgagtgatagatcaaaataagtaaactttgtagcccgtctctcgaaatctcacgtctgcatacgcagatatgctatatactgtatgtacttgtaaatgaatttgtagcccgtctcagatagtacttcgcattacaatctatcatccttcac

SEQ ID NO: 48511 - DNA, 1710 bp, Zea Mays
cctaacttaccttgtttctgtaacacacacgttagtcacaataatattatgttgtcattaatcaccgaaaccaaattggggcctatatgctttcagtgttagttcaattttacatcatctgaaatgaaaagtcggttttctgggcacctggagatggtctaatgcttccgtagtttagattgttttaatgtgtgcaccaatatatttttcctatttcatattcttcaatttattcttctgttgtgctttatgtatagtacatgttttccatatctttggtaccctttcttttgctgcagaggatcagcaggttttggtgactgaggaagagtttcctgaggtgaaagtagatttccaggaaacatttttaggccataacagtccaattagccgatgtcgattttctgcatctgggtcaaatattgctagttcatcaattgatggcacagttaggatttggacatatgattcgtcaactgcatcatccagaaatgctactatatactgtgggtctgaagtcagtgcactttcatgggaatgcagatctgacagattgctgctcataggcacagctaatggaggaattaaagcttggaatgctgatgcaaagagagttgtttgcgacctgagtacatctagaaactttccaagcatcttagatttgaaatgcagccctgttgaacctgtgtttgtctctgcagctgcatcaagacggcatggatcaactacatttgagagaacaggatttgccaacttgacagtgtggcatatgaaaacatggaagccattgactgtcctccctcttggtgaggatccacctgccattacttctctttgcttcaatcacaatgggaagattttggcagcttctgctacagatggaatgattcacatgtttgacatgtctgctggtcttcaaattacaggatggcctgcccatgattcacctgtgagctctgttctttttgggccagcagaaactagcatcttcagcttaggctcggacggaaagatacttgaatggagtttgcacaatcaaggtcagattctttggtcaagagattgcagcagattctgcaatccggagagctttaaaacacgaatgcatgaaatagcattggattcaaatggcaagaggctgctggtcacctccggtttggttcgggccccaatataccaggtacaaggccatgaaagcgaactgaggacactgccgcacagttcatctatcacaagtgtggattggcatccaacactgccaatgtacatcactggatccgcagaccactctgtccgggtcacgtctatcttatgatgatctataaaacaaggtgctggcaacaacctttcccagctagctagcatgcatcaacccttattgacagtcttatccatgcgtgaggctcggtgtcacgctatttcctcgcatggaagatgagctgtgttcttgttttgtggctttggtgtgcgtctaattctgtaccctttggtgggttgctccaacatttttttttcttgttgtaaacaggcatagagttctgtggtcatttgctttaaaatgagtgatagatcaaaataagtaaactttgtagcccgtctctcgaaatctcacgtctgcatacgcagatatgctatatactgtatgtacttgtaaatgaatttgtagcccgtctcagatagtacttcgcattacaatctatcatccttcac

SEQ ID NO: 48512 - DNA, 2337 bp, Zea Mays
aaaccaggttttccgacaacccagagagccaaagaaaggactaccaacaaccgcaaccgctcgcttcccagcacctccccacctttcgctccctccctccctccaattgcaggatcggcaccgatgcgattcgaccgcggcctcgcatccggtgcggaggtctgtcattggagggaggctcctctccgctgcgcgcgcgcgtcgcggcctgggcgagtttcctgctggttcctcgtccctcgggagagattttgcgatccttggcgttactgttcgattgcaaacagtattgctgcttctctgaggaggcattagggctatgggcagttgaactgaaccgccgcggcagaaatccattcgtgggagagagaaatcaaagaggagagtgagtgatcatggagcgcgtgattggagggaagtataagcttgggaggaagattgggagcggatcttttggggagctatatctcggtgttaatatacagaatggtgaggaagtgggaataaaattggagcctgtgaaaacaaaacatccacagctgcactatgaatctaaagtttatatgctactgcagggtggaaatggtatcccacacctcaagtggtatggtgtcgagggggagtacaatgttatggtgatcgatcttcttggcccaagcttggaagatttgtttaattcctgccacaggaatttttctatgaaaacagtactcatgcttgctgatcaactgataaaccgagtggaatacatgcattccaagggatttattcatcgtgacatcaagccagacaacttccttatgggcttaggtcggaaagctaatcaggtctatatcattgattatggacttgctaagaaatacaaggaccttcatactcataaacacatcccatacagggagaacaaaaatctgactggaacagcacgttatgctagtgtgaatactcatcttggaatagaacaaagtaggagagatgatctggagtctgctggctatcttctgctatattttttaagaggaagcctcccatggcagggtcttaaagctggcactaagaaacagaagtatgacaaaattagtgaaaagaaaatgcttacgtcagcagaggttctttgcaatcttacccgtcggagttcgtctcatatttcaactattgtcgctccctgcgatttgaagacaggccagactactcttttctgaagaaactgtttcgtgatgtatttatccgggaaggataccagtttgattacgtatttgactggactgtactcaagcaccctcaaatcggttccaacaacaagcttgttcaacaaccaagtgcaagaatggctggagttggaccatcagttgaccgaacagacaaagcctccgtgggacaagaggcccgggacagattcacgggtgctgttgaggcattcgccagaagaaatccaggctctggtcgccatggagatcattccaggcaccaaagccttgcagattcctttggcacatccaacgaagcagttgccgactcagagaaaacgcacatcttgtcctggggagggagctcgtcgaaaatgcccgcggcttcgtccagccggccgacctcctcgggggactgcagtgaccagaaccaccggtgggtttctggcagtagtggcggcagcgggcggccgtccacagtgcagaggcaccaccactcggcaggcgccgagaacagcaggtcgtccacgcgctcccccgtggcccggaacgcggccgagagaggaggctccggctcgcgggacagcacgacgttccggagcctcgagcgcctctccatcaccaccagcaggaggaagtgagctgccgaggaccacgccgacgatttctgtgagtgaaaggcggttactaggccgacatcttttgcgggatcgttgctctctgcagctgaagcaaatcggcaaatggatggacgggattgcagcgcaatgacctcgaggatggcctcctttacaagaactgccatgaaaatgctttctccaaaccgtaacgtataacgcttcccccaaccaaccagagggaagacaactccaaagtacaatgcaatcctgtttcacggcaagctttcactgttcacttgttttgccgttctggcactagtttctaaagtctccagcaatgtaatctatattcatcttctatgcctgtactttatagtctcatctaaaagattctctcttctatatctttctaatctgcagcagcgtcctctatatctcgtcctttatacatactagtcggttgcctatgcgttgtgacggctcacaataatacccacgtaaactatccgccaaaaagatctcaatatttt

SEQ ID NO: 48513 - DNA, 2371 bp, Zea Mays
aaaccaggttttccgacaacccagagagccaaagaaaggactaccaacaaccgcaaccgctcgcttcccagcacctccccacctttcgctccctccctccctccaattgcaggatcggcaccgatgcgattcgaccgcggcctcgcatccggtgcggaggtctgtcattggagggaggctcctctccgctgcgcgcgcgcgtcgcggcctgggcgagtttcctgctggttcctcgtccctcgggagagattttgcgatccttggcgttactgttcgattgcaaacagtattgctgcttctctgaggaggcattagggctatgggcagttgaactgaaccgccgcggcagaaatccattcgtgggagagagaaatcaaagaggagagtgagtgatcatggagcgcgtgattggagggaagtataagcttgggaggaagattgggagcggatcttttggggagctatatctcggtgttaatatacagaatggtgaggaagtgggaataaaattgaatcaagatataccatttttaaacttagagctgaagtgtttggttcaaggattcaccttttctttgggtggaaatggtatcccacacctcaagtggtatggtgtcgagggggagtacaatgttatggtgatcgatcttcttggcccaagcttggaagatttgtttaattcctgccacaggaatttttctatgaaaacagtactcatgcttgctgatcaactgataaaccgagtggaatacatgcattccaagggatttattcatcgtgacatcaagccagacaacttccttatgggcttaggtcggaaagctaatcaggtctatatcattgattatggacttgctaagaaatacaaggaccttcatactcataaacacatcccatacagggagaacaaaaatctgactggaacagcacgttatgctagtgtgaatactcatcttggaatagaacaaagtaggagagatgatctggagtctgctggctatcttctgctatattttttaagaggaagcctcccatggcagggtcttaaagctggcactaagaaacagaagtatgacaaaattagtgaaaagaaaatgcttacgtcagcagaggttctttgcaatcttacccgtcggagttcgtctcatatttcaactattgtcgctccctgcgatttgaagacaggccagactactcttttctgaagaaactgtttcgtgatgtatttatccgggaaggtacacaccccctttgttctgagtggctaacgataccagtttgattacgtatttgactggactgtactcaagcaccctcaaatcggttccaacaacaagcttgttcaacaaccaagtgcaagaatggctggagttggaccatcagttgaccgaacagacaaagcctccgtgggacaagaggcccgggacagattcacgggtgctgttgaggcattcgccagaagaaatccaggctctggtcgccatggagatcattccaggcaccaaagccttgcagattcctttggcacatccaacgaagcagttgccgactcagagaaaacgcacatcttgtcctggggagggagctcgtcgaaaatgcccgcggcttcgtccagccggccgacctcctcgggggactgcagtgaccagaaccaccggtgggtttctggcagtagtggcggcagcgggcggccgtccacagtgcagaggcaccaccactcggcaggcgccgagaacagcaggtcgtccacgcgctcccccgtggcccggaacgcggccgagagaggaggctccggctcgcgggacagcacgacgttccggagcctcgagcgcctctccatcaccaccagcaggaggaagtgagctgccgaggaccacgccgacgatttctgtgagtgaaaggcggttactaggccgacatcttttgcgggatcgttgctctctgcagctgaagcaaatcggcaaatggatggacgggattgcagcgcaatgacctcgaggatggcctcctttacaagaactgccatgaaaatgctttctccaaaccgtaacgtataacgcttcccccaaccaaccagagggaagacaactccaaagtacaatgcaatcctgtttcacggcaagctttcactgttcacttgttttgccgttctggcactagtttctaaagtctccagcaatgtaatctatattcatcttctatgcctgtactttatagtctcatctaaaagattctctcttctatatctttctaatctgcagcagcgtcctctatatctcgtcctttatacatactagtcggttgcctatgcgttgtgacggctcacaataatacccacgtaaactatccgccaaaaagatctcaatatttt

SEQ ID NO: 48514 - DNA, 2349 bp, Zea Mays
aaaccaggttttccgacaacccagagagccaaagaaaggactaccaacaaccgcaaccgctcgcttcccagcacctccccacctttcgctccctccctccctccaattgcaggatcggcaccgatgcgattcgaccgcggcctcgcatccggtgcggaggtctgtcattggagggaggctcctctccgctgcgcgcgcgcgtcgcggcctgggcgagtttcctgctggttcctcgtccctcgggagagattttgcgatccttggcgttactgttcgattgcaaacagtattgctgcttctctgaggaggcattagggctatgggcagttgaactgaaccgccgcggcagaaatccattcgtgggagagagaaatcaaagaggagagtgagtgatcatggagcgcgtgattggagggaagtataagcttgggaggaagattgggagcggatcttttggggagctatatctcggtgttaatatacagaatggtgaggaagtgggaataaaattggagcctgtgaaaacaaaacatccacagctgcactatgaatctaaagtttatatgctactgcagggtggaaatggtatcccacacctcaagtggtatggtgtcgagggggagtacaatgttatggtgatcgatcttcttggcccaagcttggaagatttgtttaattcctgccacaggaatttttctatgaaaacagtactcatgcttgctgatcaactgataaaccgagtggaatacatgcattccaagggatttattcatcgtgacatcaagccagacaacttccttatgggcttaggtcggaaagctaatcaggtctatatcattgattatggacttgctaagaaatacaaggaccttcatactcataaacacatcccatacagggagaacaaaaatctgactggaacagcacgttatgctagtgtgaatactcatcttggaatagaacaaagtaggagagatgatctggagtctgctggctatcttctgctatattttttaagaggaagcctcccatggcagggtcttaaagctggcactaagaaacagaagtatgacaaaattagtgaaaagaaaatgcttacgtcagcagaggttctttgcaatcttacccgtcggagttcgtctcatatttcaactattgtcgctccctgcgatttgaagacaggccagactactcttttctgaagaaactgtttcgtgatgtatttatccgggaaggataccagtttgattacgtatttgactggactgtactcaagcaccctcaaatcggttccaacaacaagcttgttcaacaaccaagtgcaagaatggctggagttggaccatcagttgaccgaacagacaaagcctccggtaccgctcctgtgggacaagaggcccgggacagattcacgggtgctgttgaggcattcgccagaagaaatccaggctctggtcgccatggagatcattccaggcaccaaagccttgcagattcctttggcacatccaacgaagcagttgccgactcagagaaaacgcacatcttgtcctggggagggagctcgtcgaaaatgcccgcggcttcgtccagccggccgacctcctcgggggactgcagtgaccagaaccaccggtgggtttctggcagtagtggcggcagcgggcggccgtccacagtgcagaggcaccaccactcggcaggcgccgagaacagcaggtcgtccacgcgctcccccgtggcccggaacgcggccgagagaggaggctccggctcgcgggacagcacgacgttccggagcctcgagcgcctctccatcaccaccagcaggaggaagtgagctgccgaggaccacgccgacgatttctgtgagtgaaaggcggttactaggccgacatcttttgcgggatcgttgctctctgcagctgaagcaaatcggcaaatggatggacgggattgcagcgcaatgacctcgaggatggcctcctttacaagaactgccatgaaaatgctttctccaaaccgtaacgtataacgcttcccccaaccaaccagagggaagacaactccaaagtacaatgcaatcctgtttcacggcaagctttcactgttcacttgttttgccgttctggcactagtttctaaagtctccagcaatgtaatctatattcatcttctatgcctgtactttatagtctcatctaaaagattctctcttctatatctttctaatctgcagcagcgtcctctatatctcgtcctttatacatactagtcggttgcctatgcgttgtgacggctcacaataatacccacgtaaactatccgccaaaaagatctcaatatttt

SEQ ID NO: 48515 - DNA, 2224 bp, Zea Mays
aaaccaggttttccgacaacccagagagccaaagaaaggactaccaacaaccgcaaccgctcgcttcccagcacctccccacctttcgctccctccctccctccaattgcaggatcggcaccgatgcgattcgaccgcggcctcgcatccggtgcggaggtctgtcattggagggaggctcctctccgctgcgcgcgcgcgtcgcggcctgggcgagtttcctgctggttcctcgtccctcgggagagattttgcgatccttggcgttactgttcgattgcaaacagtattgctgcttctctgaggaggcattagggctatgggcagttgaactgaaccgccgcggcagaaatccattcgtgggagagagaaatcaaagaggagagtgagtgatcatggagcgcgtgattggagggaagtataagcttgggaggaagattgggagcggatcttttggggagctatatctcggtgttaatatacagaatggtgaggaagtgggaataaaattggagcctgtgaaaacaaaacatccacagctgcactatgaatctaaagtttatatgctactgcagggtggaaatggtatcccacacctcaagtggtatggtgtcgagggggagtacaatgttatggtgatcgatcttcttggcccaagcttggaagatttgtttaattcctgccacaggaatttttctatgaaaacagtactcatgcttgctgatcaactgataaaccgagtggaatacatgcattccaagggatttattcatcgtgacatcaagccagacaacttccttatgggcttaggtcggaaagctaatcaggtctatatcattgattatggacttgctaagaaatacaaggaccttcatactcataaacacatcccatacagggagaacaaaaatctgactggaacagcacgttatgctagtgtgaatactcatcttggaatagaacaaagtaggagagatgatctggagtctgctggctatcttctgctatattttttaagaggaagcctcccatggcagggtcttaaagctggcactaagaaacagaagtatgacaaaattagtgaaaagaaaatgcttacgtcagcagagattaacactgtaggataccagtttgattacgtatttgactggactgtactcaagcaccctcaaatcggttccaacaacaagcttgttcaacaaccaagtgcaagaatggctggagttggaccatcagttgaccgaacagacaaagcctccgtgggacaagaggcccgggacagattcacgggtgctgttgaggcattcgccagaagaaatccaggctctggtcgccatggagatcattccaggcaccaaagccttgcagattcctttggcacatccaacgaagcagttgccgactcagagaaaacgcacatcttgtcctggggagggagctcgtcgaaaatgcccgcggcttcgtccagccggccgacctcctcgggggactgcagtgaccagaaccaccggtgggtttctggcagtagtggcggcagcgggcggccgtccacagtgcagaggcaccaccactcggcaggcgccgagaacagcaggtcgtccacgcgctcccccgtggcccggaacgcggccgagagaggaggctccggctcgcgggacagcacgacgttccggagcctcgagcgcctctccatcaccaccagcaggaggaagtgagctgccgaggaccacgccgacgatttctgtgagtgaaaggcggttactaggccgacatcttttgcgggatcgttgctctctgcagctgaagcaaatcggcaaatggatggacgggattgcagcgcaatgacctcgaggatggcctcctttacaagaactgccatgaaaatgctttctccaaaccgtaacgtataacgcttcccccaaccaaccagagggaagacaactccaaagtacaatgcaatcctgtttcacggcaagctttcactgttcacttgttttgccgttctggcactagtttctaaagtctccagcaatgtaatctatattcatcttctatgcctgtactttatagtctcatctaaaagattctctcttctatatctttctaatctgcagcagcgtcctctatatctcgtcctttatacatactagtcggttgcctatgcgttgtgacggctcacaataatacccacgtaaactatccgccaaaaagatctcaatatttt

SEQ ID NO: 48516 - DNA, 2163 bp, Zea Mays
aaaccaggttttccgacaacccagagagccaaagaaaggactaccaacaaccgcaaccgctcgcttcccagcacctccccacctttcgctccctccctccctccaattgcaggatcggcaccgatgcgattcgaccgcggcctcgcatccggtgcggaggtctgtcattggagggaggctcctctccgctgcgcgcgcgcgtcgcggcctgggcgagtttcctgctggttcctcgtccctcgggagagattttgcgatccttggcgttactgttcgattgcaaacagtattgctgcttctctgaggaggcattagggctatgggcagttgaactgaaccgccgcggcagaaatccattcgtgggagagagaaatcaaagaggagagtgagtgatcatggagcgcgtgattggagggaagtataagcttgggaggaagattgggagcggatcttttggggagctatatctcggtgttaatatacagaatggtgaggaagtgggaataaaattggagcctgtgaaaacaaaacatccacagctgcactatgaatctaaagtttatatgctactgcagggtggaaatggtatcccacacctcaagtggtatggtgtcgagggggagtacaatgttatggtgatcgatcttcttggcccaagcttggaagatttgtttaattcctgccacaggaatttttctatgaaaacagtactcatgcttgctgatcaactgataaaccgagtggaatacatgcattccaagggatttattcatcgtgacatcaagccagacaacttccttatgggcttaggtcggaaagctaatcaggtctatatcattgattatggacttgctaagaaatacaaggaccttcatactcataaacacatcccatacagggagaacaaaaatctgactggaacagcacgttatgctagtgtgaatactcatcttggaatagaacaaagtaggagagatgatctggagtctgctggctatcttctgctatattttttaagaggaagcctcccatggcagggtcttaaagctggcactaagaaacagaagtatgacaaaattagtgaaaagaaaatgcttacgtcagcagagattaacactgtaggataccagtttgattacgtatttgactggactgtactcaagcaccctcaaatcggttccaacaacaagcttgttcaatgggacaagaggcccgggacagattcacgggtgctgttgaggcattcgccagaagaaatccaggctctggtcgccatggagatcattccaggcaccaaagccttgcagattcctttggcacatccaacgaagcagttgccgactcagagaaaacgcacatcttgtcctggggagggagctcgtcgaaaatgcccgcggcttcgtccagccggccgacctcctcgggggactgcagtgaccagaaccaccggtgggtttctggcagtagtggcggcagcgggcggccgtccacagtgcagaggcaccaccactcggcaggcgccgagaacagcaggtcgtccacgcgctcccccgtggcccggaacgcggccgagagaggaggctccggctcgcgggacagcacgacgttccggagcctcgagcgcctctccatcaccaccagcaggaggaagtgagctgccgaggaccacgccgacgatttctgtgagtgaaaggcggttactaggccgacatcttttgcgggatcgttgctctctgcagctgaagcaaatcggcaaatggatggacgggattgcagcgcaatgacctcgaggatggcctcctttacaagaactgccatgaaaatgctttctccaaaccgtaacgtataacgcttcccccaaccaaccagagggaagacaactccaaagtacaatgcaatcctgtttcacggcaagctttcactgttcacttgttttgccgttctggcactagtttctaaagtctccagcaatgtaatctatattcatcttctatgcctgtactttatagtctcatctaaaagattctctcttctatatctttctaatctgcagcagcgtcctctatatctcgtcctttatacatactagtcggttgcctatgcgttgtgacggctcacaataatacccacgtaaactatccgccaaaaagatctcaatatttt

SEQ ID NO: 48517 - DNA, 1106 bp, Zea Mays
ctaggacgagatcagttggtagttcaccagagttcacaaaaaaatcacaagcaagcagttgcgggtgtagctcgcaacaatggcgacgaaccccggcctcttcaccgagtggccgtggaagaagctcggcaacttcaagccgtcatccatccatttgctgagctcgtggcgtatgaactattgttctcaatcccattgattgtgtgcaccttgaacggaactgcttcaattattgcatttgagatttacgtgatctacatcgacttcatgaacaacatgggccactgcaactttgaattggtgcccaattggctcttcaaatggttccctcctctcaagtatctcatgtacacaccctcgtttcattctcttcaccacactcagttcaggacaaactactccctgttcatgccattctatgactacatatataacaccatggacaagtcatcggacacgttgtatgagaagtcactcaagggaaaagaagaaacggcagatgtggttcaccttacccaccttaccagcctgcactccatctatcatatgaggcccgggtttgcagaatatgcttctagaccttacactgccaagtggtatgtgcggatgatgtggccgatgtcatggctctccatggttctgacatggtcatatggttcttcatttactgttgagaggaacgtcatgaagaaactcaaaatgcaatcatgggtcatcccaagatacagtttccatgtaagaaccatagttaactaaatgtgcgatgtcttcttgatattttttcataacaatgagtaggacctccagtgccaacaaaatcatcttgttttagaaataatctaacagaatcacaaactttctttgttctgtagtatggattgagttgggagaaggaagcaatcaatagcctcgttgagaaggcaatatgtgaagctgacaagaaaggagctaaagttgttaccctcggactccttaaccagtctaaaggaatattcatcagtcacaaactcattttttgaaacgaaccggcaggagatctgcccgttatattaaaaaaagaggagcccaagtggcgaggattaaaatacaaagacactccacaaaag

SEQ ID NO: 48518 - DNA, 1986 bp, Zea Mays
ctaggacgagatcagttggtagttcaccagagttcacaaaaaaatcacaagcaagcagttgcgggtgtagctcgcaacaatggcgacgaaccccggcctcttcaccgagtggccgtggaagaagctcggcaacttcaagccgtcatccatccatttgctgagctcgtggcgtatgaactattgttctcaatcccattgattgtgtgcaccttgaacggaactgcttcaattattgcatttgagatttacgtgatctacatcgacttcatgaacaacatgggccactgcaactttgaattggtgcccaattggctcttcaaatggttccctcctctcaagtatctcatgtacacaccctcgtttcattctcttcaccacactcagttcaggacaaactactccctgttcatgccattctatgactacatatataacaccatggacaagtcatcggacacgttgtatgagaagtcactcaagggaaaagaagaaacggcagatgtggttcaccttacccaccttaccagcctgcactccatctatcatatgaggcccgggtttgcagaatatgcttctagaccttacactgccaagtggtatgtgcggatgatgtggccgatgtcatggctctccatggttctgacatggtcatatggttcttcatttactgttgagaggaacgtcatgaagaaactcaaaatgcaatcatgggtcatcccaagatacagtttccattatggattgagttgggagaaggaagcaatcaatagcctcgttgagaaggcaatatgtgaagctgacaagaaaggagctaaagttgttaccctcggactccttaaccaggtgtggttaattggggatggtctagatgcttctgagcagtttaaggcacagaaagggacccagtttatcccatattcacagtttccaccaagaatggcacgcaaggacacctgcacctactcgacaactcctgcaatggttgtacctaaaacactacagaatgtgcactcctgtgagaattggctgccaaggagggtcatgagtgcatggcgcattgctggaatggttcatgcattggagggatggaacgagcatgagtgtggggacatcgtgctagacatggagaaaatgtggtctggtgctcttctgcatggtttccgccctgtggctcaagtttgattctccagttgcaaatgcaaggcagcacaataagttattgaaagttataacataatgctcgcgagaactatgctacatacatatcagtatgttggtgttctgtacttctgtttgtccatgctctgcctcttatcacttaagacatctgctatctatgaagttaagatgaactcatgtagtgtaaaaaccattctgcagaagcagggtgaaaaatagcatctctacaatggtaagaggggatgggatgtagtatataagtgagtctgatctactgctagatgtttactactttattcacaccctacgctcaaagatcaacgatgaattaattatgcgtcgatatttctccatgcatcaatgcatatttcaacaaggaaaagtatgagaaatgctattcattctccatgtagagatgtggatgaaagatctgcttcaatgcttcattttgttcatgatccagagaaagtagagatgtcatgtaagatgtaacagtggcccatattgcccatgacgaaaggcaataaaacgtgaccaacatatgctctgctggcactgaaatggagtagcatagcacaagctcttctaaaacatgtaaggcacaattgcacagcatactaatcattgaaacaaagtacaaagtatcaagtatggtatcttatcatacaaacaagattgttaaaatggggaacttcgaaaaccttacctcagtgttgtaatcctagccatttatcaactgtttgccagtacattcatctaattttggtttgcaccatataatgactgtaggccatcattgatagtgac

SEQ ID NO: 48519 - DNA, 2075 bp, Zea Mays
ctaggacgagatcagttggtagttcaccagagttcacaaaaaaatcacaagcaagcagttgcgggtgtagctcgcaacaatggcgacgaaccccggcctcttcaccgagtggccgtggaagaagctcggcaacttcaagtacctgctgctggcgccgtgggtggcgcacggcggctacctagcggcgaccaaggggtggagggcggccgacctggggtacgtggccatcctcccgtcgctgctcctccgggcgctgcacaaccaggcgtggatcacggcgtcccgcctgcagagcgcgcgcggccggcggcaggtcgtggaccgcggcatcgagttcgagcaggtggaccgcgagcgcaactgggacgaccagatcctgctcagcggcatcctcctgtacctgggctccacctacctgccggggggccagcacctgccgctgtggcgcgcggacggcgccgcgctcatcgcgctgctgcacgccggccccgtcgagctcgtctactactggctgcaccgcgcgctgcaccaccacttcctctactcccgctaccactcccaccaccacgcctccatcgtcaccgagccaatcacctccgtcatccatccatttgctgagctcgtggcgtatgaactattgttctcaatcccattgattgtgtgcaccttgaacggaactgcttcaattattgcatttgagatttacgtgatctacatcgacttcatgaacaacatgggccactgcaactttgaattggtgcccaattggctcttcaaatggttccctcctctcaagtatctcatgtacacaccctcgtttcattctcttcaccacactcagttcaggacaaactactccctgttcatgccattctatgactacatatataacaccatggacaagtcatcggacacgttgtatgagaagtcactcaagggaaaagaagaaacggcagatgtggttcaccttacccaccttaccagcctgcactccatctatcatatgaggcccgggtttgcagaatatgcttctagaccttacactgccaagtggtatgtgcggatgatgtggccgatgtcatggctctccatggttctgacatggtcatatggttcttcatttactgttgagaggaacgtcatgaagaaactcaaaatgcaatcatgggtcatcccaagatacagtttccattatggattgagttgggagaaggaagcaatcaatagcctcgttgagaaggcaatatgtgaagctgacaagaaaggagctaaagttgttaccctcggactccttaaccaggcacataacctcaacagaaatggagaactttatcttcagaagtgcccaaagttgggagtaagactcgtagatggcaccagcttagctgctgcagtagttgtgaatagtgttcctcaaggcacagatcaagttgttctcgcagggaatatttccaaagttgctcgtgctgttgccgcagcattgtgtaggaagaatatcaaggtagtaatgaccaacaagcaggattaccattttcttaagcctaacatggcagaagatgcagctgagaaccttttgttttcaaagacaactactgcaaaggtgtggttaattggggatggtctagatgcttctgagcagtttaaggcacagaaagggacccagtttatcccatattcacagtttccaccaagaatggcacgcaaggacacctgcacctactcgacaactcctgcaatggttgtacctaaaacactacagaatgtgcactcctgtgagaattggctgccaaggagggtcatgagtgcatggcgcattgctggaatggttcatgcattggagggatggaacgagcatgagtgtggggacatcgtgctagacatggagaaaatgtggtctggtgctcttctgcatggtttccgccctgtggctcaagtttgattctccagttgcaaatgcaaggcagcacaataagttattgaaagttataacataatgctcgcgagaactatgctacatacatatcacacatttctgaatcggaacatgctgtacttctcgggttttctcacagcac

SEQ ID NO: 48520 - DNA, 3162 bp, Zea Mays
aacaactctaaaaagcctacgcccctccaaaattcggaatctgatcatgtaaaaacttttgcaaactccgcaacccgaagagctagtttccaaatcagccccaaaaagcccacgaaaaccctccagccctccgtgctgcggctccttccggtcccccaccacgcgccggacatgaaatatcccactcaaaccaacctaccgcccacagacccaaatcggcaccccggaagcctcaaatccgctctattcctctctccccctctctcccccatcgcaccagcaggcgagcgcgaggcggaggagtagagatggagtcggaccagggcaagcttttcatcggcggcatctcctgggaaacgacggaggagaagctgagcgagcacttctccgcctacggcgaggtaacgcaggccgccgtcatgcgcgacaagatcaccggccgcccccgcggcttcgggttcgtcgtcttcgcggatcccgccgccgtcgacagagcgctgcaggacccccacaccctcgacggccgcacggtcgatgtgaagcgggcactctcgcgggaggagcagcaggcctccaaggccgcgaaccctagcggtggaaggaactccggtggcggaggaggcggcggtggcggcagcgatgcaagtggtgctcggacgaagaagatctttgtgggcgggctgccctctactctgactgaggatgggttccggcagtacttcgagacctttggcatagttactgacgtagttgtcatgtatgaccagaacacacagcgcccacgtggtttcgggttcatcacctttgattcggaggacgcggttgaccgcgtgctgcagaagaccttccatgatcttggtgggaagctggttgaggtgaagcgcgcattgccccgtgaggcgaatcctggcggctctggtggtggtcgttctgggggaggtgggggttatcagagcaacaatggccataacaccagctctggtagctatgatggtagaagtgatggtggcaggtacgggcagacacaacagggtagtggtggtggtggctatcctggctacggtgcaggaggctatggtgctggggcagctggatatggatatggtgctaaccctgcagttggatatggaaattatggggctggagggtatgggggtgttcctgctgcttatggtggacattatggaaacccaggtgcagctggttctggttaccaaggtggacatccaggctcaaatagaggaccttggggcagtcaagctccatctgcatatggaactggagggtatggtggcagtgctgggtatagtgcttggaacaactcttctggtggcggcaatgctctgaatagtcaagcccctggtggacctgcaggctatggaagccagggctatgggtatggtggatatggaggggatccatcatacgctagtcacggaggatatggggcttatggagcacgtattgatagtgctggcaatcctgctactggtggatcatctggatacaatgcaggctatggaagtggtggtgccaactctggctattcaagtgcttggagtgatccttcgcaaggtggtggatttggcggttcggtcaatggaggtgctgaaggacagtcaacttatggcactggctatggcagtgtgcagcccagggttgctcagtaaagagaggcattttgagtgtgcgaaatgaaccagtgcatctgggcagtctatgtattgatttgtcattccagtctctctggttgctctcagcattttgaagattgcccatttgctgcttaaatcagtatttatccgggttggaatgcttgatcctttagcggcttactactagaacgtctagtcaataagtagctaaaatgtggagtagcagtatcttgcggaatgcttttattaatttttacatttagctttatccatctgtgtggtttgccatgagtggagtttcaggttgcttcatctctagttataagctagagtagcttgactacttatgggcaaaattatctagttgtacctctattctacagatcatatatttgtgtttgacattagtatttatgctggatcttgctctacctatattctggaatgttctctatttggtggctgtattgacatgtggtattatcaacattgatgggtttgaaacagatgcaaaccctgaaatatgcaatcatagttacttgatgctgtagctgcttctaacagtattttcaactgtagtgcaagtgtttttatgtagctggaatggtacacccttcaagtatatcaccaagctatgaattccatccatttggtcctagatttcaatattttcaaagcagcagtaagcttattagcagcaagattgtagcgccaagtttctgaggttgaatgggatggcattctttttttagatatgcccaagcaaggtctatgaaatcaggcatttgaaaaaggcattttgcacagtgatttacatgaactggcgagaagttccaatatcggggttctgacagaatgcaagataccagcttaagtgcttcattttctgaagggtcttgtgctgtgctacaagatagtggacgaagtgcaacatgttggctggatccactttggctgggtctgagggagcatgggccaagatcttgggggctcggctgtgtggtgcaacgggcagcttgcttgcatactggtgatcgtggatgcttgtgatatagcattgccccccaatgtataagtgaacttttagtgctagaggcttccttttgttggcatgatgtctatggtttataggtgcagtagttgcataacacatagtatactcagtatactttgtgtggaagctattgatgcttttctttttgtttagcatgaatgccatataattgtacattgaattgacatattaagttattgctaaaacacacttcagtgaattttataaggccctgtttggatccattgaattgaattctattctaataatttaggcacagttcaattaaactaatatagttttatgtgagatatgtttgtatactattgttggttataaggaggagatatttatgtggtatatttttattatagaggagcaagttgaagaggagtgtagaaacagtttattgatacataaatcaatttctatctctcaaccactaaatttgag

SEQ ID NO: 48521 - DNA, 2699 bp, Zea Mays
ttccaaatcagccccaaaaagcccacgaaaaccctccagccctccgtgctgcggctccttccggtcccccaccacgcgccggacatgaaatatcccactcaaaccaacctaccgcccacagacccaaatcggcaccccggaagcctcaaatccgctctattcctctctccccctctctcccccatcgcaccagcaggcgagcgcgaggcggaggagtagagatggagtcggaccagggcaagcttttcatcggcggcatctcctgggaaacgacggaggagaagctgagcgagcacttctccgcctacggcgaggtaacgcaggccgccgtcatgcgcgacaagatcaccggccgcccccgcggcttcgggttcgtcgtcttcgcggatcccgccgccgtcgacagagcgctgcaggacccccacaccctcgacggccgcacggtcgatgtgaagcgggcactctcgcgggaggagcagcaggcctccaaggccgcgaaccctagcggtggaaggaactccggtggcggaggaggcggcggtggcggcagcgatgcaagtggtgctcggacgaagaagatctttgtgggcgggctgccctctactctgactgaggatgggttccggcagtacttcgagacctttggcatagttactgacgtagttgtcatgtatgaccagaacacacagcgcccacgtggtttcgggttcatcacctttgattcggaggacgcggttgaccgcgtgctgcagaagaccttccatgatcttggtgggaagctggttgaggtgaagcgcgcattgccccgtgaggcgaatcctggcggctctggtggtggtcgttctgggggaggtgggggttatcagagcaacaatggccataacaccagctctggtagctatgatggtagaagtgatggtggcaggtacgggcagacacaacagggtagtggtggtggtggctatcctggctacggtgcaggaggctatggtgctggggcagctggatatggatatggtgctaaccctgcagttggatatggaaattatggggctggagggtatgggggtgttcctgctgcttatggtggacattatggaaacccaggtgcagctggttctggttaccaaggtggacatccaggctcaaatagaggaccttggggcagtcaagctccatctgcatatggaactggagggtatggtggcagtgctgggtatagtgcttggaacaactcttctggtggcggcaatgctctgaatagtcaagcccctggtggacctgcaggctatggaagccagggctatgggtatggtggatatggaggggatccatcatacgctagtcacggaggatatggggcttatggagcacgtattgatagtgctggcaatcctgctactggtggatcatctggatacaatgcaggctatggaagtggtggtgccaactctggctattcaagtgcttggagtgatccttcgcaaggtggtggatttggcggttcggtcaatggaggtgctgaaggacagtcaacttatggcactggctatggcagtgtgcagcccagggttgctcagtaaagagaggcattttgagtgtgcgaaatgaaccagtgcatctgggcagtctatgtattgatttgtcattccagtctctctggttgctctcagcattttgaagattgcccatttgctgcttaaatcagtatttatccgggttggaatgcttgatcctttagcggcttactactagaacgtctagtcaataagtagctaaaatgtggagtagcagtatcttgcggaatgcttttattaatttttacatttagctttatccatctgtgtggtttgccatgagtggagtttcaggttgcttcatctctagttataagctagagtagcttgactacttatgggcaaaattatctagttgtacctctattctacagatcatatatttgtgtttgacattagtatttatgctggatcttgctctacctatattctggaatgttctctatttggtggctgtattgacatgtggtattatcaacattgatgggtttgaaacagatgcaaaccctgaaatatgcaatcatagttacttgatgctgtagctgcttctaacagtattttcaactgtagtgcaagtgtttttatgtagctggaatggtacacccttcaagtatatcaccaagctatgaattccatccatttggtcctagatttcaatattttcaaagcagcagtaagcttattagcagcaagattgtagcgccaagtttctgaggttgaatgggatggcattctttttttagatatgcccaagcaaggtctatgaaatcaggcatttgaaaaaggcattttgcacagtgatttacatgaactggcgagaagttccaatatcggggttctgacagaatgcaagataccagcttaagtgcttcattttctgaagggtcttgtgctgtgctacaagatagtgggtatgtggatcaaagattctatattcacgttttgtttagcaaaatccttttgactctggtacttgtcaaagtgaaattctagacaactcttagtttgttcatttagatttactgtgtaccatatccatcggtgacaggaaaattgaccacaaacgtgtcagtttttacttttgagcaataatattgtgctagacatttatattgaccacac

SEQ ID NO: 48522 - DNA, 794 bp, Zea Mays
ccttccggtcccccaccacgcgccggacatgaaatatcccactcaaaccaacctaccgcccacagacccaaatcggcaccccggaagcctcaaatccgctctattcctctctccccctctctcccccatcgcaccagcaggcgagcgcgaggcggaggagtagagatggagtcggaccagggcaagcttttcatcggcggcatctcctgggaaacgacggaggagaagctgagcgagcacttctccgcctacggcgaggtaacgcaggccgccgtcatgcgcgacaagatcaccggccgcccccgcggcttcgggttcgtcgtcttcgcggatcccgccgccgtcgacagagcgctgcaggacccccacaccctcgacggccgcacggttgaatgggatggcattctttttttagatatgcccaagcaaggtctatgaaatcaggcatttgaaaaaggcattttgcacagtgatttacatgaactggcgagaagttccaatatcggggttctgacagaatgcaagataccagcttaagtgcttcattttctgaagggtcttgtgctgtgctacaagatagtgggtatgtggatcaaagattctatattcacgttttgtttagcaaaatccttttgactctggtacttgtcaaagtgaaattctagacaactcttagtttgttcatttagatttactgtgtaccatatccatcggtgacaggaaaattgaccacaaacgtgtcagtttttacttttgagcaataatattgtgctagacatttatattgaccacac

SEQ ID NO: 48523 - DNA, 2591 bp, Zea Mays
ccttccggtcccccaccacgcgccggacatgaaatatcccactcaaaccaacctaccgcccacagacccaaatcggcaccccggaagcctcaaatccgctctattcctctctccccctctctcccccatcgcaccagcaggcgagcgcgaggcggaggagtagagatggagtcggaccagggcaagcttttcatcggcggcatctcctgggaaacgacggaggagaagctgagcgagcacttctccgcctacggcgaggtaacgcaggccgccgtcatgcgcgacaagatcaccggccgcccccgcggcttcgggttcgtcgtcttcgcggatcccgccgccgtcgacagagcgctgcaggacccccacaccctcgacggccgcacggtcgatgtgaagcgggcactctcgcgggaggagcagcaggcctccaaggccgcgaaccctagcggtggaaggaactccggtggcggaggaggcggcggtggcggcagcgatgcaagtggtgctcggacgaagaagatctttgtgggcgggctgccctctactctgactgaggatgggttccggcagtacttcgagacctttggcatagttactgacgtagttgtcatgtatgaccagaacacacagcgcccacgtggtttcgggttcatcacctttgattcggaggacgcggttgaccgcgtgctgcagaagaccttccatgatcttggtgggaagctggttgaggtgaagcgcgcattgccccgtgaggcgaatcctggcggctctggtggtggtcgttctgggggaggtgggggttatcagagcaacaatggccataacaccagctctggtagctatgatggtagaagtgatggtggcaggtacgggcagacacaacagggtagtggtggtggtggctatcctggctacggtgcaggaggctatggtgctggggcagctggatatggatatggtgctaaccctgcagttggatatggaaattatggggctggagggtatgggggtgttcctgctgcttatggtggacattatggaaacccaggtgcagctggttctggttaccaaggtggacatccaggctcaaatagaggaccttggggcagtcaagctccatctgcatatggaactggagggtatggtggcagtgctgggtatagtgcttggaacaactcttctggtggcggcaatgctctgaatagtcaagcccctggtggacctgcaggctatggaagccagggctatgggtatggtggatatggaggggatccatcatacgctagtcacggaggatatggggcttatggagcacgtattgatagtgctggcaatcctgctactggtggatcatctggatacaatgcaggctatggaagtggtggtgccaactctggctattcaagtgcttggagtgatccttcgcaaggtggtggatttggcggttcggtcaatggaggtgctgaaggacagtcaacttatggcactggctatggcagtgtgcagcccagggttgctcagtaaagagaggcattttgagtgtgcgaaatgaaccagtgcatctgggcagtctatgtattgatttgtcattccagtctctctggttgctctcagcattttgaagattgcccatttgctgcttaaatcagtatttatccggtgcaagtgtttttatgtagctggaatggtacacccttcaagtatatcaccaagctatgaattccatccatttggtcctagatttcaatattttcaaagcagcagtaagcttattagcagcaagattgtagcgccaagtttctgaggttgaatgggatggcattctttttttagatatgcccaagcaaggtctatgaaatcaggcatttgaaaaaggcattttgcacagtgatttacatgaactggcgagaagttccaatatcggggttctgacagaatgcaagataccagcttaagtgcttcattttctgaagggtcttgtgctgtgctacaagatagtggacgaagtgcaacatgttggctggatccactttggctgggtctgagggagcatgggccaagatcttgggggctcggctgtgtggtgcaacgggcagcttgcttgcatactggtgatcgtggatgcttgtgatatagcattgccccccaatgtataagtgaacttttagtgctagaggcttccttttgttggcatgatgtctatggtttataggtgcagtagttgcataacacatagtatactcagtatactttgtgtggaagctattgatgcttttctttttgtttagcatgaatgccatataattgtacattgaattgacatattaagttattgctaaaacacacttcagtgaattttataaggccctgtttggatccattgaattgaattctattctaataatttaggcacagttcaattaaactaatatagttttatgtgagatatgtttgtatactattgttggttataaggaggagatatttatgtggtatatttttattatagaggagcaagttgaagaggagtgtagaaacagtttattgatacataaatcaatttctatctctcaaccactaaatttgag

SEQ ID NO: 48524 - DNA, 2661 bp, Zea Mays
cccacctcttcgccgacgcgaaaccctaggtcgatgtgaagcgggcactctcgcgggaggagcagcaggcctccaaggccgcgaaccctagcggtggaaggaactccggtggcggaggaggcggcggtggcggcagcgatgcaagtggtgctcggacgaagaagatctttgtgggcgggctgccctctactctgactgaggatgggttccggcagtacttcgagacctttggcatagttactgacgtagttgtcatgtatgaccagaacacacagcgcccacgtggtttcgggttcatcacctttgattcggaggacgcggttgaccgcgtgctgcagaagaccttccatgatcttggtgggaagctggttgaggtgaagcgcgcattgccccgtgaggcgaatcctggcggctctggtggtggtcgttctgggggaggtgggggttatcagagcaacaatggccataacaccagctctggtagctatgatggtagaagtgatggtggcaggtacgggcagacacaacagggtagtggtggtggtggctatcctggctacggtgcaggaggctatggtgctggggcagctggatatggatatggtgctaaccctgcagttggatatggaaattatggggctggagggtatgggggtgttcctgctgcttatggtggacattatggaaacccaggtgcagctggttctggttaccaaggtggacatccaggctcaaatagaggaccttggggcagtcaagctccatctgcatatggaactggagggtatggtggcagtgctgggtatagtgcttggaacaactcttctggtggcggcaatgctctgaatagtcaagcccctggtggacctgcaggctatggaagccagggctatgggtatggtggatatggaggggatccatcatacgctagtcacggaggatatggggcttatggagcacgtattgatagtgctggcaatcctgctactggtggatcatctggatacaatgcaggctatggaagtggtggtgccaactctggctattcaagtgcttggagtgatccttcgcaaggtggtggatttggcggttcggtcaatggaggtgctgaaggacagtcaacttatggcactggctatggcagtgtgcagcccagggttgctcagtaaagagaggcattttgagtgtgcgaaatgaaccagtgcatctgggcagtctatgtattgatttgtcattccagtctctctggttgctctcagcattttgaagattgcccatttgctgcttaaatcagtatttatccgggttggaatgcttgatcctttagcggcttactactagaacgtctagtcaataagtagctaaaatgtggagtagcagtatcttgcggaatgcttttattaatttttacatttagctttatccatctgtgtggtttgccatgagtggagtttcaggttgcttcatctctagttataagctagagtagcttgactacttatgggcaaaattatctagttgtacctctattctacagatcatatatttgtgtttgacattagtatttatgctggatcttgctctacctatattctggaatgttctctatttggtggctgtattgacatgtggtattatcaacattgatgggtttgaaacagatgcaaaccctgaaatatgcaatcatagttacttgatgctgtagctgcttctaacagtattttcaactgtagtgcaagtgtttttatgtagctggaatggtacacccttcaagtatatcaccaagctatgaattccatccatttggtcctagatttcaatattttcaaagcagcagtaagcttattagcagcaagattgtagcgccaagtttctgaggttgaatgggatggcattctttttttagatatgcccaagcaaggtctatgaaatcaggcatttgaaaaaggcattttgcacagtgatttacatgaactggcgagaagttccaatatcggggttctgacagaatgcaagataccagcttaagtgcttcattttctgaagggtcttgtgctgtgctacaagatagtggacgaagtgcaacatgttggctggatccactttggctgggtctgagggagcatgggccaagatcttgggggctcggctgtgtggtgcaacgggcagcttgcttgcatactggtgatcgtggatgcttgtgatatagcattgccccccaatgtataagtgaacttttagtgctagaggcttccttttgttggcatgatgtctatggtttataggtgcagtagttgcataacacatagtatactcagtatactttgtgtggaagctattgatgcttttctttttgtttagcatgaatgccatataattgtacattgaattgacatattaagttattgctaaaacacacttcagtgaattttataaggccctgtttggatccattgaattgaattctattctaataatttaggcacagttcaattaaactaatatagttttatgtgagatatgtttgtatactattgttggttataaggaggagatatttatgtggtatatttttattatagaggagcaagttgaagaggagtgtagaaacagtttattgatacataaatcaatttctatctctcaaccactaaatttgag

SEQ ID NO: 48525 - DNA, 2087 bp, Zea Mays
ccacctcttcgccgacgcgaaaccctaggtcgatgtgaagcgggcactctcgcgggaggagcagcaggcctccaaggccgcgaaccctagcggtggaaggaactccggtggcggaggaggcggcggtggcggcagcgatgcaagtggtgctcggacgaagaagatctttgtgggcgggctgccctctactctgactgaggatgggttccggcagtacttcgagacctttggcatagttactgacgtagttgtcatgtatgaccagaacacacagcgcccacgtggtttcgggttcatcacctttgattcggaggacgcggttgaccgcgtgctgcagaagaccttccatgatcttggtgggaagctggttgaggtgaagcgcgcattgccccgtgaggcgaatcctggcggctctggtggtggtcgttctgggggaggtgggggttatcagagcaacaatggccataacaccagctctggtagctatgatggtagaagtgatggtggcaggtacgggcagacacaacagggtagtggtggtggtggctatcctggctacggtgcaggaggctatggtgctggggcagctggatatggatatggtgctaaccctgcagttggatatggaaattatggggctggagggtatgggggtgttcctgctgcttatggtggacattatggaaacccaggtgcagctggttctggttaccaaggtggacatccaggctcaaatagaggaccttggggcagtcaagctccatctgcatatggaactggagggtatggtggcagtgctgggtatagtgcttggaacaactcttctggtggcggcaatgctctgaatagtcaagcccctggtggacctgcaggctatggaagccagggctatgggtatggtggatatggaggggatccatcatacgctagtcacggaggatatggggcttatggagcacgtattgatagtgctggcaatcctgctactggtggatcatctggatacaatgcaggctatggaagtggtggtgccaactctggctattcaagtgcttggagtgatccttcgcaaggtggtggatttggcggttcggtcaatggaggtgctgaaggacagtcaacttatggcactggctatggcagtgtgcagcccagggttgctcagtaaagagaggcattttgagtgtgcgaaatgaaccagtgcatctgggcagtctatgtattgatttgtcattccagtctctctggttgctctcagcattttgaagattgcccatttgctgcttaaatcagtatttatccgggttgaatgggatggcattctttttttagatatgcccaagcaaggtctatgaaatcaggcatttgaaaaaggcattttgcacagtgatttacatgaactggcgagaagttccaatatcggggttctgacagaatgcaagataccagcttaagtgcttcattttctgaagggtcttgtgctgtgctacaagatagtggacgaagtgcaacatgttggctggatccactttggctgggtctgagggagcatgggccaagatcttgggggctcggctgtgtggtgcaacgggcagcttgcttgcatactggtgatcgtggatgcttgtgatatagcattgccccccaatgtataagtgaacttttagtgctagaggcttccttttgttggcatgatgtctatggtttataggtgcagtagttgcataacacatagtatactcagtatactttgtgtggaagctattgatgcttttctttttgtttagcatgaatgccatataattgtacattgaattgacatattaagttattgctaaaacacacttcagtgaattttataaggccctgtttggatccattgaattgaattctattctaataatttaggcacagttcaattaaactaatatagttttatgtgagatatgtttgtatactattgttggttataaggaggagatatttatgtggtatatttttattatagaggagcaagttgaagaggagtgtagaaacagtttattgatacataaatcaatttctatctctcaaccactaaatttgag

SEQ ID NO: 48526 - DNA, 459 bp, Zea Mays
cgaagttcaaagacttctcggtgccaaatttatcgagctcatcaaactaaccaatatagtgttggtgaagaaaaaaaaatgagaaatagagaacgtacatagacttcacaagtctgaaacggagctattgtaatttcttctaagatctcatcaaccatgttgaggctaccgaggatatataggatacaattttttttcgcagatgacatcccatctgcaggacctttcgtcttggcaaaatactcgttaacagaaagtgaacctttgctagcagtagctagggtcatgcgagttttgatcacccgtccacaagattgtgaggcaaatcttgcctcaatggccgccaagacattagatacttctgaggatagtctcgtggtctatcagtttgcaaactgggagaaaactgatcctctaaaactgcatccaaataaaaaaaaaagaattacacatttacac

SEQ ID NO: 48527 - DNA, 629 bp, Zea Mays
cgcgtgtagacgccgtggagcgcgtcgcccatgcccacccctaggcacgatgacacaccgccgtcgttggatctctacgcggtagatccactctggttcccctcgtcaccgtcgccacgtctccaccacgactacgacaaggacgaccgctagggcctgccttgcctagcgggcgaggggtgcccctgtccccatccccttcctctctccaccccacctggcgtcatctcctgatcgcgagatccgctcgctcgcccacccgccccatggcacctcatggccgctcaagcgaggatccacctgtcgggcgtcttcccgacccacggcaatcgtgcatcaccatgcgccgttgaaggatccatccttcgacctacgcttatctaacgcctcgatctcctccatcccattgcctcactgccgtgacgagacaaccacatacctacaaatacgggagttgctccaacaatggggtcgagaggaggacgaggatctccagatggcgctccgcatgagcctccagggctccccacgtcgttcagccctcaccattgtgaagtgtcaggagctctccaaacagctcttctacacatgcctcgcaaggaggtcccagtggagcggctaaagccgag

SEQ ID NO: 48528 - DNA, 814 bp, Zea Mays
cgcgtgtagacgccgtggagcgcgtcgcccatgcccacccctaggcacgatgacacaccgccgtcgttggatctctacgcggtagatccactctggttcccctcgtcaccgtcgccacgtctccaccacgactacgacaaggacgaccgctagggcctgccttgcctagcgggcgaggggtgcccctgtccccatccccttcctctctccaccccacctggcgtcatctcctgatcgcgagatccgctcgctcgcccacccgccccatggcacctcatggccgctcaagcgaggatccacctgtcgggcgtcttcccgacccacggcaatcgtgcatcaccatgcgccgttgaaggatccatccttcgacctacgcttatctaacgcctcgatctcctccatcccattgcctcactgccgtgacgagacaaccacatacctacaaatacgggagttgctccaacaatggggtcgagaggaggacgaggatctccagatggcgctccgcatgagcctccagggctccccacgtcgttcagccctcaccattgtgaagtgtcaggagctctccaaacagctcttctacacatgcctcgcaaggacgaggtcctttataccatcgtccctgctagcgagacaggaggtcccagtggagcggctaaagccgagggtcgaggcacaggagagagggaactaggctctcaagtaaaagtacccgatcggactaaacccgcaagagaaggtgaagctggagaaggagcacatttccatggagtagatcaacgccaccgagctcaccaagaacgatgtcgac

SEQ ID NO: 48529 - DNA, 622 bp, Zea Mays
cgcgtgtagacgccgtggagcgcgtcgcccatgcccacccctaggcacgatgacacaccgccgtcgttggatctctacgcggtagatccactctggttcccctcgtcaccgtcgccacgtctccaccacgactacgacaaggacgaccgctagggcctgccttgcctagcgggcgaggggtgcccctgtccccatccccttcctctctccaccccacctggcgtcatctcctgatcgcgagatccgctcgctcgcccacccgccccatggcacctcatggccgctcaagcgaggatccacctgtcgggcgtcttcccgacccacggcaatcgtgcatcaccatgcgccgttgaaggatccatccttcgacctacgcttatctaacgcctcgatctcctccatcccattgcctcactgccgtgacgagacaaccacatacctacaaatacgggagttgctccaacaatggggtcgagaggaggacgaggatctccagatggcgctccgcatgagcctccagggctccccacgtcgttcagccctcaccattgtgaagtgtcaggagctctccaaacagctcttctacacatgcctcgcaagtgactttcaacaaagaagatgg

SEQ ID NO: 48530 - DNA, 2278 bp, Zea Mays
gaaataagtcccaaagaacatgtttggagcctaaaccgaaaaggaggacaaaatttctcctctcgaagaaccctagcggcaaaacctttgctccgtcccgccgtcgcctgctcccatcccgccgccggcgctgccacccgcatctgccaaggggctcgccgccggggaggctgctcgcggtgccgcgctctctcccgcgcccgaccttggccctcccctcctccatgatctgcgcgagaccatggcaagtgtcccgccaccaaggaggacctcaccatggatgatatcgtgccggtcaagaccaacacgatcgtgaagcccaggcctttgcaggctgcaagcattccaggactccttgggatttttcagaacgagtgggatgctctcatgctttctaattttgctttggagcagcagcttcacacagcaagacaagaacttagtcatgcactctaccagcatgacgctgcctgccgtgttatagccagattaaagaaggaaagagatgacgctagagcacttttggctcaagctgagagacagattcctgcgtcagttgcaggagctgctcctgcagctgttgtttccaatggaaaaagagtaattgaagatgaaattggccctgacgggaagaagatccgtcctggtatcaaccctgtcatgattgatgaacttacagagtgtaatgccatgctttcagcacagcgcaagaaaagacaggttcctccaactctggcaccgatcgatgcactcgagagatacactcagatctccagccatccccttcataagacaaacaaaccaggcattttgtccatggatattcatccttcaaaggacattgttgcaactgggggtatcgatacaaatgcagtaatctttgatcgttcatctggtcaaatcttgtgcacgcttgctggtcactcaaagaagataaccactttgaagtttattccacgggatcaactctttgtaactggatcagcagataagactgttcgcatctggcaagagaatgagaatggaaactataactgtgtccatacactgaaagatcatactgatgaggttgaagctgttacagtacatgtgactcagaagtattttgtgagtgcttccaaggataactcttggtgcttctatgatatttcaacaggatcttgcctgacacaggttggcgatgcttcaggacaagagggatatacatctgcgtctttccatccagatggtcttatccttggaacaggaactactgatgctgttgttaaaatttgggacgtgaaggctcagtcaaatgtcgcaaagtttgagggtcatgtcggaccagtcactgctatgtctttctctgaaaatggttacttcctagcgactgctgctcatgatggtgttaagctttgggatcttcgtaaattaagaaattttaggactttctctccctatgatttggacacgccaaccaatactgtggaatttgattttagtggaaactatcttgccattggtggttcagatataagggtctaccaagtagctaatgttaaggccgaatggaatcttatcaagacattacccgatttatcaggaacagggaaagtaacttccgtaaaattcggagtagacgcgaaatacatagccataggttctatggaccgcaatctacggatatttggtctccctggagatgatcaaatggaggaatcaaacacagcggccgagtgatgggaattcatggtgcctaatttgtttcttctgccatcatcctcattatactgtggtgatggatagactgattgcacatggatacatcaccgtcacaagagggaagggtcctggcggggattactggtctgagcttcggctggtgtaaaacaagctgtgatattgttgtactgtaggccttactaattcttctgatgaggatacaatttgttttgttgactacgatgctaaacagctaaagttctctgcgcagattccagtgattcaaaacgaactacttgcttcttagcttctttattacataggtcaatggaagcactataagatgtgcccatgcgagtgtgtccagcgtgatctgtgaagattggtgatttgtacaattcattttgtttctgagtttcttaggttgtgcgtgtttaggatcagttacaggttaagccgctgtctttcatttgtgtatctggccactatcgagacaagatacatggcgtgcctctagaagtcaaaagtctgaacagttactcagaatcagctggaatactatctaactatcttgtgc

SEQ ID NO: 48531 - DNA, 1964 bp, Zea Mays
gatacatggttttcatcgacttggagaaggcttatgaaaaaatcgtgaagcccaggcctttgcaggctgcaagcattccaggactccttgggatttttcagaacgagtgggatgctctcatgctttctaattttgctttggagcagcagcttcacacagcaagacaagaacttagtcatgcactctaccagcatgacgctgcctgccgtgttatagccagattaaagaaggaaagagatgacgctagagcacttttggctcaagctgagagacagattcctgcgtcagttgcaggagctgctcctgcagctgttgtttccaatggaaaaagagtaattgaagatgaaattggccctgacgggaagaagatccgtcctggtatcaaccctgtcatgattgatgaacttacagagtgtaatgccatgctttcagcacagcgcaagaaaagacaggttcctccaactctggcaccgatcgatgcactcgagagatacactcagatctccagccatccccttcataagacaaacaaaccaggcattttgtccatggatattcatccttcaaaggacattgttgcaactgggggtatcgatacaaatgcagtaatctttgatcgttcatctggtcaaatcttgtgcacgcttgctggtcactcaaagaagataaccactttgaagtttattccacgggatcaactctttgtaactggatcagcagataagactgttcgcatctggcaagagaatgagaatggaaactataactgtgtccatacactgaaagatcatactgatgaggttgaagctgttacagtacatgtgactcagaagtattttgtgagtgcttccaaggataactcttggtgcttctatgatatttcaacaggatcttgcctgacacaggttggcgatgcttcaggacaagagggatatacatctgcgtctttccatccagatggtcttatccttggaacaggaactactgatgctgttgttaaaatttgggacgtgaaggctcagtcaaatgtcgcaaagtttgagggtcatgtcggaccagtcactgctatgtctttctctgaaaatggttacttcctagcgactgctgctcatgatggtgttaagctttgggatcttcgtaaattaagaaattttaggactttctctccctatgatttggacacgccaaccaatactgtggaatttgattttagtggaaactatcttgccattggtggttcagatataagggtctaccaagtagctaatgttaaggccgaatggaatcttatcaagacggagtagacgcgaaatacatagccataggttctatggaccgcaatctacggatatttggtctccctggagatgatcaaatggaggaatcaaacacagcggccgagtgatgggaattcatggtgcctaatttgtttcttctgccatcatcctcattatactgtggtgatggatagactgattgcacatggatacatcaccgtcacaagagggaagggtcctggcggggattactggtctgagcttcggctggtgtaaaacaagctgtgatattgttgtactgtaggccttactaattcttctgatgaggatacaatttgttttgttgactacgatgctaaacagctaaagttctctgcgcagattccagtgattcaaaacgaactacttgcttcttagcttctttattacataggtcaatggaagcactataagatgtgcccatgcgagtgtgtccagcgtgatctgtgaagattggtgatttgtacaattcattttgtttctgagtttcttaggttgtgcgtgtttaggatcagttacaggttaagccgctgtctttcatttgtgtatctggccactatcgagacaagatacatggcgtgcctctagaagtcaaaagtctgaacagttactcagaatcagctggaatactatctaactatcttgtgc

SEQ ID NO: 48532 - DNA, 950 bp, Zea Mays
gtgatttgtcaaatgtcgcaaagtttgagggtcatgtcggaccagtcactgctatgtctttctctgaaaatggttacttcctagcgactgctgctcatgatggtgttaagctttgggatcttcgtaaattaagaaattttaggactttctctccctatgatttggacacgccaaccaatactgtggaatttgattttagtggaaactatcttgccattggtggttcagatataagggtctaccaagtagctaatgttaaggccgaatggaatcttatcaagacggagtagacgcgaaatacatagccataggttctatggaccgcaatctacggatatttggtctccctggagatgatcaaatggaggaatcaaacacagcggccgagtgatgggaattcatggtgcctaatttgtttcttctgccatcatcctcattatactgtggtgatggatagactgattgcacatggatacatcaccgtcacaagagggaagggtcctggcggggattactggtctgagcttcggctggtgtaaaacaagctgtgatattgttgtactgtaggccttactaattcttctgatgaggatacaatttgttttgttgactacgatgctaaacagctaaagttctctgcgcagattccagtgattcaaaacgaactacttgcttcttagcttctttattacataggtcaatggaagcactataagatgtgcccatgcgagtgtgtccagcgtgatctgtgaagattggtgatttgtacaattcattttgtttctgagtttcttaggttgtgcgtgtttaggatcagttacaggttaagccgctgtctttcatttgtgtatctggccactatcgagacaagatacatggcgtgcctctagaagtcaaaagtctgaacagttactcagaatcagctggaatactatctaactatcttgtgc

SEQ ID NO: 48533 - DNA, 2937 bp, Zea Mays
cagattcctcgtccccctcgttgcgtttccctcctcccttatatctctcccctgctttcgctctcctcacaccacaccagttcgtcgcaaaacccaaacccgttccaaccgcaaggagactccgctctgcgaagaacgggacggatctagctcgaccctctagaccggcagacaaaggagacgccttcgtgcggcacgctcttgggggtaatggcgccggcgtgggagcgcgccaggcgcgcgctcgccaccaggttctgcatgcgctttgcggcgaggcgcgtggtcgtcgaggatgcgccacgtgggatggacgacatagaggcagaggaggaggaggagcaggagcagcagcagcaccaagaggagccggccgaggatgagagggagatgtcgctggccgcggagtccgaggacctggcgtcgtcgtggtctgggagccggagttcagagacatgtgcaatttgcctcagcggcatgaggtccggccgcggccaagcgctattcactgctgaatgctcccacaagttccatttcaactgcatctcctcaaacgtgcagcacggcaacaagatctgcccaatctgccgtgctgtgtggaaggagctgcctttccaggggcatgtggctacatctgctgctgctcatgtggtttggccccagatgagcatgcagtcagtgagtccgctggatgagctcccggtctttggctatcaggatacagcagttatgaacgacgatgagcagatacagcctactgaaacagcagttggtgatgaggctcctcctcctcctcctcctctgcttgagatcacgacgtacactgaattcccagccgtccaggagtccgtggcacacgaggaattcgccatcgtcatccatctcaaggctccgtcgtgggtgagcacccgagcgccactggatctggtgactgtgctcgacgtgagcgggagcatgtcgggccccaagcttgcactcgtcaagcgcgccatgaggttcgtgatcgagaaccttgaccccagcgaccggctctccgtcgtcgccttctcctcggcggcttggaggctgttcccgctccggaggatgaccgcctccggacagcagcagtcgctgcaggctgtcaactgcctcgtcgccgacggcggcaccaacatcgccgacgggctgcggaaggctaccagggtggtgcaggacaggcatgccaggaacccggtctgtagcatcatgctcctctctgacggcgtcgactcccacgtcctcccgccgcggcgcggctcggcgccggactacggccggctcgtcccgcgctccgccctccttcccgggagcgagcaccacgtgccgatccatgcctttggcttcggcatcgaccacgactccagggcgttgcacgccgtggcccagatgtccggcggcaccttctccttcatcgacgtggtggggtcgatccaggacgccttcgcgcagtgcatcggcgggctcctcagcgtcgtggcgcaggagacgacgctcagcgtcgagtgcgccgaccagggcgtgctcctcacgtccatcaagtctggcagctacgccagcggagcggacggtgacggccgcggcgggttcgtcgacgtcggccgcctctacgccgacgaggagagggacttcctcgtcaccgtgcgcgtcccgccgtcacgcgggaccatcgcgctcgtccggccgagctgcacctaccgcgacgcggtcaccacggagatggtgcgggtggggggcgacccggtgacgctgctccgcgcggcgagcccggtgagcgcggcgatgtccctgcaggtggagcgcgagtggcaccgcgtccacgccaccgaggacatggccgcggcgcaggccgccgcagaggagcacgactacgcccgcgcggcttcgatcctcgaggcccgccgccggctgctggagtcgtgcgcgtcgctgtcctcggaccagcagacgcaggcgctggtggccgagctgcgggagatgcaggagcgcgtgctgaacccgcggctgtaccaggggtttggccgcgcctacatcctgtccgggctcagctcccactcgtggcagcgtgccacggcgcgcggtgactccacggagctcacgggcctcgtccacacctaccagacgccgtccatggtcaacatgctcaaccggtcgcaggcgctccagccagaggtagcggaggcgctgacccggtccccgacgatcgcgccgttgcgcagcccagcccccgcctccggctcgcgggggacgcgacgcgggccccggtcgttcaggccggcaaagtccttcactgggcggtcatcgtgagcggaggttcgctgacaatgcatgcgaaccggcagtatctaggaggaagaagaaaaaccattaccatttgattcgtttcttcgatactcttttgtcgtagagtcttttgctttttatactgttatttggtcgtgggctaatcgtgagatatgtatgttttggttcatctactaaactagtgggaactaatcatcgatttggtgtttttgttctaagtgttgtcttgtttttttttcctggacgggatacgggagctagctgttttgcgtctgctagctggttggagcgcacaccgttgcacatcaaggcgattgctattagcacaacaggaacatataaacgtccgacggctattttgtttttgatgaaggtctatatgtaattataacgtatgacgacttcctcgagccgtcggatccaggcttatatccaacggctatgagacagaccgtcagattttaagggccattgtttcacttctccaactctctttctcgctcgtactctttctctctcttgtcgcgcgctgtcgcctcgcgcgctataggcagtgcagagccaaccaattaacatagaggcaaaatatgctagcgtagcaggacaagtccatggatg

SEQ ID NO: 48534 - DNA, 393 bp, Zea Mays
gcaaaacccaaacccgttccaaccgcaaggagactccgctctgcgaagaacgggacggatctagctcgaccctctagaccggcagacaaaggagacgccttcgtgcggcacgctcttgggggtaatggcgccggcgtgggagcgcgccaggcgcgcgctcgccaccaggttctgcatgcgctttgcggcgaggcgcgtggtcgtcgaggatgcgccacgtgggatggacgacatagaggcagaggaggaggaggagcaggagcagcagcagcaccaagaggagccggccgaggatgagagggagatgtcgctggccgcggagtccgaggacctggcgtcgtcgtggtctgggagccggagttcagagaacctactgggccatctccaggcccc

SEQ ID NO: 48535 - DNA, 2649 bp, Zea Mays
gtttcggaaggcacaaacccgcatctctcctgatttggcataacctcgcgcaactatcacagcacaggcaaccctgaggcccagacctgatctcgccggcggcgagcttgtgtccatggctgacggggccgagatggacgaagaggctatgcgggccttcttcccgctctccttcggaaaggcggctccgcggcccagctctgctacctcctccgcccactccaacacccttcgcaagcctcaaaaccctagtaaccccaagccttccgcctctaccgccgcggacgacgatggggccgctatgattggtcctcctcgcccgccgccggcgcccgcgggggaggaagacgatgaggacggcggcggtatcatgatcgggccgcctcggccaccgccgccctccgctcgcggcgagggggacgacggcgacggcatgattgggccgcctaggccgccgccagcggatgatgaagacgtcgatgatgatgaggacgacgacgaggaggagatggaggatgatggggagggtggattcaatcggatccctcttagcaacgaaattgttctgcgggggcacaataaggttgtctctgcccttgctgttgaccatacaggatccagagtgctctctggtagctatgattatacagtgcgtatgtacgacttccagggtatgaattcaaagcttcagtcattcagacaattggaaccatttgagggccatcaagttcgtagcctaagttggagtccaacgtctgatcgattcttatgtgttactggttcagctcaggccaagggatggacttacactaggcgagtttgttaagggtgatatgtatattcgtgatctgaagaatacaaaaggtcacatctctgggcttacaggtggtgagtggaatccaaagtcaaaagaaaccattttgacatcatctgaagatggctccatgcgtctctgggatgtgtctgattttacaagtcagaagcaggtcatcaaacctaagctggtacgaccaatgcggattcctgttacatcatgtgcatgggaccatgaagggaaacgaattgtgggtggcataggggatggttctatacaggtctggaccataaaagctggatggggtagcagaccagatatccacgttgagaaaacacacacagaggatattactggggttaagttctcaacagatggacagagccttctgtcaagaagtatggatagtactcttaagatatgggatttgagaagaatgaaaactcctttgaaagtatttgaagatctgccaaatcactacgctgagacaaatgcagcatttagctcagatgagcagcttatttttacaggaacatctattgaaaaagatggtgacaatgggggattactttgtttctttgatagaaagaaacttgagcttgtatcaagggtgggaatttcagcacattacagtgtgataaggtgcctctggcatccaagaatcaaccaggtgtttgcaacagttggagacaagaaagaaggtgggactcatatcctgtacgatccttctattagtcaaaggggagctcttgtatgtgttggacgagcaccaaggaaaaagtctgttgatgattttgaggtgcaacctgtcatacacaatccacatgcattgccacttttcagagatcaaccaagtcgtaagcgtcaaagagagaagatactgaaagacccactcaaatcccacaaaccagaagcacctgttaatggtccaggttttggtggaagagttggtactacaaaaggcagtttgctgacacagtatctcttgaaggaaggtggtttaattaaggagacctggatggatgaagatccaagagaagccattttgaagtatgctgatgctgcggagaaagacccaaagtttattgcgccagcttattcccaaacccagccgaaacctgtttttgcggagtctgattcagacaatgaagagaaataaccatgcgcctggttacctaagctagcatgcacctgcattctgttttctgacagatgtctcttgatgagcttgttgcacatgccctgtaacctgcttttcaacagtggagaaacaaaagagcatcttcaagggtcttgatgataggagctctgccccttcattacagatggatatgattagtatctacgacacttcagcactagagctctatgatttgttggatgttgtacccactgtatgtacttagtcctgaaacagtggccaatctatattatactctgttctttcttttttatttgtcgcggtctagtttaaaaatgaactagcgggcgacaaatattcaagaacggaggtagtatatgaggtagtatatgacttagacgtaactttagtgcaccgaatgtagtcaacctttgtttgctttggagaatgaggatttgttgttctagtatcagtctctttgatgttcctaatgggctagttggaagatattttgaggattttgaaaggcaaatgctgtttttgtgtggtttgggctgtacggtccaaacaagttgtgaaacagtggcgtatcagccttgttattactatgatccaacaagccaatggtcctggatatagcaagatttggataacacaatcctgaaatatcattgctatctattttctttaataa

SEQ ID NO: 48536 - DNA, 1472 bp, Zea Mays
ttcacactggatctaggaaataacattggctgtgctagtccctgtattgtcagtgtcagatatgggatttgagaagaatgaaaactcctttgaaagtatttgaagatctgccaaatcactacgctgagacaaatgcagcatttagctcagatgagcagcttatttttacaggaacatctattgaaaaagatggtgacaatgggggattactttgtttctttgatagaaagaaacttgagcttgtatcaagggtgggaatttcagcacattacagtgtgataaggtgcctctggcatccaagaatcaaccaggtgtttgcaacagttggagacaagaaagaaggtgggactcatatcctgtacgatccttctattagtcaaaggggagctcttgtatgtgttggacgagcaccaaggaaaaagtctgttgatgattttgaggtgcaacctgtcatacacaatccacatgcattgccacttttcagagatcaaccaagtcgtaagcgtcaaagagagaagatactgaaagacccactcaaatcccacaaaccagaagcacctgttaatggtccaggttttggtggaagagttggtactacaaaaggcagtttgctgacacagtatctcttgaaggtggtttaattaaggagacctggatggatgaagatccaagagaagccattttgaagtatgctgatgctgcggagaaagacccaaagtttattgcgccagcttattcccaaacccagccgaaacctgtttttgcggagtctgattcagacaatgaagagaaataaccatgcgcctggttacctaagctagcatgcacctgcattctgttttctgacagatgtctcttgatgagcttgttgcacatgccctgtaacctgcttttcaacagtggagaaacaaaagagcatcttcaagggtcttgatgataggagctctgccccttcattacagatggatatgattagtatctacgacacttcagcactagagctctatgatttgttggatgttgtacccactgtatgtacttagtcctgaaacagtggccaatctatattatactctgttctttcttttttatttgtcgcggtctagtttaaaaatgaactagcgggcgacaaatattcaagaacggaggtagtatatgaggtagtatatgacttagacgtaactttagtgcaccgaatgtagtcaacctttgtttgctttggagaatgaggatttgttgttctagtatcagtctctttgatgttcctaatgggctagttggaagatattttgaggattttgaaaggcaaatgctgtttttgtgtggtttgggctgtacggtccaaacaagttgtgaaacagtggcgtatcagccttgttattactatgatccaacaagccaatggtcctggatatagcaagatttggataacacaatcctgaaatatcattgctatctattttctttaataa

SEQ ID NO: 48537 - DNA, 3685 bp, Zea Mays
cgactgtcctctctcaattcacgaggaaaaaaaagaataatctctccactttccttcaggatccagcccgcaccaccgcacgtctcctcctctctcaacaccggccaccgtaacaggaataatccagctcgtgattgaagaatccgatgacgacgccatgcctgggcgccgcggccttaagcgccagctggacggcgccctccctgacgggggcgtttctcgatctgacgctcgcctgggcctgcctctgcctcgccgcgctcgccgccgtcgccgcgcgcctcctcgcgctcctcggcctcccgctcccctgcacctgcgcgcgcccgcacctgccctgcctcctcgccttcctggcgcgctaccctccccgcgccgtcggatcccttcacgccgccctccgcgcccgcttccccttcgccggccccaccgacgacgaggcacgccttcagaaaggggtggaggaagagggggaggaggaggccatcgacgcgccgaaggaggaaggggattttcgtcgccgcgtggaggcgcgcgccgagctgcagatggagctcgagaaagagcgcagcgccgcagcgtcggcggccgaggaggccatgtccatgatcctgcgcctgcagaaggagaagtcggcgcttgagattgaggcgcgacagcagcgccgaaccgctgacgagcgctgcgccttctacgaggacgaggtcgaggagctccgggacatcgtgctcgtgcgggagcgtgaggtgcgcgcgctgcgcaaggaggttgacgcctaccgacgcctgctcggttttagcgctaccgaggaggacgaggaggaggatgacgagcaggagatggtcacgccgcatagtttccccatgtacgaaggagagcccagctcgtccaaatcggtcgatgcgaatcggatgcaacattttgggaatgattctgggttcagcttcaagacgccatcaccgcgtgaacaaccaacggtgccgcctcttactgcagggcaaatcaatgtgggaagcgatgattgtgttgctgttcagacgccggccaaagttcccgtggttcaatcaagactggagctagatagctctgaggatgaggacgaggatgaggatgatggagcagagacggtggaaatcctccccctatccgcccggagccaagatttggatcaaggtagccatttccatgctgatactgcacaaggtatggaatcgacttgtaccaaggaacagacagctcatgcatttcaggaaatcgagtgtccaggtatagacaagattgttaatgaccagataggaagcaagaatgatgccaatgtgtatgatgtgcatgtggtcgatgacatacgcttctcaacagaagtcaagggcctgattggccgaagcttctcagaggcaacaatgcaagcagagagattacagtctcgagctgttgcagatgatctccttgagaaaagcctgaatgccatcaaaggtgcacaggacaagataagaaatgcagctaatgaaaggaggcagtcattacagttgcaactcttagaggacatagctgatcaacttcaaggaatcaaggatgctgcagaagcagggaggcaagtgttctgtgctgctcctaaaagctccaagaggagctagggacttgtgttacgccactaatgcatggttggcgtcgtacataagttgtttcgggtttgtagaccaggtctgttgatttgttgattcaacaagtttgcttcttcttctttaaataagtagtggctattgctttgtacatgtatatatataaacaacatgggattcatcccagtctttataaaacgaatatatgtgtaaagaaaaacgaaatggatatttgatcaggaaggcaggaagctgactgtactgccgttgtatcggacgacagtttgttggacatgtccaaccataatcaaacgggtcaaacctgagaatgacagcaaatgcagaagttggcctgaatataacatttcttgatttgcaatgcagagaagtcaagtataaatttcaatcactccatatctttgtcaaacattcaaaccatcttcacaagttgactcattcagcagcctggtgctcaaagaccaaatgagagggtaatgtaaatcaatcaggtattttcattcccgtcaactactctgatttcaacatttcagaaaaaaaatgtgttgctaaactccttggccctaggtttaactcttgtacaaagctgaaaagtacacacaatttggttgataactgaaaaatcgtgattggcggtattagtaagttctataataaagctgttgatgagattgattcatatcctcactgcttcaaggcagatattggaatggggaaaccacttgcagcaatcggcaagttctaatgctttgtacaggtggaccagtcaacggtggacatcaaagagagatttgggaagtttaaggatgtacttgatcctggatgccgttttgtgccgtggatcattggaaaccgcgtcgaaggtcagctcacgcattggaaaccgttgtgagacgaagacaaaggataatgttttcgttacggttgttgcatccattcaataccgggcgatggaagacaaagcatgcaatgcatattataagctgagcaacccaaaagctcaaattcaatcatacgtccttgatgggagcaggggagtagtagtcatttctgaaggttctatgagtccagataataattagttttgacagctaaagaaaaggtttttgataagtacatatacaaaatatgtacttaaatatccacagacctttcataatataatatcgtggcatatcctattgaatcttacatgttctttttcttcacagcaactgttcctgaactagaactggatgatacttttgagcaaaagaaatgaaatagttcggaggatgaccttgaaaaggcaatatttacttatggttatgagattgtgcaaacactcattgttgataccaaaccagatgaaaaggattaaaagagctatgaatgaaatcaatgctggtaaatgtccgtctacattggtgaatcttgcttctgtgatgtatgaactcatgcaatttgcatatagctcaagaaaatttccattcacacgttgtattctctcagtttctttttataaggctgcgcgttgcggcaaataagaaggcagatgcaacgaaaatcattcagatcaaaatggctgagggcgagatatagcaggggagacccagacccccactataaggattttattaaaaacaaaaggaacttcaccaatacaaagagggagggggggacaagaggagtcagggagctatgactaggagaactgcacaggctacggagaaacaacaccaacaaagttaagctagtccaataagaaggaagagtaaactaggtactccttccgttcttttctatttgtcttgttttagttcaaaaatgaactaacaggtaacaaatattcgagaacgaaggtagtattttagagtggcagaagcaagaccaacaaagttaagctagtccagtataataagaaggaagaggaaactaggtatttgagactggcagaagcgaaagactgcaactgagcttgctataggaaacattgcttctaatttgttgaaggaaggacgaccacgattaaaaatgaagttattcctttgcttctaaatctgtcaagg

SEQ ID NO: 48538 - DNA, 2821 bp, Zea Mays
cgactgtcctctctcaattcacgaggaaaaaaaagaataatctctccactttccttcaggatccagcccgcaccaccgcacgtctcctcctctctcaacaccggccaccgtaacaggaataatccagctcgtgattgaagaatccgatgacgacgccatgcctgggcgccgcggccttaagcgccagctggacggcgccctccctgacgggggcgtttctcgatctgacgctcgcctgggcctgcctctgcctcgccgcgctcgccgccgtcgccgcgcgcctcctcgcgctcctcggcctcccgctcccctgcacctgcgcgcgcccgcacctgccctgcctcctcgccttcctggcgcgctaccctccccgcgccgtcggatcccttcacgccgccctccgcgcccgcttccccttcgccggccccaccgacgacgaggcacgccttcagaaaggggtggaggaagagggggaggaggaggccatcgacgcgccgaaggaggaaggggattttcgtcgccgcgtggaggcgcgcgccgagctgcagatggagctcgagaaagagcgcagcgccgcagcgtcggcggccgaggaggccatgtccatgatcctgcgcctgcagaaggagaagtcggcgcttgagattgaggcgcgacagcagcgccgaaccgctgacgagcgctgcgccttctacgaggacgaggtcgaggagctccgggacatcgtgctcgtgcgggagcgtgaggtgcgcgcgctgcgcaaggaggttgacgcctaccgacgcctgctcggttttagcgctaccgaggaggacgaggaggaggatgacgagcaggagatggtcacgccgcatagtttccccatgtacgaaggagagcccagctcgtccaaatcggtcgatgcgaatcggatgcaacattttgggaatgattctgggttcagcttcaagacgccatcaccgcgtgaacaaccaacggtgccgcctcttactgcagggcaaatcaatgtgggaagcgatgattgtgttgctgttcagacgccggccaaagttcccgtggttcaatcaagactggagctagatagctctgaggatgaggacgaggatgaggatgatggagcagagacggtggaaatcctccccctatccgcccggagccaagatttggatcaaggtagccatttccatgctgatactgcacaaggtatggaatcgacttgtaccaaggaacagacagctcatgcatttcaggaaatcgagtgtccaggtatagacaagattgttaatgaccagataggaagcaagaatgatgccaatgtgtatgatgtgcatgtggtcgatgacatacgcttctcaacagaagtcaagggcctgattggccgaagcttctcagaggcaacaatgcaagcagagagattacagtctcgagctgttgcagatgatctccttgagaaaagcctgaatgccatcaaaggtgcacaggacaagataagaaatgcagctaatgaaaggaggcagtcattacagttgcaactcttagaggacatagctgatcaacttcaaggaatcaaggatgctgcagaagcagggaggcaagtgttctgtgctgctcctaaaagctccaagaggagctagggacttgtgttacgccactaatgcatggttggcgtcgtacataagttgtttcgggtttgtagaccagagaagtcaagtataaatttcaatcactccatatctttgtcaaacattcaaaccatcttcacaagttgactcattcagcagcctggtgctcaaagaccaaatgagagggtaatgtaaatcaatcaggtggaccagtcaacggtggacatcaaagagagatttgggaagtttaaggatgtacttgatcctggatgccgttttgtgccgtggatcattggaaaccgcgtcgaaggtcagctcacgcattggaaaccgttgtgagacgaagacaaaggataatgttttcgttacggttgttgcatccattcaataccgggcgatggaagacaaagcatgcaatgcatattataagctgagcaacccaaaagctcaaattcaatcatacgtccttgatggtatcacagcaactgttcctgaactagaactggatgatacttttgagcaaaagaaatgaaatagttcggaggatgaccttgaaaaggcaatatttacttatggttatgagattgtgcaaacactcattgttgataccaaaccagatgaaaaggattaaaagagctatgaatgaaatcaatgctgctgcgcgttgcggcaaataagaaggcagatgcaacgaaaatcattcagatcaaaatggctgagggcgagatatagcaggggagacccagacccccactataaggattttattaaaaacaaaaggaacttcaccaatacaaagagggagggggggacaagaggagtcagggagctatgactaggagaactgcacaggctacggagaaacaacaccaacaaagttaagctagtccaataagaaggaagagtaaactaggtactccttccgttcttttctatttgtcttgttttagttcaaaaatgaactaacaggtaacaaatattcgagaacgaaggtagtattttagagtggcagaagcaagaccaacaaagttaagctagtccagtataataagaaggaagaggaaactaggtatttgagactggcagaagcgaaagactgcaactgagcttgctataggaaacattgcttctaatttgttgaaggaaggacgaccacgattaaaaatgaagttattcctttgcttctaaatctgtcaagg

SEQ ID NO: 48539 - DNA, 3890 bp, Zea Mays
cgactgtcctctctcaattcacgaggaaaaaaaagaataatctctccactttccttcaggatccagcccgcaccaccgcacgtctcctcctctctcaacaccggccaccgtaacaggaataatccagctcgtgattgaagaatccgatgacgacgccatgcctgggcgccgcggccttaagcgccagctggacggcgccctccctgacgggggcgtttctcgatctgacgctcgcctgggcctgcctctgcctcgccgcgctcgccgccgtcgccgcgcgcctcctcgcgctcctcggcctcccgctcccctgcacctgcgcgcgcccgcacctgccctgcctcctcgccttcctggcgcgctaccctccccgcgccgtcggatcccttcacgccgccctccgcgcccgcttccccttcgccggccccaccgacgacgaggcacgccttcagaaaggggtggaggaagagggggaggaggaggccatcgacgcgccgaaggaggaaggggattttcgtcgccgcgtggaggcgcgcgccgagctgcagatggagctcgagaaagagcgcagcgccgcagcgtcggcggccgaggaggccatgtccatgatcctgcgcctgcagaaggagaagtcggcgcttgagattgaggcgcgacagcagcgccgaaccgctgacgagcgctgcgccttctacgaggacgaggtcgaggagctccgggacatcgtgctcgtgcgggagcgtgaggtgcgcgcgctgcgcaaggaggttgacgcctaccgacgcctgctcggttttagcgctaccgaggaggacgaggaggaggatgacgagcaggagatggtcacgccgcatagtttccccatgtacgaaggagagcccagctcgtccaaatcggtcgatgcgaatcggatgcaacattttgggaatgattctgggttcagcttcaagacgccatcaccgcgtgaacaaccaacggtgccgcctcttactgcagggcaaatcaatgtgggaagcgatgattgtgttgctgttcagacgccggccaaagttcccgtggttcaatcaagactggagctagatagctctgaggatgaggacgaggatgaggatgatggagcagagacggtggaaatcctccccctatccgcccggagccaagatttggatcaaggtagccatttccatgctgatactgcacaaggtatggaatcgacttgtaccaaggaacagacagctcatgcatttcaggaaatcgagtgtccaggtatagacaagattgttaatgaccagataggaagcaagaatgatgccaatgtgtatgatgtgcatgtggtcgatgacatacgcttctcaacagaagtcaagggcctgattggccgaagcttctcagaggcaacaatgcaagcagagagattacagtctcgagctgttgcagatgatctccttgagaaaagcctgaatgccatcaaaggtgcacaggacaagataagaaatgcagctaatgaaaggaggcagtcattacagttgcaactcttagaggacatagctgatcaacttcaaggaatcaaggatgctgcagaagcagggaggcaagtgttctgtgctgctcctaaaagctccaagaggagctagggacttgtgttacgccactaatgcatggttggcgtcgtacataagttgtttcgggtttgtagaccaggtctgttgatttgttgattcaacaagtttgcttcttcttctttaaataagtagtggctattgctttgtacatgtatatatataaacaacatgggattcatcccagtctttataaaacgaatatatgtgtaaagaaaaacgaaatggatatttgatcaggaaggcaggaagctgactgtactgccgttgtatcggacgacagtttgttggacatgtccaaccataatcaaacgggtcaaacctgagaatgacagcaaatgcagaagttggcctgaatataacatttcttgatttgcaatgcagagaagtcaagtataaatttcaatcactccatatctttgtcaaacattcaaaccatcttcacaagttgactcattcagcagcctggtgctcaaagaccaaatgagagggtaatgtaaatcaatcaggtattttcattcccgtcaactactctgatttcaacatttcagaaaaaaaatgtgttgctaaactccttggccctaggtttaactcttgtacaaagctgaaaagtacacacaatttggttgataactgaaaaatcgtgattggcggtattagtaagttctataataaagctgttgatgagattgattcatatcctcactgcttcaaggcagatattggaatggggaaaccacttgcagcaatcggcaagttctaatgctttgtacaggtggaccagtcaacggtggacatcaaagagagatttgggaagtttaaggatgtacttgatcctggatgccgttttgtgccgtggatcattggaaaccgcgtcgaaggtcagctcacgcattggaaaccgttgtgagacgaagacaaaggataatgttttcgttacggttgttgcatccattcaataccgggcgatggaagacaaagcatgcaatgcatattataagctgagcaacccaaaagctcaaattcaatcatacgtccttgatgcaactgttcctgaactagaactggatgatacttttgagcaaaagaaatgaaatagttcggaggatgaccttgaaaaggcaatatttacttatggttatgagattgtgcaaacactcattgttgataccaaaccagatgaaaaggattaaaagagctatgaatgaaatcaatgctggtaaatgtccgtctacattggtgaatcttgcttctgtgatgtatgaactcatgcaatttgcatatagctcaagaaaatttccattcacacgttgtattctctcagtttctttttataaggtatgatatcccttccaatattcgaaccttgtcatatttgaccaactattcctctaatggtatttaaacactatgataaacaatggcatcactggattggtatttgaatgtacatccaaatgatcataattttgttgcaatagacattattctcaacgaatcagtggtcaatgtgaaaatttggagactgtgcctagtcaaaccacactttattttgaaactaagtataattcaacatgaagaggtgctagaacttgaggaattatagtaattggtcatccataaaaatattcatactggtttgtaacgagcgagaaattaatcacattgatatcacaataatatactgcagtttgatgcttactactaaccaatttttccttttgttcagctgcgcgttgcggcaaataagaaggcagatgcaacgaaaatcattcagatcaaaatggctgagggcgagatatagcaggggagacccagacccccactataaggattttattaaaaacaaaaggaacttcaccaatacaaagagggagggggggacaagaggagtcagggagctatgactaggagaactgcacaggctacggagaaacaacaccaacaaagttaagctagtccaataagaaggaagagtaaactaggtactccttccgttcttttctatttgtcttgttttagttcaaaaatgaactaacaggtaacaaatattcgagaacgaaggtagtattttagagtggcagaagcaagaccaacaaagttaagctagtccagtataataagaaggaagaggaaactaggtatttgagactggcagaagcgaaagactgcaactgagcttgctataggaaacattgcttctaatttgttgaaggaaggacgaccacgattaaaaatgaagttattcctttgcttctaaatctgtcaagg

SEQ ID NO: 48540 - DNA, 4379 bp, Zea Mays
cgactgtcctctctcaattcacgaggaaaaaaaagaataatctctccactttccttcaggatccagcccgcaccaccgcacgtctcctcctctctcaacaccggccaccgtaacaggaataatccagctcgtgattgaagaatccgatgacgacgccatgcctgggcgccgcggccttaagcgccagctggacggcgccctccctgacgggggcgtttctcgatctgacgctcgcctgggcctgcctctgcctcgccgcgctcgccgccgtcgccgcgcgcctcctcgcgctcctcggcctcccgctcccctgcacctgcgcgcgcccgcacctgccctgcctcctcgccttcctggcgcgctaccctccccgcgccgtcggatcccttcacgccgccctccgcgcccgcttccccttcgccggccccaccgacgacgaggcacgccttcagaaaggggtggaggaagagggggaggaggaggccatcgacgcgccgaaggaggaaggggattttcgtcgccgcgtggaggcgcgcgccgagctgcagatggagctcgagaaagagcgcagcgccgcagcgtcggcggccgaggaggccatgtccatgatcctgcgcctgcagaaggagaagtcggcgcttgagattgaggcgcgacagcagcgccgaaccgctgacgagcgctgcgccttctacgaggacgaggtcgaggagctccgggacatcgtgctcgtgcgggagcgtgaggtgcgcgcgctgcgcaaggaggttgacgcctaccgacgcctgctcggttttagcgctaccgaggaggacgaggaggaggatgacgagcaggagatggtcacgccgcatagtttccccatgtacgaaggagagcccagctcgtccaaatcggtcgatgcgaatcggatgcaacattttgggaatgattctgggttcagcttcaagacgccatcaccgcgtgaacaaccaacggtgccgcctcttactgcagggcaaatcaatgtgggaagcgatgattgtgttgctgttcagacgccggccaaagttcccgtggttcaatcaagactggagctagatagctctgaggatgaggacgaggatgaggatgatggagcagagacggtggaaatcctccccctatccgcccggagccaagatttggatcaaggtagccatttccatgctgatactgcacaaggtatggaatcgacttgtaccaaggaacagacagctcatgcatttcaggaaatcgagtgtccaggtatagacaagattgttaatgaccagataggaagcaagaatgatgccaatgtgtatgatgtgcatgtggtcgatgacatacgcttctcaacagaagtcaagggcctgattggccgaagcttctcagaggcaacaatgcaagcagagagattacagtctcgagctgttgcagatgatctccttgagaaaagcctgaatgccatcaaaggtgcacaggacaagataagaaatgcagctaatgaaaggaggcagtcattacagttgcaactcttagaggacatagctgatcaacttcaaggaatcaaggatgctgcagaagcagggaggcaagtgttctgtgctgctcctaaaagctccaagaggagctagggacttgtgttacgccactaatgcatggttggcgtcgtacataagttgtttcgggtttgtagaccaggtctgttgatttgttgattcaacaagtttgcttcttcttctttaaataagtagtggctattgctttgtacatgtatatatataaacaacatgggattcatcccagtctttataaaacgaatatatgtgtaaagaaaaacgaaatggatatttgatcaggaaggcaggaagctgactgtactgccgttgtatcggacgacagtttgttggacatgtccaaccataatcaaacgggtcaaacctgagaatgacagcaaatgcagaagttggcctgaatataacatttcttgatttgcaatgcagagaagtcaagtataaatttcaatcactccatatctttgtcaaacattcaaaccatcttcacaagttgactcattcagcagcctggtgctcaaagaccaaatgagagggtaatgtaaatcaatcagatattggaatggggaaaccacttgcagcaatcggcaagttctaatgctttgtacaggtggaccagtcaacggtggacatcaaagagagatttgggaagtttaaggatgtacttgatcctggatgccgttttgtgccgtggatcattggaaaccgcgtcgaaggtcagctcacgcattggaaaccgttgtgagacgaagacaaaggataatgttttcgttacggttgttgcatccattcaataccgggcgatggaagacaaagcatgcaatgcatattataagctgagcaacccaaaagctcaaattcaatcatacgtccttgatggtaaaatcgatttatactaaattcttaccgtttagaatggttgtccaaactgtcccatgcatgggaggtagaaaatagtagtagtaaatcaacagagttgaaccatttacccacttgaaatactcccccattggtcacaaagaagtgatgcttgggttgcatgcagtaaaccactgaacctctgattacaaattacttattatgtgttgagtttggaaattaaaatgatactgctagattcctcttgaaaaatactttgaaagaggtatatttttttactatggtttataaaatgtacacagcgaaaaggactagtctaaattatgttttgaagattgtgttgatgtccaaaacaatgtgaccagagggagtgcctcatttcaaccgcttaacatctttcaaactatttgtaggcagaaaagctctaataagtgaactcttttattccactaatgatttttttgttggaaccagaatccttaaaagcatgcagctgttctgaattctgaaacagggagcaggggagtagtagtcatttctgaaggttctatgagtccagataataattagttttgacagctaaagaaaaggtttttgataagtacatatacaaaatatgtacttaaatatccacagacctttcataatataatatcgtggcatatcctattgaatcttacatgttctttttcttcacagcaactgttcctgaactagaactggatgatacttttgagcaaaagaaatgaaatagttcggaggatgaccttgaaaaggcaatatttacttatggttatgagattgtgcaaacactcattgttgataccaaaccagatgaaaaggattaaaagagctatgaatgaaatcaatgctggtaaatgtccgtctacattggtgaatcttgcttctgtgatgtatgaactcatgcaatttgcatatagctcaagaaaatttccattcacacgttgtattctctcagtttctttttataaggtatgatatcccttccaatattcgaaccttgtcatatttgaccaactattcctctaatggtatttaaacactatgataaacaatggcatcactggattggtatttgaatgtacatccaaatgatcataattttgttgcaatagacattattctcaacgaatcagtggtcaatgtgaaaatttggagactgtgcctagtcaaaccacactttattttgaaactaagtataattcaacatgaagaggtgctagaacttgaggaattatagtaattggtcatccataaaaatattcatactggtttgtaacgagcgagaaattaatcacattgatatcacaataatatactgcagtttgatgcttactactaaccaatttttccttttgttcagctgcgcgttgcggcaaataagaaggcagatgcaacgaaaatcattcagatcaaaatggctgagggcgagatatagcaggggagacccagacccccactataaggattttattaaaaacaaaaggaacttcaccaatacaaagagggagggggggacaagaggagtcagggagctatgactaggagaactgcacaggctacggagaaacaacaccaacaaagttaagctagtccaataagaaggaagagtaaactaggtactccttccgttcttttctatttgtcttgttttagttcaaaaatgaactaacaggtaacaaatattcgagaacgaaggtagtattttagagtggcagaagcaagaccaacaaagttaagctagtccagtataataagaaggaagaggaaactaggtatttgagactggcagaagcgaaagactgcaactgagcttgctataggaaacattgcttctaatttgttgaaggaaggacgaccacgattaaaaatgaagttattcctttgcttctaaatctgtcaagg

SEQ ID NO: 48541 - DNA, 4079 bp, Zea Mays
cgactgtcctctctcaattcacgaggaaaaaaaagaataatctctccactttccttcaggatccagcccgcaccaccgcacgtctcctcctctctcaacaccggccaccgtaacaggaataatccagctcgtgattgaagaatccgatgacgacgccatgcctgggcgccgcggccttaagcgccagctggacggcgccctccctgacgggggcgtttctcgatctgacgctcgcctgggcctgcctctgcctcgccgcgctcgccgccgtcgccgcgcgcctcctcgcgctcctcggcctcccgctcccctgcacctgcgcgcgcccgcacctgccctgcctcctcgccttcctggcgcgctaccctccccgcgccgtcggatcccttcacgccgccctccgcgcccgcttccccttcgccggccccaccgacgacgaggcacgccttcagaaaggggtggaggaagagggggaggaggaggccatcgacgcgccgaaggaggaaggggattttcgtcgccgcgtggaggcgcgcgccgagctgcagatggagctcgagaaagagcgcagcgccgcagcgtcggcggccgaggaggccatgtccatgatcctgcgcctgcagaaggagaagtcggcgcttgagattgaggcgcgacagcagcgccgaaccgctgacgagcgctgcgccttctacgaggacgaggtcgaggagctccgggacatcgtgctcgtgcgggagcgtgaggtgcgcgcgctgcgcaaggaggttgacgcctaccgacgcctgctcggttttagcgctaccgaggaggacgaggaggaggatgacgagcaggagatggtcacgccgcatagtttccccatgtacgaaggagagcccagctcgtccaaatcggtcgatgcgaatcggatgcaacattttgggaatgattctgggttcagcttcaagacgccatcaccgcgtgaacaaccaacggtgccgcctcttactgcagggcaaatcaatgtgggaagcgatgattgtgttgctgttcagacgccggccaaagttcccgtggttcaatcaagactggagctagatagctctgaggatgaggacgaggatgaggatgatggagcagagacggtggaaatcctccccctatccgcccggagccaagatttggatcaaggtagccatttccatgctgatactgcacaaggtatggaatcgacttgtaccaaggaacagacagctcatgcatttcaggaaatcgagtgtccaggtatagacaagattgttaatgaccagataggaagcaagaatgatgccaatgtgtatgatgtgcatgtggtcgatgacatacgcttctcaacagaagtcaagggcctgattggccgaagcttctcagaggcaacaatgcaagcagagagattacagtctcgagctgttgcagatgatctccttgagaaaagcctgaatgccatcaaaggtgcacaggacaagataagaaatgcagctaatgaaaggaggcagtcattacagttgcaactcttagaggacatagctgatcaacttcaaggaatcaaggatgctgcagaagcagggaggcaagtgttctgtgctgctcctaaaagctccaagaggagctagggacttgtgttacgccactaatgcatggttggcgtcgtacataagttgtttcgggtttgtagaccaggtctgttgatttgttgattcaacaagtttgcttcttcttctttaaataagtagtggctattgctttgtacatgtatatatataaacaacatgggattcatcccagtctttataaaacgaatatatgtgtaaagaaaaacgaaatggatatttgatcaggaaggcaggaagctgactgtactgccgttgtatcggacgacagtttgttggacatgtccaaccataatcaaacgggtcaaacctgagaatgacagcaaatgcagaagttggcctgaatataacatttcttgatttgcaatgcagagaagtcaagtataaatttcaatcactccatatctttgtcaaacattcaaaccatcttcacaagttgactcattcagcagcctggtgctcaaagaccaaatgagagggtaatgtaaatcaatcaggtattttcattcccgtcaactactctgatttcaacatttcagaaaaaaaatgtgttgctaaactccttggccctaggtttaactcttgtacaaagctgaaaagtacacacaatttggttgataactgaaaaatcgtgattggcggtattagtaagttctataataaagctgttgatgagattgattcatatcctcactgcttcaaggcagatattggaatggggaaaccacttgcagcaatcggcaagttctaatgctttgtacaggtggaccagtcaacggtggacatcaaagagagatttgggaagtttaaggatgtacttgatcctggatgccgttttgtgccgtggatcattggaaaccgcgtcgaaggtcagctcacgcattggaaaccgttgtgagacgaagacaaaggataatgttttcgttacggttgttgcatccattcaataccgggcgatggaagacaaagcatgcaatgcatattataagctgagcaacccaaaagctcaaattcaatcatacgtccttgatggtaaaatcgatttatactaaattcttaccgtttagaatggttgtccaaactgtcccatgcatgggaggtagaaaatagtagtagtaaatcaacagagttgaaccatttacccacttgaaatactcccccattggtcacaaagaagtgatgcttgggttgcatgcagtaaaccactgaacctctgattacaaattacttattatgtgttgagtttggaaattaaaatgatactgctagattcctcttgaaaaatactttgaaagaggtatatttttttactatggtttataaaatgtacacagcgaaaaggactagtctaaattatgttttgaagattgtgttgatgtccaaaacaatgtgaccagagggagtgcctcatttcaaccgcttaacatctttcaaactatttgtaggcagaaaagctctaataagtgaactcttttattccactaatgatttttttgttggaaccagaatccttaaaagcatgcagctgttctgaattctgaaacagggagcaggggagtagtagtcatttctgaaggttctatgagtccagataataattagttttgacagctaaagaaaaggtttttgataagtacatatacaaaatatgtacttaaatatccacagacctttcataatataatatcgtggcatatcctattgaatcttacatgttctttttcttcacagcaactgttcctgaactagaactggatgatacttttgagcaaaagaaatgaaatagttcggaggatgaccttgaaaaggcaatatttacttatggttatgagattgtgcaaacactcattgttgataccaaaccagatgaaaaggattaaaagagctatgaatgaaatcaatgctgctgcgcgttgcggcaaataagaaggcagatgcaacgaaaatcattcagatcaaaatggctgagggcgagatatagcaggggagacccagacccccactataaggattttattaaaaacaaaaggaacttcaccaatacaaagagggagggggggacaagaggagtcagggagctatgactaggagaactgcacaggctacggagaaacaacaccaacaaagttaagctagtccaataagaaggaagagtaaactaggtactccttccgttcttttctatttgtcttgttttagttcaaaaatgaactaacaggtaacaaatattcgagaacgaaggtagtattttagagtggcagaagcaagaccaacaaagttaagctagtccagtataataagaaggaagaggaaactaggtatttgagactggcagaagcgaaagactgcaactgagcttgctataggaaacattgcttctaatttgttgaaggaaggacgaccacgattaaaaatgaagttattcctttgcttctaaatctgtcaagg

SEQ ID NO: 48542 - DNA, 3896 bp, Zea Mays
cgactgtcctctctcaattcacgaggaaaaaaaagaataatctctccactttccttcaggatccagcccgcaccaccgcacgtctcctcctctctcaacaccggccaccgtaacaggaataatccagctcgtgattgaagaatccgatgacgacgccatgcctgggcgccgcggccttaagcgccagctggacggcgccctccctgacgggggcgtttctcgatctgacgctcgcctgggcctgcctctgcctcgccgcgctcgccgccgtcgccgcgcgcctcctcgcgctcctcggcctcccgctcccctgcacctgcgcgcgcccgcacctgccctgcctcctcgccttcctggcgcgctaccctccccgcgccgtcggatcccttcacgccgccctccgcgcccgcttccccttcgccggccccaccgacgacgaggcacgccttcagaaaggggtggaggaagagggggaggaggaggccatcgacgcgccgaaggaggaaggggattttcgtcgccgcgtggaggcgcgcgccgagctgcagatggagctcgagaaagagcgcagcgccgcagcgtcggcggccgaggaggccatgtccatgatcctgcgcctgcagaaggagaagtcggcgcttgagattgaggcgcgacagcagcgccgaaccgctgacgagcgctgcgccttctacgaggacgaggtcgaggagctccgggacatcgtgctcgtgcgggagcgtgaggtgcgcgcgctgcgcaaggaggttgacgcctaccgacgcctgctcggttttagcgctaccgaggaggacgaggaggaggatgacgagcaggagatggtcacgccgcatagtttccccatgtacgaaggagagcccagctcgtccaaatcggtcgatgcgaatcggatgcaacattttgggaatgattctgggttcagcttcaagacgccatcaccgcgtgaacaaccaacggtgccgcctcttactgcagggcaaatcaatgtgggaagcgatgattgtgttgctgttcagacgccggccaaagttcccgtggttcaatcaagactggagctagatagctctgaggatgaggacgaggatgaggatgatggagcagagacggtggaaatcctccccctatccgcccggagccaagatttggatcaaggtagccatttccatgctgatactgcacaaggtatggaatcgacttgtaccaaggaacagacagctcatgcatttcaggaaatcgagtgtccaggtatagacaagattgttaatgaccagataggaagcaagaatgatgccaatgtgtatgatgtgcatgtggtcgatgacatacgcttctcaacagaagtcaagggcctgattggccgaagcttctcagaggcaacaatgcaagcagagagattacagtctcgagctgttgcagatgatctccttgagaaaagcctgaatgccatcaaaggtgcacaggacaagataagaaatgcagctaatgaaaggaggcagtcattacagttgcaactcttagaggacatagctgatcaacttcaaggaatcaaggatgctgcagaagcagggaggcaagtgttctgtgctgctcctaaaagctccaagaggagctagggacttgtgttacgccactaatgcatggttggcgtcgtacataagttgtttcgggtttgtagaccagagaagtcaagtataaatttcaatcactccatatctttgtcaaacattcaaaccatcttcacaagttgactcattcagcagcctggtgctcaaagaccaaatgagagggtaatgtaaatcaatcaggtattttcattcccgtcaactactctgatttcaacatttcagaaaaaaaatgtgttgctaaactccttggccctaggtttaactcttgtacaaagctgaaaagtacacacaatttggttgataactgaaaaatcgtgattggcggtattagtaagttctataataaagctgttgatgagattgattcatatcctcactgcttcaaggcagatattggaatggggaaaccacttgcagcaatcggcaagttctaatgctttgtacaggtggaccagtcaacggtggacatcaaagagagatttgggaagtttaaggatgtacttgatcctggatgccgttttgtgccgtggatcattggaaaccgcgtcgaaggtcagctcacgcattggaaaccgttgtgagacgaagacaaaggataatgttttcgttacggttgttgcatccattcaataccgggcgatggaagacaaagcatgcaatgcatattataagctgagcaacccaaaagctcaaattcaatcatacgtccttgatggtaaaatcgatttatactaaattcttaccgtttagaatggttgtccaaactgtcccatgcatgggaggtagaaaatagtagtagtaaatcaacagagttgaaccatttacccacttgaaatactcccccattggtcacaaagaagtgatgcttgggttgcatgcagtaaaccactgaacctctgattacaaattacttattatgtgttgagtttggaaattaaaatgatactgctagattcctcttgaaaaatactttgaaagaggtatatttttttactatggtttataaaatgtacacagcgaaaaggactagtctaaattatgttttgaagattgtgttgatgtccaaaacaatgtgaccagagggagtgcctcatttcaaccgcttaacatctttcaaactatttgtaggcagaaaagctctaataagtgaactcttttattccactaatgatttttttgttggaaccagaatccttaaaagcatgcagctgttctgaattctgaaacagggagcaggggagtagtagtcatttctgaaggttctatgagtccagataataattagttttgacagctaaagaaaaggtttttgataagtacatatacaaaatatgtacttaaatatccacagacctttcataatataatatcgtggcatatcctattgaatcttacatgttctttttcttcacagcaactgttcctgaactagaactggatgatacttttgagcaaaagaaatgaaatagttcggaggatgaccttgaaaaggcaatatttacttatggttatgagattgtgcaaacactcattgttgataccaaaccagatgaaaaggattaaaagagctatgaatgaaatcaatgctggtaaatgtccgtctacattggtgaatcttgcttctgtgatgtatgaactcatgcaatttgcatatagctcaagaaaatttccattcacacgttgtattctctcagtttctttttataagctgcgcgttgcggcaaataagaaggcagatgcaacgaaaatcattcagatcaaaatggctgagggcgagatatagcaggggagacccagacccccactataaggattttattaaaaacaaaaggaacttcaccaatacaaagagggagggggggacaagaggagtcagggagctatgactaggagaactgcacaggctacggagaaacaacaccaacaaagttaagctagtccaataagaaggaagagtaaactaggtactccttccgttcttttctatttgtcttgttttagttcaaaaatgaactaacaggtaacaaatattcgagaacgaaggtagtattttagagtggcagaagcaagaccaacaaagttaagctagtccagtataataagaaggaagaggaaactaggtatttgagactggcagaagcgaaagactgcaactgagcttgctataggaaacattgcttctaatttgttgaaggaaggacgaccacgattaaaaatgaagttattcctttgcttctaaatctgtcaagg

SEQ ID NO: 48543 - DNA, 3389 bp, Zea Mays
cgactgtcctctctcaattcacgaggaaaaaaaagaataatctctccactttccttcaggatccagcccgcaccaccgcacgtctcctcctctctcaacaccggccaccgtaacaggaataatccagctcgtgattgaagaatccgatgacgacgccatgcctgggcgccgcggccttaagcgccagctggacggcgccctccctgacgggggcgtttctcgatctgacgctcgcctgggcctgcctctgcctcgccgcgctcgccgccgtcgccgcgcgcctcctcgcgctcctcggcctcccgctcccctgcacctgcgcgcgcccgcacctgccctgcctcctcgccttcctggcgcgctaccctccccgcgccgtcggatcccttcacgccgccctccgcgcccgcttccccttcgccggccccaccgacgacgaggcacgccttcagaaaggggtggaggaagagggggaggaggaggccatcgacgcgccgaaggaggaaggggattttcgtcgccgcgtggaggcgcgcgccgagctgcagatggagctcgagaaagagcgcagcgccgcagcgtcggcggccgaggaggccatgtccatgatcctgcgcctgcagaaggagaagtcggcgcttgagattgaggcgcgacagcagcgccgaaccgctgacgagcgctgcgccttctacgaggacgaggtcgaggagctccgggacatcgtgctcgtgcgggagcgtgaggtgcgcgcgctgcgcaaggaggttgacgcctaccgacgcctgctcggttttagcgctaccgaggaggacgaggaggaggatgacgagcaggagatggtcacgccgcatagtttccccatgtacgaaggagagcccagctcgtccaaatcggtcgatgcgaatcggatgcaacattttgggaatgattctgggttcagcttcaagacgccatcaccgcgtgaacaaccaacggtgccgcctcttactgcagggcaaatcaatgtgggaagcgatgattgtgttgctgttcagacgccggccaaagttcccgtggttcaatcaagactggagctagatagctctgaggatgaggacgaggatgaggatgatggagcagagacggtggaaatcctccccctatccgcccggagccaagatttggatcaaggtagccatttccatgctgatactgcacaaggtatggaatcgacttgtaccaaggaacagacagctcatgcatttcaggaaatcgagtgtccaggtatagacaagattgttaatgaccagataggaagcaagaatgatgccaatgtgtatgatgtgcatgtggtcgatgacatacgcttctcaacagaagtcaagggcctgattggccgaagcttctcagaggcaacaatgcaagcagagagattacagtctcgagctgttgcagatgatctccttgagaaaagcctgaatgccatcaaaggtgcacaggacaagataagaaatgcagctaatgaaaggaggcagtcattacagttgcaactcttagaggacatagctgatcaacttcaaggaatcaaggatgctgcagaagcagggaggcaagtgttctgtgctgctcctaaaagctccaagaggagctagggacttgtgttacgccactaatgcatggttggcgtcgtacataagttgtttcgggtttgtagaccaggtctgttgatttgttgattcaacaagtttgcttcttcttctttaaataagtagtggctattgctttgtacatgtatatatataaacaacatgggattcatcccagtctttataaaacgaatatatgtgtaaagaaaaacgaaatggatatttgatcaggaaggcaggaagctgactgtactgccgttgtatcggacgacagtttgttggacatgtccaaccataatcaaacgggtcaaacctgagaatgacagcaaatgcagaagttggcctgaatataacatttcttgatttgcaatgcagagaagtcaagtataaatttcaatcactccatatctttgtcaaacattcaaaccatcttcacaagttgactcattcagcagcctggtgctcaaagaccaaatgagagggtaatgtaaatcaatcaggtattttcattcccgtcaactactctgatttcaacatttcagaaaaaaaatgtgttgctaaactccttggccctaggtttaactcttgtacaaagctgaaaagtacacacaatttggttgataactgaaaaatcgtgattggcggtattagtaagttctataataaagctgttgatgagattgattcatatcctcactgcttcaaggcagatattggaatggggaaaccacttgcagcaatcggcaagttctaatgctttgtacaggtggaccagtcaacggtggacatcaaagagagatttgggaagtttaaggatgtacttgatcctggatgccgttttgtgccgtggatcattggaaaccgcgtcgaaggtcagctcacgcattggaaaccgttgtgagacgaagacaaaggataatgttttcgttacggttgttgcatccattcaataccgggcgatggaagacaaagcatgcaatgcatattataagctgagcaacccaaaagctcaaattcaatcatacgtccttgatggtatcacagcaactgttcctgaactagaactggatgatacttttgagcaaaagaaatgaaatagttcggaggatgaccttgaaaaggcaatatttacttatggttatgagattgtgcaaacactcattgttgataccaaaccagatgaaaaggattaaaagagctatgaatgaaatcaatgctgctgcgcgttgcggcaaataagaaggcagatgcaacgaaaatcattcagatcaaaatggctgagggcgagatatagcaggggagacccagacccccactataaggattttattaaaaacaaaaggaacttcaccaatacaaagagggagggggggacaagaggagtcagggagctatgactaggagaactgcacaggctacggagaaacaacaccaacaaagttaagctagtccaataagaaggaagagtaaactaggtactccttccgttcttttctatttgtcttgttttagttcaaaaatgaactaacaggtaacaaatattcgagaacgaaggtagtattttagagtggcagaagcaagaccaacaaagttaagctagtccagtataataagaaggaagaggaaactaggtatttgagactggcagaagcgaaagactgcaactgagcttgctataggaaacattgcttctaatttgttgaaggaaggacgaccacgattaaaaatgaagttattcctttgcttctaaatctgtcaagg

SEQ ID NO: 48544 - DNA, 1217 bp, Zea Mays
cagcctaccgggagcgactgagcgtacgggttatccccgtttctacgcgctcgctcctgtacctctccccagtgcccaagaatccaagatctggaagggccaggtgggaggaccaagcttcgtcgacgtcgactcctcgtcctccctcacctcgctcgcttctctgcaattctccgcagccctcctctttcggtctttcccgctggcctcctcttttcaaaaccctcgctaatctcgtgccccgtcccacccacctctagcttcgaatcctagcgcctcgcctccgcattctagggtttccccgcctccggcgccggccatggaggcggtggtcgtcgacgcgggctctaagctgctcaaggccggcatcgcggcgcccgaccaggcacccccactggtaatgccgtcgaagatgaagctggatgttgaggaccaggagatggctgacggcgcggtggtagaggaggtggtgcaccctgtggtgcgcggcttcgtcaaggactgggacgccatggaggacctactcaactacgtcctgtacagggacattgggtgggagattggggacgagggtcagattctcttcaccgaacccctcttcacgccaaagactcttcgggagcaattggtgcagcttatgtttgaaaagttcaatgtttcaggcttttatgcctctgaacaggctgtattgtcactctatgctgttggacgcatttcaggatgtaccgttgacattggtcacgggaaaatagatattgctccagtttgtgaaggagctgttcaacacatagcttctaagagattagagattgggggagttgacttgacaaacctgtttgcacaagaactgaaaaaatccaacccatcagtaaaccttgatgttgctgatgttgagctgctgaaagagcagtatgcgtgttgcacagaagattatttgacttttgaaagtatagaaagctcttgccaaccagaaaagcacactcttcctgatgggcaggttataacaattgaaaaagaggggtacattgttggtgaagctttatttcaaccacgtatattgggcttggaagattatggtatcgttcaccagctagttactagtgtctcaaatgtttcatcagagtaccatcgtcagctgcttgaaaataccatgttatgtggtggcacctcatcaatgactgttgaacacaacttcattcaagatgaaaatctgcctt

SEQ ID NO: 48545 - DNA, 1932 bp, Zea Mays
cagcctaccgggagcgactgagcgtacgggttatccccgtttctacgcgctcgctcctgtacctctccccagtgcccaagaatccaagatctggaagggccaggtgggaggaccaagcttcgtcgacgtcgactcctcgtcctccctcacctcgctcgcttctctgcaattctccgcagccctcctctttcggtctttcccgctggcctcctcttttcaaaaccctcgctaatctcgtgccccgtcccacccacctctagcttcgaatcctagcgcctcgcctccgcattctagggtttccccgcctccggcgccggccatggaggcggtggtcgtcgacgcgggctctaagctgctcaaggccggcatcgcggcgcccgaccaggcacccccactggtaatgccgtcgaagatgaagctggatgttgaggaccaggagatggctgacggcgcggtggtagaggaggtggtgcaccctgtggtgcgcggcttcgtcaaggactgggacgccatggaggacctactcaactacgtcctgtacagggacattgggtgggagattggggacgagggtcagattctcttcaccgaacccctcttcacgccaaagactcttcgggagcaattggtgcagcttatgtttgaaaagttcaatgtttcaggcttttatgcctctgaacaggctgtattgtcactctatgctgttggacgcatttcaggatgtaccgttgacattggtcacgggaaaatagtttgtgaaggagctgttcaacacatagcttctaagagattagagattgggggagttgacttgacaaacctgtttgcacaagaactgaaaaaatccaacccatcagtaaaccttgatgttgctgatgttgagctgctgaaagagcagtatgcgtgttgcacagaagattatttgacttttgaaagtatagaaagctcttgccaaccagaaaagcacactcttcctgatgggcaggttataacaattgaaaaagaggggtacattgttggtgaagctttatttcaaccacgtatattgggcttggaagattatggtatcgttcaccagctagttactagtgtctcaaatgtttcatcagagtaccatcgtcagctgcttgaaaataccatgttatgtggtggcacctcatcaatgactggctttgaggacaggttccagagagaagcaaatctgtctgcttcagcaatctgtccatcacttgtgaagcctcctgaatacatgcccgagaacctagcaaggtactcggcctggctgggtggtgcgatattggctaaggtcgttttccctcaaaaccagcatgtgaccaagggcgagtatgatgagacggggccgtccattgtgcacaagaagtgcttttagagacaaatgccttgaactagcacggttggtgcaccatttgctgctgttcatgtcgcaggtgtcctcgtacctgaacgttgcggccttgcgggtgctgatgcagcgatgcttgtgtctacaccttactccagccacagttcatacctgacggttgctaagtgttgatgcatctagctagctcggttaggatggattggcccttaggtttatttagagtggaatggagtgtagcctcggcatgtattccttaggagttttagccaattgctcatttgtacctgtagtaccagagaatttcctgagttgagatttccttttaaatttacattatgatccattacctgttcagctgctactagtgaaagagttcttcgaagcatgctcacaaactaagcgcgtcacagtttcttagtcataatatatgtttagttcaggccacataagttgtacgtcaagctttgtatccctgcgccccgttcatagctctttttttggctaaactttgtcataggtgtgttcaatttattcgccacacttctttt

SEQ ID NO: 48546 - DNA, 1216 bp, Zea Mays
aaggaagcaatagtgaaaaagatgatattgctccagtttgtgaaggagctgttcaacacatagcttctaagagattagagattgggggagttgacttgacaaacctgtttgcacaagaactgaaaaaatccaacccatcagtaaaccttgatgttgctgatgttgagctgctgaaagagcagtatgcgtgttgcacagaagattatttgacttttgaaagtatagaaagctcttgccaaccagaaaagcacactcttcctgatgggcaggttataacaattgaaaaagaggggtacattgttggtgaagctttatttcaaccacgtatattgggcttggaagattatggtatcgttcaccagctagttactagtgtctcaaatgtttcatcagagtaccatcgtcagctgcttgaaaataccatgttatgtggtggcacctcatcaatgactggctttgaggacaggttccagagagaagcaaatctgtctgcttcagcaatctgtccatcacttgtgaagcctcctgaatacatgcccgagaacctagcaaggtactcggcctggctgggtggtgcgatattggctaaggtcgttttccctcaaaaccagcatgtgaccaagggcgagtatgatgagacggggccgtccattgtgcacaagaagtgcttttagagacaaatgccttgaactagcacggttggtgcaccatttgctgctgttcatgtcgcaggtgtcctcgtacctgaacgttgcggccttgcgggtgctgatgcagcgatgcttgtgtctacaccttactccagccacagttcatacctgacggttgctaagtgttgatgcatctagctagctcggttaggatggattggcccttaggtttatttagagtggaatggagtgtagcctcggcatgtattccttaggagttttagccaattgctcatttgtacctgtagtaccagagaatttcctgagttgagatttccttttaaatttacattatgatccattacctgttcagctgctactagtgaaagagttcttcgaagcatgctcacaaactaagcgcgtcacagtttcttagtcataatatatgtttagttcaggccacataagttgtacgtcaagctttgtatccctgcgccccgttcatagctctttttttggctaaactttgtcataggtgtgttcaatttattcgccacacttctttt

SEQ ID NO: 48547 - DNA, 1423 bp, Zea Mays
ctcccctcgtcccccccccccccccccccccccccccaaccccccaaaaaaaaatccggtcgatcctagctcgcgatgttctccggcaccggaccctccggcggggcagcccactctacgtccaccggtggtgggggtggctcgccttccgacaggggcggccccgcgccctcggcctcggcgtcggtctccacgccagccagcgagagcaccgtcgcccgccgcctaaacggacttgacccccacggcgacgacgctccatcgtcgcagccagccacgagcaagaagaaaaagagaggggcacgagcagttggtcctgacaaaaatggccgtggattgcgtcaatttagcatgagagtatgtgagaaagtcgaaagcaaagggagaacaacctacaatgaggtggcagacgaactggttgctgagttttcagatcccaatattaatattgactctccagatcctgataattcgtctgcgcaacaatatgatgagaaaaatatccgaagaagagtttatgatgcgctgaatgtcctaatggctatggaaattatatctaaagataaaaaggaaatacagtggagaggtctgcccaagacaagtatgaatgatattgaagaactgaagacagaggtcaatggactgaaaggtcggattgacaagaaaaatgcatatctgcaggatttacaagatcaatatgcatgtctgcaaaacttggttcggcgaaatgagcagctatatgggtcaggagatgcaccttccggtggagtggccttgccatttatactagttcagacacgtcctcatgcaactgtagaagtggagatatcagaagatatgcagcacgtgcattttgatttcaataggatgattcatttgtactgaaagcaatggcattatctggcgaagaagctgattgtacccaagctcctggtgcgaatggaggcgagtgctcaagtacacggaacaattattggcaccaccaccaacaaccgcagcctccagggccaagagtagttagggtaccaaactcgcctcctattccagggatactaaaagggcgtgtcaagcatgaacactaggcttcaatatgcttagtggtgtcaaatgagctatttactttattgtccccagctagttttacctgtagaaaatgcatgtaaattatgcctgtaggggcagccgcagtctaatttgacttcgctgatggatagttcgatttgtgtcatgatatgccatacgcctagctcacgttaactcctagtattcagttgtttggtcgaggaaaagagtctgtggttaagtgtaattgtgtagtttatcttcaaacagtcggcatatcgtatctatgggacgatttgaggaacagtgttgtcagtacactccaattgatatacaataaaatgcaaatgtttgtttacag

SEQ ID NO: 48548 - DNA, 881 bp, Zea Mays
cccccccccccaaccccccaaaaaaaaatccggtcgatcctagctcgcgatgttctccggcaccggaccctccggcggggcagcccactctacgtccaccggtggtgggggtggctcgccttccgacaggggcggccccgcgccctcggcctcggcgtcggtctccacgccagccagcgagagcaccgtcgcccgccgcctaaacggacttgacccccacggcgacgacgctccatcgtcgcagccagccacgagcaagaagaaaaagagaggggcacgagcagttggtcctgacaaaaatggccgtggattgcgtcaatttagcatgagagtatgtgagaaagtcgaaagcaaagggagaacaacctacaatgaggtggcagacgaactggttgctgagttttcagatcccaatattaatattgactctccagatcctgataattcgtctgcgcaacaatatgatgagaaaaatatccgaagaagagtttatgatgcgctgaatgtcctaatggctatggaaattatatctaaagataaaaaggaaatacagtggagaggtctgcccaagacaagtatgaatgatattgaagaactgaagacagaggtcaatggactgaaaggtcggattgacaagaaaaatgcatatctgcaggatttacaagatcaatatgcatgtctgcaaaacttggttcggcgaaatgagcagctatatgggtcaggagatgcaccttccggtggagtggccttgccatttatactagttcagacacgtcctcatgcaactgtagaagtggagatatcagaagatatgcagcacgtgcattttgatttcaatagggctagtttggaatctcaaatcccctctgggattggagggg

SEQ ID NO: 48549 - DNA, 1377 bp, Zea Mays
cccccccccccaaccccccaaaaaaaaatccggtcgatcctagctcgcgatgttctccggcaccggaccctccggcggggcagcccactctacgtccaccggtggtgggggtggctcgccttccgacaggggcggccccgcgccctcggcctcggcgtcggtctccacgccagccagcgagagcaccgtcgcccgccgcctaaacggacttgacccccacggcgacgacgctccatcgtcgcagccagccacgagcaagaagaaaaagagaggggcacgagcagttggtcctgacaaaaatggccgtggattgcgtcaatttagcatgagagtatgtgagaaagtcgaaagcaaagggagaacaacctacaatgaggtggcagacgaactggttgctgagttttcagatcccaatattaatattgactctccagatcctgataattcgtctgcgcaacaatatgatgagaaaaatatccgaagaagagtttatgatgcgctgaatgtcctaatggctatggaaattatatctaaagataaaaaggaaatacagtggagaggtctgcccaagacaagtatgaatgatattgaagaactgaagacagaggtcaatggactgaaaggtcggattgacaagaaaaatgcatatctgcaggatttacaagatcaactatatgggtcaggagatgcaccttccggtggagtggccttgccatttatactagttcagacacgtcctcatgcaactgtagaagtggagatatcagaagatatgcagcacgtgcattttgatttcaatagcactccatttgagttgcaggatgattcatttgtactgaaagcaatggcattatctggcgaagaagctgattgtacccaagctcctggtgcgaatggaggcgagtgctcaagtacacggaacaattattggcaccaccaccaacaaccgcagcctccagggccaagagtagttagggtaccaaactcgcctcctattccagggatactaaaagggcgtgtcaagcatgaacactaggcttcaatatgcttagtggtgtcaaatgagctatttactttattgtccccagctagttttacctgtagaaaatgcatgtaaattatgcctgtaggggcagccgcagtctaatttgacttcgctgatggatagttcgatttgtgtcatgatatgccatacgcctagctcacgttaactcctagtattcagttgtttggtcgaggaaaagagtctgtggttaagtgtaattgtgtagtttatcttcaaacagtcggcatatcgtatctatgggacgatttgaggaacagtgttgtcagtacactccaattgatatacaataaaatgcaaatgtttgtttacag

SEQ ID NO: 48550 - DNA, 1298 bp, Zea Mays
cccccccccccaaccccccaaaaaaaaatccggtcgatcctagctcgcgatgttctccggcaccggaccctccggcggggcagcccactctacgtccaccggtggtgggggtggctcgccttccgacaggggcggccccgcgccctcggcctcggcgtcggtctccacgccagccagcgagagcaccgtcgcccgccgcctaaacggacttgacccccacggcgacgacgctccatcgtcgcagccagccacgagcaagaagaaaaagagaggggcacgagcagttggtcctgacaaaaatggccgtggattgcgtcaatttagcatgagagtatgtgagaaagtcgaaagcaaagggagaacaacctacaatgaggtggcagacgaactggttgctgagttttcagatcccaatattaatattgactctccagatcctgataattcgtctgcgcaacaatatgatgagaaaaatatccgaagaagagtttatgatgcgctgaatgtcctaatggctatggaaattatatctaaagataaaaaggaaatacagtggagaggtctgcccaagacaagtatgaatgatattgaagaactgaagacagaggtcaatggactgaaaggtcggattgacaagaaaaatgcatatctgcaggatttacaagatcaaacacgtcctcatgcaactgtagaagtggagatatcagaagatatgcagcacgtgcattttgatttcaataggatgattcatttgtactgaaagcaatggcattatctggcgaagaagctgattgtacccaagctcctggtgcgaatggaggcgagtgctcaagtacacggaacaattattggcaccaccaccaacaaccgcagcctccagggccaagagtagttagggtaccaaactcgcctcctattccagggatactaaaagggcgtgtcaagcatgaacactaggcttcaatatgcttagtggtgtcaaatgagctatttactttattgtccccagctagttttacctgtagaaaatgcatgtaaattatgcctgtaggggcagccgcagtctaatttgacttcgctgatggatagttcgatttgtgtcatgatatgccatacgcctagctcacgttaactcctagtattcagttgtttggtcgaggaaaagagtctgtggttaagtgtaattgtgtagtttatcttcaaacagtcggcatatcgtatctatgggacgatttgaggaacagtgttgtcagtacactccaattgatatacaataaaatgcaaatgtttgtttacag

SEQ ID NO: 48551 - DNA, 1317 bp, Zea Mays
cccccccccccaaccccccaaaaaaaaatccggtcgatcctagctcgcgatgttctccggcaccggaccctccggcggggcagcccactctacgtccaccggtggtgggggtggctcgccttccgacaggggcggccccgcgccctcggcctcggcgtcggtctccacgccagccagcgagagcaccgtcgcccgccgcctaaacggacttgacccccacggcgacgacgctccatcgtcgcagccagccacgagcaagaagaaaaagagaggggcacgagcagttggtcctgacaaaaatggccgtggattgcgtcaatttagcatgagagtatgtgagaaagtcgaaagcaaagggagaacaacctacaatgaggtggcagacgaactggttgctgagttttcagatcccaatattaatattgactctccagatcctgataattcgtctgcgcaacaatatgatgagaaaaatatccgaagaagagtttatgatgcgctgaatgtcctaatggctatggaaattatatctaaagataaaaaggaaatacagtggagaggtctgcccaagacaagtatgaatgatattgaagaactgaagacagaggtcaatggactgaaaggtcggattgacaagaaaaatgcatatctgcaggatttacaagatcaaacacgtcctcatgcaactgtagaagtggagatatcagaagatatgcagcacgtgcattttgatttcaatagcactccatttgagttgcaggatgattcatttgtactgaaagcaatggcattatctggcgaagaagctgattgtacccaagctcctggtgcgaatggaggcgagtgctcaagtacacggaacaattattggcaccaccaccaacaaccgcagcctccagggccaagagtagttagggtaccaaactcgcctcctattccagggatactaaaagggcgtgtcaagcatgaacactaggcttcaatatgcttagtggtgtcaaatgagctatttactttattgtccccagctagttttacctgtagaaaatgcatgtaaattatgcctgtaggggcagccgcagtctaatttgacttcgctgatggatagttcgatttgtgtcatgatatgccatacgcctagctcacgttaactcctagtattcagttgtttggtcgaggaaaagagtctgtggttaagtgtaattgtgtagtttatcttcaaacagtcggcatatcgtatctatgggacgatttgaggaacagtgttgtcagtacactccaattgatatacaataaaatgcaaatgtttgtttacag

SEQ ID NO: 48552 - DNA, 1235 bp, Zea Mays
cacctttgcacagagaacatggcttttggacgattttctattttttgccacctttggtatcccttgttgatttcgggccatattttttccgagcaagaagaaaaagagaggggcacgagcagttggtcctgacaaaaatggccgtggattgcgtcaatttagcatgagagtatgtgagaaagtcgaaagcaaagggagaacaacctacaatgaggtggcagacgaactggttgctgagttttcagatcccaatattaatattgactctccagatcctgataattcgtctgcgcaacaatatgatgagaaaaatatccgaagaagagtttatgatgcgctgaatgtcctaatggctatggaaattatatctaaagataaaaaggaaatacagtggagaggtctgcccaagacaagtatgaatgatattgaagaactgaagacagaggtcaatggactgaaaggtcggattgacaagaaaaatgcatatctgcaggatttacaagatcaatatgcatgtctgcaaaacttggttcggcgaaatgagcagctatatgggtcaggagatgcaccttccggtggagtggccttgccatttatactagttcagacacgtcctcatgcaactgtagaagtggagatatcagaagatatgcagcacgtgcattttgatttcaataggatgattcatttgtactgaaagcaatggcattatctggcgaagaagctgattgtacccaagctcctggtgcgaatggaggcgagtgctcaagtacacggaacaattattggcaccaccaccaacaaccgcagcctccagggccaagagtagttagggtaccaaactcgcctcctattccagggatactaaaagggcgtgtcaagcatgaacactaggcttcaatatgcttagtggtgtcaaatgagctatttactttattgtccccagctagttttacctgtagaaaatgcatgtaaattatgcctgtaggggcagccgcagtctaatttgacttcgctgatggatagttcgatttgtgtcatgatatgccatacgcctagctcacgttaactcctagtattcagttgtttggtcgaggaaaagagtctgtggttaagtgtaattgtgtagtttatcttcaaacagtcggcatatcgtatctatgggacgatttgaggaacagtgttgtcagtacactccaattgatatacaataaaatgcaaatgtttgtttacag

SEQ ID NO: 48553 - DNA, 1432 bp, Zea Mays
ttaaacttcatttgaaattctttcacgcttgcgttgcacgtgtctctctgtggcctggcatcgtggcgcgtggctggtgtcgtcgttcacgccgctcaccacgagccttgcttcttcacgtcacctcctcctcacacattttccctctcacctctcaatccatggacaccctccctgctctgatcccccccgatgctcgctgtgggtgccgtttgctgccccaacgccgttccgcgccccctccactccggccatgagctcctcccagtgaatccctctagtcccctgctcatctcccatggtggccgcagggagctctggatccatggccgtcggcctctgggcgtgagcagcccttggctctctcccctgcgacagacttcctccacggtgtctttttccccaaccatggtggccggctccctgctcctccattcggtgcccctggttcagggccggtcgacctccggcgacctcctccccatggcacagcaggccgacgcccctgcctctactccatcttccccattggacagcacgagctcctcctcgccgatacgccagcaaccctgcagcagcgccactcgatctcctctatacgtgaacaacagcaacccggatcccatccacgtcgtatgcgtcgatccgatctgtgcagtcccaacccacgacgtcgcaacacccttgccctccgtcgatgtcacgcttcgctcatcgctcctcgacgaagagccgtaaccgtggtagacatgcatgtgcgatccgaactgatttcaccaggtacgctagctgaaaatcgtgctaagcgaagggtgtggatcaaaacaacccacaagacgatgtcggccaatgagcctgaagatggatggactaagcggatgtcaaaacgaaagttgatcatcaagtggcattcatctaacaacactaacatagtgtttatcccaggcaagccccggtgcatttgccaccttcttgctgttttaaaaatattttatcacttatatgctgcattaggtggtaggagttgaatggttaaacctttgctgcataacttccttgaattattgattatcatccttgatacctgatttgaaaagctagatatgcttagcctgcttatagacaaggaacaaaatattttgatgtatgaatcatgtttttacaaggaaaaaggggctggaatgatgaaggtatcaaaggccttgatgacttcatcatttcagtagggtacctctgacaggtaccaggttttcagaattattttaatatgagaccagacgttgagcaggaaaggtcgcccgtctgtgtcgattaaggaccgcaccgaaagtaggcttgctgatctaggaccctttaactggccacatgcctcgtcatgggtaagcttagcctcggtcggaccaataccagaacagctcgcacgcactgggag

SEQ ID NO: 48554 - DNA, 1159 bp, Zea Mays
cgtattattacctcacaagtagcaatacaggttttactttcagggtacgagtacagctgttaccgcaatactaactctactcctaaacgcggcccaattcaaaagtacacagatcaggacaaagcgatggtagttgacaaactattcggcaaacagagttcatccaggcctcacaggccctctgctcttgaaggatccaatctgatttcaagctcactttattatgtgatatatacagactcatggaataaaagcaaactccatacttatgactggtataagatagtctagcactagtctaaaacctaacctgaccacaataatctaagatgccagtttaggagctggcagacaaaactcatactactatgggcttgacatagataagctatacactaaagatgaaagcgatgcactttttggatcttcagagaagcttgttctgtgccaccgcttcgcaaagctcctcctcgtaccgtaaaactctgggcgatgaagcagctttacacgcatgtcttggcagccacggtggcacccagcgtcggagacgcttcgaaggaaaaggtgtcgaagactccgggaagagaacagccgtgattggcttcacgtcgaccagcttgaggcgtgaaaggcgagcagcgtgttttggagccctcggtgtccttggggtggaaacgtgcacgtccttgccgttgattctaatgggcacgcaatgttattggatgaaattagtgttaccaaatcagcactatctgttgagaagataaaaatgcagctataccttaagaaaggccaatgctccgttggaagaggggttctattcaggagcaactcctgtctgcttctgtctggagtagtgtagttgaaatgaaactccctggcaagttgaacctagttcgatttaccgttaaaggtgagcttgaaaatagaaataaaagggaggaatacataagttgactaatggaaatgcaaaataaacatgtagaatgtcaagaatgcaaattaagtgaataaataaatagtcgggcatgcaaaaatagtgacagaattgacaagaatgtaatgactcgctagttcataatcccaaggtgggaaactactaattgaagacgcaacatttttttgcatctatgcactacgtcatttaataatggaatag

SEQ ID NO: 48555 - DNA, 363 bp, Zea Mays
atggcatatagctggttcagcccacatggctcaaaccttgatggcatcaatagtatatcagcccctgctgtcatccgatgagccaaccggacagagaacccaacccagccccggaccctgtcataatgctggctctcaagcctcctcaatgtatcttcaaggtcttgtcttccagtacccaacataattaattgtacatcctgaccagcaatccacggcattgcctctgctatcagatctacacctttttgatggtccagccgtccaataaaagcaatgaccggaacatcgccacgaacagggagtccaagctctttctgtagtgcttccttgcactgtgctttaccagtctgaacggtttct

SEQ ID NO: 48556 - DNA, 124 bp, Zea Mays
cggtgctactactactaggcaccggcgtagtgcaggctacttcgctgctgatccggaggtgtggtgggatggggacgcggagaagaaggtgctcttttactcttctctctcctcgcgagccgcg

SEQ ID NO: 48557 - DNA, 2835 bp, Zea Mays
cttaaaatcaatggtatcatattcatctagtgtggtaagttcaaatcgatgaaaccatcattttgtgcctccatgtttaaatcaaatcttattaaaaaaaagctaagaaccgatgacatactaaacagataactgcatgcacaggaactgaagaaagaagccctgctggaaggctagaaaaagctcacgctcgagaccttgatgccggcttgccgtgcgtttaaataggctaagataaaaacaacctgtgtttaaaaaataggctaagacgaagacagacacgacgggaaccgaaaaaagagcaacataggcacgaatgaaaaaaattaaaggctactttaaacgcctcattttccaaaggatttctatttttaagaaaaaataatttaattttacttaaaaaagagaaatcatttgaaaaaaataaagtttctaaactagtcctaaaataaaaaaaagcgccgcacaaatggccagcgcccatccacaatcgctagaacgcgcgcaatggaaaaaaagcttgaaaaaacgctgaacccgggaatagaaaacattgaagccttgaagggcaaacatagaagaatagatagattcaaaataatcatacctggtatgctaaatcgaaacaggagggagtctgtagtagtccagttcacaagtagcggcagctagctgctgttggctgttgcccttctccgaaagaaaactactcgagctgaggcggagtagccaaggagaagtcaatgccgttctagcagtccagctttcacatggagcaggtcaaacaccttattacgcttgacgctttgcagcagcgatctcgatctgtggaggattgcatcaacctgacaatctctcgagttcttcacctcctctctcccaacggcatccattcagcccttggatgaccaggcatggccgtgggaggcccctcctggcccaatttgcagtgcctggtgcggcggaagccggcgaccgctggctgggccgaagacgctgacaggggaggtgtccagcgcctcgccaagacgctatctattccccacctcgtcgccatcggtgtcggctcgacgattggcgccggcatctatgtcctggttggaaccgtggctcgtgagcacaccgggccgggactgacgctctcctttctgatagccggcgtcgccgcggctctttcagcattgtgctatgccgagctctcctgccgtttcccttcggcagggagtgcctatcactactcctacatctgcattggggagagtgttgcttggctgattgggtgggccttgatccttgagtacaccattggggggtcatcagtggcacgtggcatgtcaccaaacttggctctatttttcggtggccaagataagttgccattctttctagcacaggtgcatgtcaaaggcctcgacaccccagttgatccatgtgctgctattcttgtcctgatagttactgcattactctgtctgggaattaaagagagctcatctgtggaaggcatcatcaccactgcaaatatcatagtgatgctctttgtcatctgcgctggtggatggctaggattcaggaatggctgggttggttataaagtgccagaaggttatttccctaatggtatcagcggagttctctctggatcagcaaccctcttcttcgcattcattggcttcgacacagttgctagtacggccgaggaggtgaagaatcctcgacgcgatcttccattgggtatgggcctgaccttatccctgtgttgcttcctatatatgatggtttctgctgttgtggtcggtttggtgccgtaccacgcgatggatccggacacccctatttcttctgtgtttgcgcgatatgggatgcagtgggccgagtatgttgtttccagtggagctgttcttgctcttgtggcatccttgataggtggtattcttccccagcgatccaagcaagatgacgtgagaggcggtggccgcaaccacaagcggagaggagctcgacggggcgcgccgcagggagatctctgggcgaggagaggacctcgacgaggcgttggcgtctcggtggccatgaagccgtggaggtctctgggagctggcggcagggcgacgaggagctggcggctgggtggaatcgcgacgaggagctggtgaaggagcggcctagcggcggtgtggactggcggcgaggagctagtggtggagcctggcagtggggcggccgacgacgatgaaatggggatggggatcgatttctaggaacatagaagatggggatgttcgttgtgggctccacctgtagcaacaaacgtgggcccatgctgtcaggcacgttaactgtgatggagacggtgtgcgagtgtttctctgagcaaaggaacgggtccgtgggcaaaactaagcaagaagaaaaactaagggtagagttgagtaacaaggcacaactaagggcaccaatgtaaaaaaacccaaaagaaatcgataatcaccatcacaagcaatcttgtgtcacataatctcaccaaacacattgaaattgatctgttcaccgtaaggtgaatagtgtggcatcaagactagaaggtatagtctagtaacaattgccgaaaaatggtggtgaatcaatatgtaacaaggcatgcatgattggtatatttgcctatcttgagggtgtgttttgttgtaatatgtaaaaacattaggtacttcctggcaaattcagttaactactttgcatcaaaaaaattcagttaactacatagtggaatggtgagagaaggacagaaggttacccatcagttttcccaaacaaactaacagaaacaaagacaca

SEQ ID NO: 48558 - DNA, 804 bp, Zea Mays
tgctgttgcttccctcccgaacggtccttcagggcgggtgtgccctttcacgggcaagaagacgaaccgggcgaacaaggtgtccttctccaaccacaagacgaagaagcagcagttcgtgaacctgcagtacaagaagctgtggtgggaggctggcaagcgcttcgtcaagctgcgcctctccaccaaggcgctcaagaccatcgagaagcacggtctcgatgctgtcgcgcgcaaggccggcatcgacctcaacaagaagtgagaacagccaaactatggtgtggtggcacactggcatcgaccccagtttgatttgtgtaccataccaatcagtgtaggcagatcgaggttgcacatgctgtgggtctgtttagttcagcttttttctgaccaacttttctgaaaatctggatacgaggagaatctagctgtggggagaacctgagtatcattacgattacgtgtgaagaaggataaagttgttcatagggctcaagatctagaaattgacggattcctactattacaacaactcaaccgattatgtatttatattgattttggatggtttttgtcccaacgaattttatagaagctagctgaaaagctgagcgtttggcagtccgcagcagtttttggtggccagaagctgccagaagccgaaacaaacagggcctatatgtttttggtctcgtgttgcgagctaagtgtgtgtttggtctgaggaattaagttatctgtcttcttgtttcttatttttatttagtttatagaatatttgatttaatccatcaccacctc

SEQ ID NO: 48559 - DNA, 393 bp, Zea Mays
caaatggattcaccaaatggattgaagtgaaggtcttagccataataactttagcaatgatccataagttcttctagtaaaatatcatgtgttactttggagtatccaaagctttaacattgacaatggcatccagattgactctaaaatatttatactgtttttgtggctaagtgggaacaattgtacactttgcatatatataaggcacctgagtctaacggtctggtggaaagagcaaacaaaatcattctacttagcatcttcaaatccttgatcagtttgtcaaaggaaaatttggtaaaagaactgacaaaggttgtgtggagtcacaacactatagtctcctaatccattgagttcacaccgttcaaacttcttttcagtgatgaa

SEQ ID NO: 48560 - DNA, 1296 bp, Zea Mays
cagaacttcgtcctcagctaaatcagcagcttgttgaggttcatcgctcaaccccgtcgcaaccgcaacgtccatctccccgtcctcgctgcccggaggcctggcacacctcccagtagcagcggcctcccgaagcattgtttcaagtggttattaggcttcatggatatgtctcaagagcaagaacaggattttggcgtactgctgaagcaaggtgcagaagggagggtatttgcttcgacatttgtgggacgaaagtgtgtaatcaaagagcgtttttcaaaaaagtaccgacacccattgttggactcgaagttgactctaaagcgcttaaatgctgaagctcggtgcatgacaaaagcaagaaggcttggtgttcctaccccagtactttatgctgtggatccagttctgcatactttgacctttgagcatgtggatggcttgtctgtcaaggatatacttcttaggtttggttcagatggggtcaatgaggaacgcctgaatgatattgccacacaaataggaaatgccattggcaaactacatgatggaggccttgttcatggtgattttgaccacgtcaaacatgataattaagaacagtaacaatcaattggttcttattgattttgggctgagtttcacttcgacaattcccgaggacaaagcggtggacctatatgtgctagagagagctttgatttccatgcattcgtcctgtggggatgtgatggagaaaatcctggctgcgtacagaaaggcttcgaagcaatggtgctccacccagaacaagctggctcaagtgaggcaacggggcaggaagcgcaccatggtcggatgaatggagaagaagaaaaatatgtggcatggaatggatgtatgttattagaaagaccgtcgtctaaaacgagagtgatgtaccaccattgctgtatttttttagcggtgagtggctttggctgctgtaacgtttgtgaaatctggaaatatgttgcctggctgcaccatttggtcagaactcagaagcagagtgtcgtttcatccggaagtgggagaagttttattcgtttctcatgcatgataactggaagacatggttggggtatggcttgcttgtttgtgccctccattgacatgatcatcatggcaaatgtgttgccagtgttgtgggtgagggtggacccctaccgcacggtggagtgggtggagtggcgataggtcaaagaaacgacaggctgcttctgagatgagtatcttgcatccctagggtttattttaagttgtattgcctct

SEQ ID NO: 48561 - DNA, 775 bp, Zea Mays
gccccttttcttttttttctcgaacacgcaggagatctgcgtatcattccattaatagatataagaaggtacaacacaacacacatgacacaacaagacacacaagacgcaacacagccaccacacacaaccactctgaacaagacacaagactatcccctgggtcaagcataaacacaagagttgaaagcaggttcaaccctttcgccccggcactacaccacatcctgagctcatcgccagcgagggtgagagtactcgctaggctcgacgacctcccattgaacacatagtcgttgcgatgacgccagaggctccaagcgccaagaataactagagaattgaagcctgattggagatcacggggaaccttctccacagcgctgctccaccagtcatcaaggctgcaagaagcattgtctggtgaaagattaggcaacccagacctgcgcaacaagaagtaccagaactgtcttgcaaagacgcaaaagatgagaagatgttgtattgtttccccttcttggtcgcaaaggggacacgcactggggtggggtagtcctcttttagtaagacagtctgcggtccagcatctgttgtgcatgacaagccaaaggaagaaactgcactttgaagatgtccaagactcccaaacgcgctcaaatgctccaagacccctttcttaatgccatgccccctttcttaatgccatgcaacaccattatattgtaagtgttggctgaagcatttctgcatttgttgtaataaacagagcaac

SEQ ID NO: 48562 - DNA, 2391 bp, Zea Mays
aaaaaggcccaaactcgaaagcatccccttctggccttctcaccacgaacacgcgggacacctcggaagcaaccggctcccagatctgccgaagaaccctaccacccaacgttctagaacttcccctctttccccgcatggacggcctcgtggcgccgtcgccatcccactccggcgccacctccggcggcggggcctcccaccgcaagcggaagctcccgccgtcgtcgctctccgacgccaccggcgacgaggacgacgacaccaccgctccgtcatccccctccacggccccatcctcgccctctcgcccgtcatctccatcttcttcgcactccgacgatgacgacgacgactcgctccacacgttcaatgccgcgcgcctcgacggcgcgccgagtgggggctctgcgtccggccgtcctcctaagccggattcctcatcagtgtctgctgctgcggcggcagccgcggctgcggtgggtggaggacctaagccggagcccggctcggcgaacgccggcgacgggaaggaggacacaaaggggctgttcacggacaacctccagaccagcggcgcgtacagcgcccgtgaggagggcctcaagcgcgaggaagattcaggaaggctgaagtttctctgttattctaatgacggcgttgatgaacacatgatatggttggtagggttgaagaatatcttcgcccgacagcttcctaatatgcccaaagaatatattgtacgccttgtcatggatagaactcacaagtcaatgatggttatcaggaacaatattgtcgtggggggcattacttatcgcccttatgcaaggtaatgctgccactttagttacaatttgttatgttgacattgtatatttgttgtgcttaatggccaattcaatatattctatatgtgctctttctgtgtgaggatccaatatttttttgcaactgaaagcaaatgtctcccaactgacaccactcacttatgagaaaatgttggccaatcaagatattgcgtcgtaactttgtacttattcaggaaatctattattttgatgataattaaaagctggcaagttagaatgtaggttgcaaacatttgcatgcttttgtttatcctgcaatatctctctattatgctattttttcttttggaaatcatagccagagatttggagaaatagcgttttgtgctatcacagctgatgagcaagttaaaggctatggaacaagattaatgaatcatttgaaacaacatgcacgggatgctgatgggctcacacatttcttaacctatgctgataacaatgctgttggctattttgtaaagcagggtttcacaaaggagatcacattggacaaagaaagatggcaagggtacattaaagattatgacggaggaatattgatggagtgtaaaattgacccaaagctgccatatgttgatgtggcaacaatgattcgacgtcaaaggcaggccattgatgagaagatcagagagctttctaactgccatattgtttattcaggaattgattttcaaaagaaagaagctggcattccaagaagactgataaagccagaagatatccctggtctcagggaagctgggtggacgcctgatcaattggggcattctaaatcacgatcatcattctccccggactataatacttacaggcaacagcttactacccttatgcagacagcgctgaagaatctgaatgaacatcctgatgcttggccattcaaagagcctgtggattcacgggatgttccagactattatgatatcatcaaagatcctattgatttaagaacaatgttaagaagagtcgactcggaacaatattatgtgaccctagagatgtttgtagccgacatgaagagaatgttcagcaatgcaagaacttacaattctccagatactatctattacaaatgtgcgacacggcttgaaaacttcttctcgggcagaattactgtactgcttgcacaactctcaaccaagagctaggctggcgtgggctcactggactgggcactactgtcgcatgttgtaaaattattattggctcactggactggacactactgtcgcatgttgtaaaattattaagttgtattgatatagttgtcaccttgctgaatgttcggcacggtgatgaacttttagtttagcattattttaaccaggagggacactgattgatctttacatttcggtctcaacctggccggcctaataatatagattgaggagattcttcagtttctagcacctatgggtaaagatgttttgcatccttaaatctctatctcactcaatctagactcaagtgttgagaaaaaaaacgcaaaaaaaaaaaaaaaaactaaactaaa

SEQ ID NO: 48563 - DNA, 1960 bp, Zea Mays
ctcgaaagcatccccttctggccttctcaccacgaacacgcgggacacctcggaagcaaccggctcccagatctgccgaagaaccctaccacccaacgttctagaacttcccctctttccccgcatggacggcctcgtggcgccgtcgccatcccactccggcgccacctccggcggcggggcctcccaccgcaagcggaagctcccgccgtcgtcgctctccgacgccaccggcgacgaggacgacgacaccaccgctccgtcatccccctccacggccccatcctcgccctctcgcccgtcatctccatcttcttcgcactccgacgatgacgacgacgactcgctccacacgttcaatgccgcgcgcctcgacggcgcgccgagtgggggctctgcgtccggccgtcctcctaagccggattcctcatcagtgtctgctgctgcggcggcagccgcggctgcggtgggtggaggacctaagccggagcccggctcggcgaacgccggcgacgggaaggaggacacaaaggggctgttcacggacaacctccagaccagcggcgcgtacagcgcccgtgaggagggcctcaagcgcgaggaagattcaggaaggctgaagtttctctgttattctaatgacggcgttgatgaacacatgatatggttggtagggttgaagaatatcttcgcccgacagcttcctaatatgcccaaagaatatattgtacgccttgtcatggatagaactcacaagtcaatgatggttatcaggaacaatattgtcgtggggggcattacttatcgcccttatgcaagagatttggagaaatagcgttttgtgctatcacagctgatgagcaagttaaaggctatggaacaagattaatgaatcatttgaaacaacatgcacgggatgctgatgggctcacacatttcttaacctatgctgataacaatgctgttggctattttgtaaagcagggtttcacaaaggagatcacattggacaaagaaagatggcaagggtacattaaagattatgacggaggaatattgatggagtgtaaaattgacccaaagctgccatatgttgatgtggcaacaatgattcgacgtcaaaggcaggccattgatgagaagatcagagagctttctaactgccatattgtttattcaggaattgattttcaaaagaaagaagctggcattccaagaagactgataaagccagaagatatccctggtctcagggaagctgggtggacgcctgatcaattggggcattctaaatcacgatcatcattctccccggactataatacttacaggcaacagcttactacccttatgcagacagcgctgaagaatctgaatgaacatcctgatgcttggccattcaaagagcctgtggattcacgggatgttccagactattatgatatcatcaaagatcctattgatttaagaacaatgttaagaagagtcgactcggaacaatattatgtgaccctagagatgtttgtagccgacatgaagagaatgttcagcaatgcaagaacttacaattctccagatactatctattacaaatgtgcgacacggcttgaaaacttcttctcgggcagaattactgtactgcttgcacaactctcaaccaagagctaggctggcgtgggctcactggactgggcactactgtcgcatgttgtaaaattattattggctcactggactggacactactgtcgcatgttgtaaaattattaagttgtattgatatagttgtcaccttgctgaatgttcggcacggtgatgaacttttagtttagcattattttaaccaggagggacactgattgatctttacatttcggtctcaacctggccggcctaataatatagattgaggagattcttcaaaaaaaaacgcaaaaaaaaaaaaaaaaactaaactaaa

SEQ ID NO: 48564 - DNA, 1677 bp, Zea Mays
cgaaagcatccccttctggccttctcaccacgaacacgcgggacacctcggaagcaaccggctcccagatctgccgaagaaccctaccacccaacgttctagaacttcccctctttccccgcatggacggcctcgtggcgccgtcgccatcccactccggcgccacctccggcggcggggcctcccaccgcaagcggaagctcccgccgtcgtcgctctccgacgccaccggcgacgaggacgacgacaccaccgctccgtcatccccctccacggccccatcctcgccctctcgcccgtcatctccatcttcttcgcactccgacgatgacgacgacgactcgctccacacgttcaatgccgcgcgcctcgacggcgcgccgagtgggggctctgcgtccggccgtcctcctaagccggattcctcatcagtgtctgctgctgcggcggcagccgcggctgcggtgggtggaggacctaagccggagcccggctcggcgaacgccggcgacgggaaggaggacacaaaggggctgttcacggacaacctccagaccagcggcgcgtacagcgcccgtgaggagggcctcaagcgcgaggaagattcaggaaggctgaagtttctctgttattctaatgacggcgttgatgaacacatgatatggttggtagggttgaagaatatcttcgcccgacagcttcctaatatgcccaaagaatatattgtacgccttgtcatggatagaactcacaagtcaatgatggttatcaggaacaatattgtcgtggggggcattacttatcgcccttatgcaagccagagatttggagaaatagcgttttgtgctatcacagctgatgagcaagttaaaggctatggaacaagattaatgaatcatttgaaacaacatgcacgggatgctgatgggctcacacatttcttaacctatgctgataacaatgctgttggctattttgtaaagcagggtttcacaaaggagatcacattggacaaagaaagatggcaagggtacattaaagattatgacggaggaatattgatggagtgtaaaattgacccaaagctgccatatgttgatgtggcaacaatgattcgacgtcaaaggcaggccattgatgagaagatcagagagctttctaactgccatattgtttattcaggaattgattttcaaaagaaagaagctggcattccaagaagactgataaagccagaagatatccctggtctcagggaagctgggtggacgcctgatcaattggggcattctaaatcacgatcatcattctccccggactataatacttacaggcaacagcttactacccttatgcagacagcgctgaagaatctgaatgaacatcctgatgcttggccattcaaagagcctgtggattcacgggatgttccagactattatgatatcatcaaagatcctattgatttaagaacaatgttaagaagagtcgactcggaacaatattatgtgaccctagagatgtttgtagccgacatgaagagaatgttcagcaatgcaagaacttacaattctccagatactatctattacaaatgtgcgacacggttgtccacgagcgccgccgccgtgtccggatgctcttcccagcaccttcggcgcgtaccaaatcaagggt

SEQ ID NO: 48565 - DNA, 2032 bp, Zea Mays
aaagcatccccttctggccttctcaccacgaacacgcgggacacctcggaagcaaccggctcccagatctgccgaagaaccctaccacccaacgttctagaacttcccctctttccccgcatggacggcctcgtggcgccgtcgccatcccactccggcgccacctccggcggcggggcctcccaccgcaagcggaagctcccgccgtcgtcgctctccgacgccaccggcgacgaggacgacgacaccaccgctccgtcatccccctccacggccccatcctcgccctctcgcccgtcatctccatcttcttcgcactccgacgatgacgacgacgactcgctccacacgttcaatgccgcgcgcctcgacggcgcgccgagtgggggctctgcgtccggccgtcctcctaagccggattcctcatcagtgtctgctgctgcggcggcagccgcggctgcggtgggtggaggacctaagccggagcccggctcggcgaacgccggcgacgggaaggaggacacaaaggggctgttcacggacaacctccagaccagcggcgcgtacagcgcccgtgaggagggcctcaagcgcgagattcaggaaggctgaagtttctctgttattctaatgacggcgttgatgaacacatgatatggttggtagggttgaagaatatcttcgcccgacagcttcctaatatgcccaaagaatatattgtacgccttgtcatggatagaactcacaagtcaatgatggttatcaggaacaatattgtcgtggggggcattacttatcgcccttatgcaagccagagatttggagaaatagcgttttgtgctatcacagctgatgagcaagttaaaggctatggaacaagattaatgaatcatttgaaacaacatgcacgggatgctgatgggctcacacatttcttaacctatgctgataacaatgctgttggctattttgtaaagcagggtttcacaaaggagatcacattggacaaagaaagatggcaagggtacattaaagattatgacggaggaatattgatggagtgtaaaattgacccaaagctgccatatgttgatgtggcaacaatgattcgacgtcaaaggcaggccattgatgagaagatcagagagctttctaactgccatattgtttattcaggaattgattttcaaaagaaagaagctggcattccaagaagactgataaagccagaagatatccctggtctcagggaagctgggtggacgcctgatcaattggggcattctaaatcacgatcatcattctccccggactataatacttacaggcaacagcttactacccttatgcagacagcgctgaagaatctgaatgaacatcctgatgcttggccattcaaagagcctgtggattcacgggatgttccagactattatgatatcatcaaagatcctattgatttaagaacaatgttaagaagagtcgactcggaacaatattatgtgaccctagagatgtttgtagccgacatgaagagaatgttcagcaatgcaagaacttacaattctccagatactatctattacaaatgtgcgacacggcttgaaaacttcttctcgggcagaattactgtactgcttgcacaactctcaaccaagagctaggctggcgtgggctcactggactgggcactactgtcgcatgttgtaaaattattattggctcactggactggacactactgtcgcatgttgtaaaattattaagttgtattgatatagttgtcaccttgctgaatgttcggcacggtgatgaacttttagtttagcattattttaaccaggagggacactgattgatctttacatttcggtctcaacctggccggcctaataatatagattgaggagattcttcagtttctagcacctatgggtaaagatgttttgcatccttaaatctctatctcactcaatctagactcaagtgttgagaaaaaaaacgcaaaaaaaaaaaaaaaaactaaactaaa

SEQ ID NO: 48566 - DNA, 891 bp, Zea Mays
ccttgaccctgtgcagcgctccccgccctcaagatgagcacatcctcaaatgaaagaagctggcattccaagaagactgataaagccagaagatatccctggtctcagggaagctgggtggacgcctgatcaattggggcattctaaatcacgatcatcattctccccggactataatacttacaggcaacagcttactacccttatgcagacagcgctgaagaatctgaatgaacatcctgatgcttggccattcaaagagcctgtggattcacgggatgttccagactattatgatatcatcaaagatcctattgatttaagaacaatgttaagaagagtcgactcggaacaatattatgtgaccctagagatgtttgtagccgacatgaagagaatgttcagcaatgcaagaacttacaattctccagatactatctattacaaatgtgcgacacggcttgaaaacttcttctcgggcagaattactgtactgcttgcacaactctcaaccaagagctaggctggcgtgggctcactggactgggcactactgtcgcatgttgtaaaattattattggctcactggactggacactactgtcgcatgttgtaaaattattaagttgtattgatatagttgtcaccttgctgaatgttcggcacggtgatgaacttttagtttagcattattttaaccaggagggacactgattgatctttacatttcggtctcaacctggccggcctaataatatagattgaggagattcttcagtttctagcacctatgggtaaagatgttttgcatccttaaatctctatctcactcaatctagactcaagtgttgagaaaaaaaacgcaaaaaaaaaaaaaaaaactaaactaaa

SEQ ID NO: 48567 - DNA, 2801 bp, Zea Mays
cacatgcaaagccgctaaaatccatttggaaccgatgacacagagaaacggacatcccctctactagttttctctctctgccgccgtccgccggcctcgcgcaccccgtccccgccggcaatcgatcccacttgtcccaggacgcctccgccggccgtcaatcgtgcccctccccagaactcgcactgctctccgtcagttcagttaaaacatgactgctcagacaaagaagagaggcgctacagaaaatggggatggtgttggtttgggtcttgctgccttcattgcaaacaatgaggatgtgggtcccgtagtccggcacgctttcgagtctgggaagcctgaagccctcttgcacagcctccagaacatcgtgaagaataaagaggttgagatcgaagagatttgtagactccactatgaggaattcatccttgctgttgatgagcttcgtggtgtcctggttgatgctgatgagcttaagggcacattatctgatgagaacctgcggttgcaagaggttgctagcgctttgctactgaagcttgatgagctttttgagatttattctgtaaacagtaacgttggggaagccctagctacgttgaagatttgtctgcaagtaaccaacctctgcaaggtatgcaacagggacattaccgaagcaaaattactttctgcattgaaaacattggagttgattgagaaggactacctgcaaaatattccactgaagcttctgaaaaaggtcattcataaacaagttcctatggtaaagctgtacattgagaagaaagtttgtagtgagtttaatgagtggcttgtgtatatcagaaggactgctaaggatattgggcaggtcgcaataaaccagacatctctgactcataagaaagatcagggaatttgtgcccgacaaagggaagcagaagaatctagcctcgttgggttcgacgtgaatgcttacaccttggatgtggagcacatggctgaggaagcaatgctggaatttgatcttgtgccagtgtacagggcacaccatattcacataggccttggtcttggggagaagtttcgagaatattactacaataacaggctcatgcaactcaatttggacttgcaaatttctacatcacaacccttcgttgagtcctatcaacctttcattgctcaggtagctggcttttttattgttgaggaccgtgtctttcgaactgcagatggacttctatctgagagccaggttgatactatgcttgaaacagccatttctaaacttactctgatcttagaggaacagttctctcgcattcatgctgccaaccacctcctcctcataaaaggttatgtcagcctttttggtgcaaccctgaagaagtatgggtaccgatccatgtcgctggctgaaatccttgataaaactagggacaagtatcttgaacttcttctttctgactgccggaagcagctcaacgaggccttctctagggactcatatgagaggatggttataaagaaacaaaatgaatacgacgcaaacatagcggcattccaacttgaccccattgatggagtatcaaatttgccatacgtcgctccattttcctcctctgttcccaatgcttgtcgtattgtgcgttctttcatcgaggagttggtcagctacttgtcactcagtggtggcgtaaacgtctatgatgtggtgaaaagctacttggacaagttcttgattgagacgttgaatgatggttttctgaagctgatacatggtggatccctggaatttccacaggtggtgcagatcgcaggaaatatcgccgttctcgagcagtcctgtgacatgttcctttggcacgccgctcgactttgtggtgtcttccgggcagcaggccgtgccaagggacgcgctgttcaaggttgtatctggcgcgctgagccacatctcggactctatgacgacggtccttctcagtgaccgggtgaaaaggttcaacgcgaacgccgttgctagcatcgacgtcgatctgagggcgctggaggggttcgctgacgacacgtaccgcacggccgggtttctggacctgagaaagggaaccagtttcagagagtgtctagccgaagtaaggcagctcacaaaccttctgctgagcagccagcctgagagcttcgcgaaccctgcaaccagggagcagagctacggagccttagaccacaagaaggtggcgataatttgtgacaagttcaaggatgcccccgacagcctgttcgggagcctctcaggccggggcacggtgcagagcgcccggaagaagtccctggatgtgctgaagagaaggctaaaggattttagctagctggtgagctagatcatttagacaagctagtagcatagtacccctgttttagtgccagtcgtatccatttaaaatttcttttccgtctttctttattccctctttaatcgacttcccgtttcatgcgccgaagagaaggctgaaggattttagctggggtttgctggtgagctagatcgttaaataagctagtgctctgtttagggaagaagacaagtggttcggtgtgtaaagccatttcaaatttctttccatccttatttttactcccttaatttgcttcctacacatcatggaagaagctgtaggttttgacatcgagcgcgaaggcacctacgaccgagaacaagacggcgacagcggcgctgagcgacttcacagcgcccgaattttttgtattttagcctttaaacagaagtaaattcacgtttagacctaaaaaaa

SEQ ID NO: 48568 - DNA, 1837 bp, Zea Mays
ctgtcacctaaaatctaggatatattattcccccaaaacaaacactaaccggccggcccaattctcacgcgctcgccgcctaggagcattcacgttggtggcgggcggtggctcggttcctctcctccaccgcacctccaagaatccacctccacgactaagctgacggctcggcggcgccatggcggttcaccggctccaaccttccctctctggcctacagtgctccaccgcccggtcgccagtgctcctccatgggccacggctgacgggtgcacgcaccgatggttggtgcaggcaggagaggtggatttggtggacctagattcgatgtgcagagagcgacttggaggttatttttccagcacttgacattcgagtgaaaaatgtcgcagggacatattctcttgaacataaaggagaaaattatctcttcgcacatcagacaaggcttctactctttcagaagaaagtcattttcaagagaatcttgaacaaaatgaccagatgtttaggcctggttggaaggacatttttcgaatgaatcagagtgagctcgaggctgagattcgaaaaggtctctcgagattctactcttgatccaaggaggaaggcctatctgatccaaaatctcatgaccagccgttggatagctgctcagcagaaatcaccacaaccaagcgtcgaaggacataatggatgtacacgacgacctggatgtgttccttcgtaccgagacccagggaaacaaatatttggctgtgagcattacaaaagaaactgcaagcttgttgctgcatgctgcaataagctattcacttgcatattctgtcacgataaagttagtgaccatacaatggacaggtatcttcaccacaaccattcattttaccgtccacacctttcctgctgagggatgctttcaaggatttcattttaacatcgaaccaatatcaattaagcatggcattttatttggaaatagatgtttgtggtggtgccatggacctgtgcgtcccttgtgaaatgaattgattttttgtcattgaattttctaactgaagctttttcattcgtttgattcacttgagctcccttaagttgtattgtattatttaatcataaatgccatccttcctcttatagttatataatcaaatattagttttaatcctatctgcatggtttacaatgtattgggttgtgtcattgtgtgaagaatgtttggtggttagtctgaccacatgtgttagctgaatatgagtgccgagcagtagcatgcatataagttccactgcattcaatatttacatttttttcttatttccaggtaactcaagaggtccacttattgactcttatgaccatgtaattggtgttaatacaactacattaacacgtaaaggttggtagatctggaaggtcttgatggtctaatacctgtctatgagtacgaaagaaaaggcgggagaagtcggtctctgcagcatcgcgcgtgaaaaaaaatcagccaattccatgagcattgatgttgtcatgacttcaaggagagaccatgctaagaataatgcattatgacatttgtcaggcttacatatcgattgtttgatatggatagatgtataggtttatgaccaatccagttcaaagcaatttgagtacaaaagaaataaggagcaggaaagctctgtacatcttgcattttgctgtttttttgtcgaagtttcaatgtctgtcgcgtgacaaaatatagttgtaatttatattttggcatgcacgaaacatgtgtatttattcatttttgaacgaaattttacgtcaaatcctctattgcgtt

SEQ ID NO: 48569 - DNA, 1473 bp, Zea Mays
ctgtcacctaaaatctaggatatattattcccccaaaacaaacactaaccggccggcccaattctcacgcgctcgccgcctaggagcattcacgttggtggcgggcggtggctcggttcctctcctccaccgcacctccaagaatccacctccacgactaagctgacggctcggcggcgccatggcggttcaccggctccaaccttccctctctggcctacagtgctccaccgcccggtcgccagtgctcctccatgggccacggctgacgggtgcacgcaccgatggttggtgcaggcaggagaggtggatttggtggacctagattcgatgtgcagagagcgacttggaggtggctgacatcttcaagcactgcaacatgcagttacaactactgttggccatacagggaaatgctgggcctattataccaattgttcaaagcatggaccttgttatttttccagcacttgacattcgagtgaaaaatgtcgcagggacatattctcttgaacataaaggagaaaattatctcttcgcacatcagacaaggcttctactctttcagaagaaagtcattttcaagagaatcttgaacaaaatgaccagatgtttaggcctggttggaaggacatttttcgaatgaatcagagtgagctcgaggctgagattcgaaaaggtctctcgagattctactcttgatccaaggaggaaggcctatctgatccaaaatctcatgaccagccgttggatagctgctcagcagaaatcaccacaaccaagcgtcgaaggacataatggatgtacacgacgacctggatgtgttccttcgtaccgagacccagggaaacaaatatttggctgtgagcattacaaaagaaactgcaagcttgttgctgcatgctgcaataagctattcacttgcatattctgtcacgataaagttagtgaccatacaatggacaggtaactcaagaggtccacttattgactcttatgaccatgtaattggtgttaatacaactacattaacacgtaaaggttggtagatctggaaggtcttgatggtctaatacctgtctatgagtacgaaagaaaaggcgggagaagtcggtctctgcagcatcgcgcgtgaaaaaaaatcagccaattccatgagcattgatgttgtcatgacttcaaggagagaccatgctaagaataatgcattatgacatttgtcaggcttacatatcgattgtttgatatggatagatgtataggtttatgaccaatccagttcaaagcaatttgagtacaaaagaaataaggagcaggaaagctctgtacatcttgcattttgctgtttttttgtcgaagtttcaatgtctgtcgcgtgacaaaatatagttgtaatttatattttggcatgcacgaaacatgtgtatttattcatttttgaacgaaattttacgtcaaatcctctattgcgtt

SEQ ID NO: 48570 - DNA, 1460 bp, Zea Mays
ctgtcacctaaaatctaggatatattattcccccaaaacaaacactaaccggccggcccaattctcacgcgctcgccgcctaggagcattcacgttggtggcgggcggtggctcggttcctctcctccaccgcacctccaagaatccacctccacgactaagctgacggctcggcggcgccatggcggttcaccggctccaaccttccctctctggcctacagtgctccaccgcccggtcgccagtgctcctccatgggccacggctgacgggtgcacgcaccggcaggagaggtggatttggtggacctagattcgatgtgcagagagcgacttggaggtggctgacatcttcaagcactgcaacatgcagttacaactactgttggccatacagggaaatgctgggcctattataccaattgttcaaagcatggaccttgttatttttccagcacttgacattcgagtgaaaaatgtcgcagggacatattctcttgaacataaaggagaaaattatctcttcgcacatcagacaaggcttctactctttcagaagaaagtcattttcaagagaatcttgaacaaaatgaccagatgtttaggcctggttggaaggacatttttcgaatgaatcagagtgagctcgaggctgagattcgaaaaggtctctcgagattctactcttgatccaaggaggaaggcctatctgatccaaaatctcatgaccagccgttggatagctgctcagcagaaatcaccacaaccaagcgtcgaaggacataatggatgtacacgacgacctggatgtgttccttcgtaccgagacccagggaaacaaatatttggctgtgagcattacaaaagaaactgcaagcttgttgctgcatgctgcaataagctattcacttgcatattctgtcacgataaagttagtgaccatacaatggacaggtaactcaagaggtccacttattgactcttatgaccatgtaattggtgttaatacaactacattaacacgtaaaggttggtagatctggaaggtcttgatggtctaatacctgtctatgagtacgaaagaaaaggcgggagaagtcggtctctgcagcatcgcgcgtgaaaaaaaatcagccaattccatgagcattgatgttgtcatgacttcaaggagagaccatgctaagaataatgcattatgacatttgtcaggcttacatatcgattgtttgatatggatagatgtataggtttatgaccaatccagttcaaagcaatttgagtacaaaagaaataaggagcaggaaagctctgtacatcttgcattttgctgtttttttgtcgaagtttcaatgtctgtcgcgtgacaaaatatagttgtaatttatattttggcatgcacgaaacatgtgtatttattcatttttgaacgaaattttacgtcaaatcctctattgcgtt

SEQ ID NO: 48571 - DNA, 1672 bp, Zea Mays
ctgtcacctaaaatctaggatatattattcccccaaaacaaacactaaccggccggcccaattctcacgcgctcgccgcctaggagcattcacgttggtggcgggcggtggctcggttcctctcctccaccgcacctccaagaatccacctccacgactaagctgacggctcggcggcgccatggcggttcaccggctccaaccttccctctctggcctacagtgctccaccgcccggtcgccagtgctcctccatgggccacggctgacgggtgcacgcaccggtatgcatcccttgctgctctaattcccgacgctctagctcgtgtaccagatgtgcagactgtcgcctagccctgctccggcgtgaaggacttctgcttctgcccctgcgcatcccgcccttggtcgcgcacctcggcatgttcctcggcccgacggctactgtcttgaggcatacggtggccgcccacctcgtacccagtcaccagatctcaagttccacctcaaaatccagatcaagtgaatgccatgtttcatccttggtccaatcggttcttactggaatttgttggcaggcaacgagcacccaccaccggcaggagaggtggatttggtggacctagattcgatgtgcagagagcgacttggaggttatttttccagcacttgacattcgagtgaaaaatgtcgcagggacatattctcttgaacataaaggagaaaattatctcttcgcacatcagacaaggcttctactctttcagaagaaagtcattttcaagagaatcttgaacaaaatgaccagatgtttaggcctggttggaaggacatttttcgaatgaatcagagtgagctcgaggctgagattcgaaaaggtctctcgagattctactcttgatccaaggaggaaggcctatctgatccaaaatctcatgaccagccgttggatagctgctcagcagaaatcaccacaaccaagcgtcgaaggacataatggatgtacacgacgacctggatgtgttccttcgtaccgagacccagggaaacaaatatttggctgtgagcattacaaaagaaactgcaagcttgttgctgcatgctgcaataagctattcacttgcatattctgtcacgataaagttagtgaccatacaatggacaggtaactcaagaggtccacttattgactcttatgaccatgtaattggtgttaatacaactacattaacacgtaaaggttggtagatctggaaggtcttgatggtctaatacctgtctatgagtacgaaagaaaaggcgggagaagtcggtctctgcagcatcgcgcgtgaaaaaaaatcagccaattccatgagcattgatgttgtcatgacttcaaggagagaccatgctaagaataatgcattatgacatttgtcaggcttacatatcgattgtttgatatggatagatgtataggtttatgaccaatccagttcaaagcaatttgagtacaaaagaaataaggagcaggaaagctctgtacatcttgcattttgctgtttttttgtcgaagtttcaatgtctgtcgcgtgacaaaatatagttgtaatttatattttggcatgcacgaaacatgtgtatttattcatttttgaacgaaattttacgtcaaatcctctattgcgtt

SEQ ID NO: 48572 - DNA, 2071 bp, Zea Mays
ctgtcacctaaaatctaggatatattattcccccaaaacaaacactaaccggccggcccaattctcacgcgctcgccgcctaggagcattcacgttggtggcgggcggtggctcggttcctctcctccaccgcacctccaagaatccacctccacgactaagctgacggctcggcggcgccatggcggttcaccggctccaaccttccctctctggcctacagtgctccaccgcccggtcgccagtgctcctccatgggccacggctgacgggtgcacgcaccggtatgcatcccttgctgctctaattcccgacgctctagctcgtgtaccagatgtgcagactgtcgcctagccctgctccggcgtgaaggacttctgcttctgcccctgcgcatcccgcccttggtcgcgcacctcggcatgttcctcggcccgacggctactgtcttgaggcatacggtggccgcccacctcgtacccagtcaccagatctcaagttccacctcaaaatccagatcaagtgaatgccatgtttcatccttggtccaatcggttcttactggaatttgttggcaggcaacgagcacccaccaccggttaagtctctccccttcggtccttcctccctttcttctgtgttaagccaccgagcacccaagcggtttggcctgatgccacatctctggtagctacaaacctacaagctttgacaaaagatgctatgattaggccgatacaaagttgtttctgcttctttatctctgtatcatactagcacttattaggttgcaactcgattgtttaggtactagatttgatctgattgtgaattaccagatggttggtgcaggcaggagaggtggatttggtggacctagattcgatgtgcagagagcgacttggaggtggctgacatcttcaagcactgcaacatgcagttacaactactgttggccatacagggaaatgctgggcctattataccaattgttcaaagcatggaccttgtatagctacatgtttttatcatagatatattaatttctgaaatgcccatatattggtatatttgtggaaatttattggccaactgtaagcccgtcgtgatgcacagaacatttgtggtataagatttttctgttgatgtttgcaggttatttttccagcacttgacattcgagtgaaaaatgtcgcagggacatattctcttgaacataaaggagaaaattatctcttcgcacatcagacaaggcttctactctttcagaagaaagtcattttcaagagaatcttgaacaaaatgaccagatgtttaggcctggttggaaggacatttttcgaatgaatcagagtgagctcgaggctgagattcgaaaaggtctctcgagattctactcttgatccaaggaggaaggcctatctgatccaaaatctcatgaccagccgttggatagctgctcagcagaaatcaccacaaccaagcgtcgaaggacataatggatgtacacgacgacctggatgtgttccttcgtaccgagacccagggaaacaaatatttggctgtaactcaagaggtccacttattgactcttatgaccatgtaattggtgttaatacaactacattaacacgtaaaggttggtagatctggaaggtcttgatggtctaatacctgtctatgagtacgaaagaaaaggcgggagaagtcggtctctgcagcatcgcgcgtgaaaaaaaatcagccaattccatgagcattgatgttgtcatgacttcaaggagagaccatgctaagaataatgcattatgacatttgtcaggcttacatatcgattgtttgatatggatagatgtataggtttatgaccaatccagttcaaagcaatttgagtacaaaagaaataaggagcaggaaagctctgtacatcttgcattttgctgtttttttgtcgaagtttcaatgtctgtcgcgtgacaaaatatagttgtaatttatattttggcatgcacgaaacatgtgtatttattcatttttgaacgaaattttacgtcaaatcctctattgcgtt

SEQ ID NO: 48573 - DNA, 2494 bp, Zea Mays
ctgtcacctaaaatctaggatatattattcccccaaaacaaacactaaccggccggcccaattctcacgcgctcgccgcctaggagcattcacgttggtggcgggcggtggctcggttcctctcctccaccgcacctccaagaatccacctccacgactaagctgacggctcggcggcgccatggcggttcaccggctccaaccttccctctctggcctacagtgctccaccgcccggtcgccagtgctcctccatgggccacggctgacgggtgcacgcaccggtatgcatcccttgctgctctaattcccgacgctctagctcgtgtaccagatgtgcagactgtcgcctagccctgctccggcgtgaaggacttctgcttctgcccctgcgcatcccgcccttggtcgcgcacctcggcatgttcctcggcccgacggctactgtcttgaggcatacggtggccgcccacctcgtacccagtcaccagatctcaagttccacctcaaaatccagatcaagtgaatgccatgtttcatccttggtccaatcggttcttactggaatttgttggcaggcaacgagcacccaccaccggttaagtctctccccttcggtccttcctccctttcttctgtgttaagccaccgagcacccaagcggtttggcctgatgccacatctctggtagctacaaacctacaagctttgacaaaagatgctatgattaggccgatacaaagttgtttctgcttctttatctctgtatcatactagcacttattaggttgcaactcgattgtttaggtactagatttgatctgattgtgaattaccagatggttggtgcaggcaggagaggtggatttggtggacctagattcgatgtgcagagagcgacttggaggtggctgacatcttcaagcactgcaacatgcagttacaactactgttggccatacagggaaatgctgggcctattataccaattgttcaaagcatggaccttgttatttttccagcacttgacattcgagtgaaaaatgtcgcagggacatattctcttgaacataaaggagaaaattatctcttcgcacatcagacaaggcttctactctttcagaagaaagtcattttcaagagaatcttgaacaaaatgaccagatgtttaggcctggttggaaggacatttttcgaatgaatcagagtgagctcgaggctgagattcgaaaaggtctctcgagattctactcttgatccaaggaggaaggcctatctgatccaaaatctcatgaccagccgttggatagctgctcagcagaaatcaccacaaccaagcgtcgaaggacataatggatgtacacgacgacctggatgtgttccttcgtaccgagacccagggaaacaaatatttggctgtgagcattacaaaagaaactgcaagcttgttgctgcatgctgcaataagctattcacttgcatattctgtcacgataaagttagtgaccatacaatggacaggtatcttcaccacaaccattcattttaccgtccacacctttcctgctgagggatgctttcaaggatttcattttaacatcgaaccaatatcaattaagcatggcattttatttggaaatagatgtttgtggtggtgccatggacctgtgcgtcccttgtgaaatgaattgattttttgtcattgaattttctaactgaagctttttcattcgtttgattcacttgagctcccttaagttgtattgtattatttaatcataaatgccatccttcctcttatagttatataatcaaatattagttttaatcctatctgcatggtttacaatgtattgggttgtgtcattgtgtgaagaatgtttggtggttagtctgaccacatgtgttagctgaatatgagtgccgagcagtagcatgcatataagttccactgcattcaatatttacatttttttcttatttccaggtaactcaagaggtccacttattgactcttatgaccatgtaattggtgttaatacaactacattaacacgtaaaggttggtagatctggaaggtcttgatggtctaatacctgtctatgagtacgaaagaaaaggcgggagaagtcggtctctgcagcatcgcgcgtgaaaaaaaatcagccaattccatgagcattgatgttgtcatgacttcaaggagagaccatgctaagaataatgcattatgacatttgtcaggcttacatatcgattgtttgatatggatagatgtataggtttatgaccaatccagttcaaagcaatttgagtacaaaagaaataaggagcaggaaagctctgtacatcttgcattttgctgtttttttgtcgaagtttcaatgtctgtcgcgtgacaaaatatagttgtaatttatattttggcatgcacgaaacatgtgtatttattcatttttgaacgaaattttacgtcaaatcctctattgcgtt

SEQ ID NO: 48574 - DNA, 1371 bp, Zea Mays
ctgtcacctaaaatctaggatatattattcccccaaaacaaacactaaccggccggcccaattctcacgcgctcgccgcctaggagcattcacgttggtggcgggcggtggctcggttcctctcctccaccgcacctccaagaatccacctccacgactaagctgacggctcggcggcgccatggcggttcaccggctccaaccttccctctctggcctacagtgctccaccgcccggtcgccagtgctcctccatgggccacggctgacgggtgcacgcaccgatggttggtgcaggcaggagaggtggatttggtggacctagattcgatgtgcagagagcgacttggaggttatttttccagcacttgacattcgagtgaaaaatgtcgcagggacatattctcttgaacataaaggagaaaattatctcttcgcacatcagacaaggcttctactctttcagaagaaagtcattttcaagagaatcttgaacaaaatgaccagatgtttaggcctggttggaaggacatttttcgaatgaatcagagtgagctcgaggctgagattcgaaaaggtctctcgagattctactcttgatccaaggaggaaggcctatctgatccaaaatctcatgaccagccgttggatagctgctcagcagaaatcaccacaaccaagcgtcgaaggacataatggatgtacacgacgacctggatgtgttccttcgtaccgagacccagggaaacaaatatttggctgtgagcattacaaaagaaactgcaagcttgttgctgcatgctgcaataagctattcacttgcatattctgtcacgataaagttagtgaccatacaatggacaggtaactcaagaggtccacttattgactcttatgaccatgtaattggtgttaatacaactacattaacacgtaaaggttggtagatctggaaggtcttgatggtctaatacctgtctatgagtacgaaagaaaaggcgggagaagtcggtctctgcagcatcgcgcgtgaaaaaaaatcagccaattccatgagcattgatgttgtcatgacttcaaggagagaccatgctaagaataatgcattatgacatttgtcaggcttacatatcgattgtttgatatggatagatgtataggtttatgaccaatccagttcaaagcaatttgagtacaaaagaaataaggagcaggaaagctctgtacatcttgcattttgctgtttttttgtcgaagtttcaatgtctgtcgcgtgacaaaatatagttgtaatttatattttggcatgcacgaaacatgtgtatttattcatttttgaacgaaattttacgtcaaatcctctattgcgtt

SEQ ID NO: 48575 - DNA, 2028 bp, Zea Mays
ctgtcacctaaaatctaggatatattattcccccaaaacaaacactaaccggccggcccaattctcacgcgctcgccgcctaggagcattcacgttggtggcgggcggtggctcggttcctctcctccaccgcacctccaagaatccacctccacgactaagctgacggctcggcggcgccatggcggttcaccggctccaaccttccctctctggcctacagtgctccaccgcccggtcgccagtgctcctccatgggccacggctgacgggtgcacgcaccggtatgcatcccttgctgctctaattcccgacgctctagctcgtgtaccagatgtgcagactgtcgcctagccctgctccggcgtgaaggacttctgcttctgcccctgcgcatcccgcccttggtcgcgcacctcggcatgttcctcggcccgacggctactgtcttgaggcatacggtggccgcccacctcgtacccagtcaccagatctcaagttccacctcaaaatccagatcaagtgaatgccatgtttcatccttggtccaatcggttcttactggaatttgttggcaggcaacgagcacccaccaccggttaagtctctccccttcggtccttcctccctttcttctgtgttaagccaccgagcacccaagcggtttggcctgatgccacatctctggtagctacaaacctacaagctttgacaaaagatgctatgattaggccgatacaaagttgtttctgcttctttatctctgtatcatactagcacttattaggttgcaactcgattgtttaggtactagatttgatctgattgtgaattaccagatggttggtgcaggcaggagaggtggatttggtggacctagattcgatgtgcagagagcgacttggaggtggctgacatcttcaagcactgcaacatgcagttacaactactgttggccatacagggaaatgctgggcctattataccaattgttcaaagcatggaccttgttatttttccagcacttgacattcgagtgaaaaatgtcgcagggacatattctcttgaacataaaggagaaaattatctcttcgcacatcagacaaggcttctactctttcagaagaaagtcattttcaagagaatcttgaacaaaatgaccagatgtttaggcctggttggaaggacatttttcgaatgaatcagagtgagctcgaggctgagattcgaaaaggtctctcgagattctactcttgatccaaggaggaaggcctatctgatccaaaatctcatgaccagccgttggatagctgctcagcagaaatcaccacaaccaagcgtcgaaggacataatggatgtacacgacgacctggatgtgttccttcgtaccgagacccagggaaacaaatatttggctgtgagcattacaaaagaaactgcaagcttgttgctgcatgctgcaataagctattcacttgcatattctgtcacgataaagttagtgaccatacaatggacaggtaactcaagaggtccacttattgactcttatgaccatgtaattggtgttaatacaactacattaacacgtaaaggttggtagatctggaaggtcttgatggtctaatacctgtctatgagtacgaaagaaaaggcgggagaagtcggtctctgcagcatcgcgcgtgaaaaaaaatcagccaattccatgagcattgatgttgtcatgacttcaaggagagaccatgctaagaataatgcattatgacatttgtcaggcttacatatcgattgtttgatatggatagatgtataggtttatgaccaatccagttcaaagcaatttgagtacaaaagaaataaggagcaggaaagctctgtacatcttgcattttgctgtttttttgtcgaagtttcaatgtctgtcgcgtgacaaaatatagttgtaatttatattttggcatgcacgaaacatgtgtatttattcatttttgaacgaaattttacgtcaaatcctctattgcgtt

SEQ ID NO: 48576 - DNA, 2240 bp, Zea Mays
ctgtcacctaaaatctaggatatattattcccccaaaacaaacactaaccggccggcccaattctcacgcgctcgccgcctaggagcattcacgttggtggcgggcggtggctcggttcctctcctccaccgcacctccaagaatccacctccacgactaagctgacggctcggcggcgccatggcggttcaccggctccaaccttccctctctggcctacagtgctccaccgcccggtcgccagtgctcctccatgggccacggctgacgggtgcacgcaccggtatgcatcccttgctgctctaattcccgacgctctagctcgtgtaccagatgtgcagactgtcgcctagccctgctccggcgtgaaggacttctgcttctgcccctgcgcatcccgcccttggtcgcgcacctcggcatgttcctcggcccgacggctactgtcttgaggcatacggtggccgcccacctcgtacccagtcaccagatctcaagttccacctcaaaatccagatcaagtgaatgccatgtttcatccttggtccaatcggttcttactggaatttgttggcaggcaacgagcacccaccaccggcaggagaggtggatttggtggacctagattcgatgtgcagagagcgacttggaggtggctgacatcttcaagcactgcaacatgcagttacaactactgttggccatacagggaaatgctgggcctattataccaattgttcaaagcatggaccttgttatttttccagcacttgacattcgagtgaaaaatgtcgcagggacatattctcttgaacataaaggagaaaattatctcttcgcacatcagacaaggcttctactctttcagaagaaagtcattttcaagagaatcttgaacaaaatgaccagatgtttaggcctggttggaaggacatttttcgaatgaatcagagtgagctcgaggctgagattcgaaaaggtctctcgagattctactcttgatccaaggaggaaggcctatctgatccaaaatctcatgaccagccgttggatagctgctcagcagaaatcaccacaaccaagcgtcgaaggacataatggatgtacacgacgacctggatgtgttccttcgtaccgagacccagggaaacaaatatttggctgtgagcattacaaaagaaactgcaagcttgttgctgcatgctgcaataagctattcacttgcatattctgtcacgataaagttagtgaccatacaatggacaggtatcttcaccacaaccattcattttaccgtccacacctttcctgctgagggatgctttcaaggatttcattttaacatcgaaccaatatcaattaagcatggcattttatttggaaatagatgtttgtggtggtgccatggacctgtgcgtcccttgtgaaatgaattgattttttgtcattgaattttctaactgaagctttttcattcgtttgattcacttgagctcccttaagttgtattgtattatttaatcataaatgccatccttcctcttatagttatataatcaaatattagttttaatcctatctgcatggtttacaatgtattgggttgtgtcattgtgtgaagaatgtttggtggttagtctgaccacatgtgttagctgaatatgagtgccgagcagtagcatgcatataagttccactgcattcaatatttacatttttttcttatttccaggtaactcaagaggtccacttattgactcttatgaccatgtaattggtgttaatacaactacattaacacgtaaaggttggtagatctggaaggtcttgatggtctaatacctgtctatgagtacgaaagaaaaggcgggagaagtcggtctctgcagcatcgcgcgtgaaaaaaaatcagccaattccatgagcattgatgttgtcatgacttcaaggagagaccatgctaagaataatgcattatgacatttgtcaggcttacatatcgattgtttgatatggatagatgtataggtttatgaccaatccagttcaaagcaatttgagtacaaaagaaataaggagcaggaaagctctgtacatcttgcattttgctgtttttttgtcgaagtttcaatgtctgtcgcgtgacaaaatatagttgtaatttatattttggcatgcacgaaacatgtgtatttattcatttttgaacgaaattttacgtcaaatcctctattgcgtt

SEQ ID NO: 48577 - DNA, 2253 bp, Zea Mays
ctgtcacctaaaatctaggatatattattcccccaaaacaaacactaaccggccggcccaattctcacgcgctcgccgcctaggagcattcacgttggtggcgggcggtggctcggttcctctcctccaccgcacctccaagaatccacctccacgactaagctgacggctcggcggcgccatggcggttcaccggctccaaccttccctctctggcctacagtgctccaccgcccggtcgccagtgctcctccatgggccacggctgacgggtgcacgcaccggtatgcatcccttgctgctctaattcccgacgctctagctcgtgtaccagatgtgcagactgtcgcctagccctgctccggcgtgaaggacttctgcttctgcccctgcgcatcccgcccttggtcgcgcacctcggcatgttcctcggcccgacggctactgtcttgaggcatacggtggccgcccacctcgtacccagtcaccagatctcaagttccacctcaaaatccagatcaagtgaatgccatgtttcatccttggtccaatcggttcttactggaatttgttggcaggcaacgagcacccaccaccgatggttggtgcaggcaggagaggtggatttggtggacctagattcgatgtgcagagagcgacttggaggtggctgacatcttcaagcactgcaacatgcagttacaactactgttggccatacagggaaatgctgggcctattataccaattgttcaaagcatggaccttgttatttttccagcacttgacattcgagtgaaaaatgtcgcagggacatattctcttgaacataaaggagaaaattatctcttcgcacatcagacaaggcttctactctttcagaagaaagtcattttcaagagaatcttgaacaaaatgaccagatgtttaggcctggttggaaggacatttttcgaatgaatcagagtgagctcgaggctgagattcgaaaaggtctctcgagattctactcttgatccaaggaggaaggcctatctgatccaaaatctcatgaccagccgttggatagctgctcagcagaaatcaccacaaccaagcgtcgaaggacataatggatgtacacgacgacctggatgtgttccttcgtaccgagacccagggaaacaaatatttggctgtgagcattacaaaagaaactgcaagcttgttgctgcatgctgcaataagctattcacttgcatattctgtcacgataaagttagtgaccatacaatggacaggtatcttcaccacaaccattcattttaccgtccacacctttcctgctgagggatgctttcaaggatttcattttaacatcgaaccaatatcaattaagcatggcattttatttggaaatagatgtttgtggtggtgccatggacctgtgcgtcccttgtgaaatgaattgattttttgtcattgaattttctaactgaagctttttcattcgtttgattcacttgagctcccttaagttgtattgtattatttaatcataaatgccatccttcctcttatagttatataatcaaatattagttttaatcctatctgcatggtttacaatgtattgggttgtgtcattgtgtgaagaatgtttggtggttagtctgaccacatgtgttagctgaatatgagtgccgagcagtagcatgcatataagttccactgcattcaatatttacatttttttcttatttccaggtaactcaagaggtccacttattgactcttatgaccatgtaattggtgttaatacaactacattaacacgtaaaggttggtagatctggaaggtcttgatggtctaatacctgtctatgagtacgaaagaaaaggcgggagaagtcggtctctgcagcatcgcgcgtgaaaaaaaatcagccaattccatgagcattgatgttgtcatgacttcaaggagagaccatgctaagaataatgcattatgacatttgtcaggcttacatatcgattgtttgatatggatagatgtataggtttatgaccaatccagttcaaagcaatttgagtacaaaagaaataaggagcaggaaagctctgtacatcttgcattttgctgtttttttgtcgaagtttcaatgtctgtcgcgtgacaaaatatagttgtaatttatattttggcatgcacgaaacatgtgtatttattcatttttgaacgaaattttacgtcaaatcctctattgcgtt

SEQ ID NO: 48578 - DNA, 1492 bp, Zea Mays
ctgtcacctaaaatctaggatatattattcccccaaaacaaacactaaccggccggcccaattctcacgcgctcgccgcctaggagcattcacgttggtggcgggcggtggctcggttcctctcctccaccgcacctccaagaatccacctccacgactaagctgacggctcggcggcgccatggcggttcaccggctccaaccttccctctctggcctacagtgctccaccgcccggtcgccagtgctcctccatgggccacggctgacgggtgcacgcaccggcaggagaggtggatttggtggacctagattcgatgtgcagagagcgacttggaggtggctgacatcttcaagcactgcaacatgcagttacaactactgttggccatacagggaaatgctgggcctattataccaattgttcaaagcatggaccttgtatagctacatgtttttatcatagatatattaatttctgaaatgcccatatattggtatatttgtggaaatttattggccaactgtaagcccgtcgtgatgcacagaacatttgtggtataagatttttctgttgatgtttgcaggttatttttccagcacttgacattcgagtgaaaaatgtcgcagggacatattctcttgaacataaaggagaaaattatctcttcgcacatcagacaaggcttctactctttcagaagaaagtcattttcaagagaatcttgaacaaaatgaccagatgtttaggcctggttggaaggacatttttcgaatgaatcagagtgagctcgaggctgagattcgaaaaggtctctcgagattctactcttgatccaaggaggaaggcctatctgatccaaaatctcatgaccagctgctcagcagaaatcaccacaaccaagcgtcgaaggacataatggatgtacacgacgacctggatgtgttccttcgtaccgagacccagggaaacaaatatttggctgtaactcaagaggtccacttattgactcttatgaccatgtaattggtgttaatacaactacattaacacgtaaaggttggtagatctggaaggtcttgatggtctaatacctgtctatgagtacgaaagaaaaggcgggagaagtcggtctctgcagcatcgcgcgtgaaaaaaaatcagccaattccatgagcattgatgttgtcatgacttcaaggagagaccatgctaagaataatgcattatgacatttgtcaggcttacatatcgattgtttgatatggatagatgtataggtttatgaccaatccagttcaaagcaatttgagtacaaaagaaataaggagcaggaaagctctgtacatcttgcattttgctgtttttttgtcgaagtttcaatgtctgtcgcgtgacaaaatatagttgtaatttatattttggcatgcacgaaacatgtgtatttattcatttttgaacgaaattttacgtcaaatcctctattgcgtt

SEQ ID NO: 48579 - DNA, 1824 bp, Zea Mays
ctgtcacctaaaatctaggatatattattcccccaaaacaaacactaaccggccggcccaattctcacgcgctcgccgcctaggagcattcacgttggtggcgggcggtggctcggttcctctcctccaccgcacctccaagaatccacctccacgactaagctgacggctcggcggcgccatggcggttcaccggctccaaccttccctctctggcctacagtgctccaccgcccggtcgccagtgctcctccatgggccacggctgacgggtgcacgcaccggcaggagaggtggatttggtggacctagattcgatgtgcagagagcgacttggaggttatttttccagcacttgacattcgagtgaaaaatgtcgcagggacatattctcttgaacataaaggagaaaattatctcttcgcacatcagacaaggcttctactctttcagaagaaagtcattttcaagagaatcttgaacaaaatgaccagatgtttaggcctggttggaaggacatttttcgaatgaatcagagtgagctcgaggctgagattcgaaaaggtctctcgagattctactcttgatccaaggaggaaggcctatctgatccaaaatctcatgaccagccgttggatagctgctcagcagaaatcaccacaaccaagcgtcgaaggacataatggatgtacacgacgacctggatgtgttccttcgtaccgagacccagggaaacaaatatttggctgtgagcattacaaaagaaactgcaagcttgttgctgcatgctgcaataagctattcacttgcatattctgtcacgataaagttagtgaccatacaatggacaggtatcttcaccacaaccattcattttaccgtccacacctttcctgctgagggatgctttcaaggatttcattttaacatcgaaccaatatcaattaagcatggcattttatttggaaatagatgtttgtggtggtgccatggacctgtgcgtcccttgtgaaatgaattgattttttgtcattgaattttctaactgaagctttttcattcgtttgattcacttgagctcccttaagttgtattgtattatttaatcataaatgccatccttcctcttatagttatataatcaaatattagttttaatcctatctgcatggtttacaatgtattgggttgtgtcattgtgtgaagaatgtttggtggttagtctgaccacatgtgttagctgaatatgagtgccgagcagtagcatgcatataagttccactgcattcaatatttacatttttttcttatttccaggtaactcaagaggtccacttattgactcttatgaccatgtaattggtgttaatacaactacattaacacgtaaaggttggtagatctggaaggtcttgatggtctaatacctgtctatgagtacgaaagaaaaggcgggagaagtcggtctctgcagcatcgcgcgtgaaaaaaaatcagccaattccatgagcattgatgttgtcatgacttcaaggagagaccatgctaagaataatgcattatgacatttgtcaggcttacatatcgattgtttgatatggatagatgtataggtttatgaccaatccagttcaaagcaatttgagtacaaaagaaataaggagcaggaaagctctgtacatcttgcattttgctgtttttttgtcgaagtttcaatgtctgtcgcgtgacaaaatatagttgtaatttatattttggcatgcacgaaacatgtgtatttattcatttttgaacgaaattttacgtcaaatcctctattgcgtt

SEQ ID NO: 48580 - DNA, 2511 bp, Zea Mays
caaactcccaaatttcaacgtccaagggtggcgcgagcacacagacatagaggcacggaaagcagagcgcgaggaagagagagacagagagaaaaacccaaaccctaacaatcatttccaggcccccgccccccggcgtctccagaacgttccagaaccttcaaggaaccatccacaggagcaggcgcgagcgcgggtgtttggatcgtgggaggcaacgctggcggctcgcagcggcagcaggtgatggcggattcgcctagcggtggaggatctagggcttgtgtctgctgggtgagacaggtcgaggaggcagcgtcggggctggtgctcgggagaaacgaacaggggaggagggagggaggatgctgagcgtggtccgggtgcaccttccgtccgagatcccgatcgtgggctgcgaggtcacgccctacgtgctactgcggcggcccgacggtgcagtctccaccgacgatgtccctgaaactgcgcccgctgatggccagttcatgcggtacagatggtaccgcatacagagcgatcggaaagtccctatctgcagtgtgcatccaatggaacaagcgacgattcagtgcctcggttgtctcaagtcaaaaatacctgttgctaagagctaccactgttcagctaaatgtttctctgatgcatggcagcaccacaaagttttgcatgaacgagccagtagtgctcaaaatgaaaatggggctgaagaagaggagttatgtggcagtgctgtggattcagaaaaaaggtctccaattggacctccgacctcagttatgacgtcacacgtaatccccgcaccaactccgacccctcgtcgccttatccaagtgaatggggatgttttgggtcacttggatttagacagccaaacttcatccttggggacattcactgtattatcttacaatattcttgctgatacatatgctacaagtgatgcatatagctactgcccaacatgggcacttacctggacttatagaagacaaaatttgttgcgtgaaattattggttatcatgctgatatcatctgtcttcaggaggtacaagtaaaccactttgaagattttttttcacctgagcttgacagacatggatatcaggcgctttacaagaaaaggacaacagaggtgtattctggaaatcctatggccatagatggctgtgctacttttttccgcagagacaagttttcgcatgttaaaaaatacgaggttgagttcaataaggctgcacagtccttaacagatgcgattattccttctgctcagaaaagactggctttaaatcgtttgattaaagacaacattgcactaattgcggttttagaagccaaatttgctaatcatggagctgaaaatcctggtaaaagacagctactttgtgtggcaaatacacatataaatgttcatcaagacctaaaagatgtgaagctatgggaggttcataccctcttaaaaggattggagaagatagctgtcagcgcagacattcctatgttggtctgtggagatttcaactcgccccctgggagttctccacatgcgcttcttgcaatgggcaaagttgatcagcatcatccagatctggcaatagacccccttggaattttacgccctccaagcaagttgaatcatcagcttcctctggtcagtgcatactctgcatttgcaagaatggtaggtgttggctatgatttggagcatcagcggagaaggacagaccctgcaacaaatgaaccactcttcacaaattgcacaagagattttactggaactgttgattacatattttacacagcggactccttgacagtggattcattattggaacttttggatgaggaaagtttaagaaaagacacagctcttccatctcctggatggtcatcagatcacatagcactgttagccgagttccggtgcaagcctagaatcagaagttgacacattaggtcttgtagaaaaaggttattgtcatcatccttggtggtggaacagcgttccatgtgggtatgacgggacgcgggctctcggggaagcaagcagcctaggtagcagcctcagcaaggggaaggggcatgtaacatttgattttacccttttacattttagctcatgatactcaagctgcccatgtgtaccattacttcctatagaagaaaatacttgagagaaattttgaaggctagtttggaaactctattttttccaaggtatttctatttttcaaggggaaatgaaatattttttcgtggaaaaatagaaatctctagaaaaaatgaggttcctaaactagcccttaaagggctataagccccttttttttctttcactctggtcgcgttggatttaacctctttgctgtatccatatgctcgctgcctacaagatgtaggagccttcagtttctctaccaatgtaattccagttccagtttttgttctccatgttgctggttgctctcattgccgttagatgtctg

SEQ ID NO: 48581 - DNA, 2960 bp, Zea Mays
caaactcccaaatttcaacgtccaagggtggcgcgagcacacagacatagaggcacggaaagcagagcgcgaggaagagagagacagagagaaaaacccaaaccctaacaatcatttccaggcccccgccccccggcgtctccagaacgttccagaaccttcaaggaaccatccacaggagcaggcgcgagcgcgggtgtttggatcgtgggaggcaacgctggcggctcgcagcggcagcaggtgatggcggattcgcctagcggtggaggatctagggcttgtgtctgctgggtgagacaggtcgaggaggcagcgtcggggctggtgctcgggagaaacgaacaggggaggagggagggaggatgctgagcgtggtccgggtgcaccttccgtccgagatcccgatcgtgggctgcgaggtcacgccctacgtgctactgcggcggcccgacggtgcagtctccaccgacgatgtccctgaaactgcgcccgctgatggccagttcatgcggtacagatggtaccgcatacagagcgatcggaaagtccctatctgcagtgtgcatccaatggaacaagcgacgattcagtgcctcggttgtctcaagtcaaaaatacctgttgctaagagctaccactgttcagctaaatgtttctctgatgcatggcagcaccacaaagttttgcatgaacgagccagtagtgctcaaaatgaaaatggggctgaagaagaggagttatgtggcagtggtggttctggggttctaagtactgctggatctggttctttgtcaaattttggacagagccctagtattaacaatgaacctgtgcctttgtatccctcaggtactgataaaaattctggagaaacttggtatgaagttgggcgcttgcgaacgtatacaccaactgctgctgatattgggcatgcactaaaatttgagtgtgtagctgtggattcagaaaaaaggtctccaattggacctccgacctcagttatgacgtcacacgtaatccccgcaccaactccgacccctcgtcgccttatccaagtgaatggggatgttttgggtcacttggatttagacagccaaacttcatccttggggacattcactgtattatcttacaatattcttgctgatacatatgctacaagtgatgcatatagctactgcccaacatgggcacttacctggacttatagaagacaaaatttgttgcgtgaaattattggttatcatgctgatatcatctgtcttcaggaggtacaagtaaaccactttgaagattttttttcacctgagcttgacagacatggatatcaggcgctttacaagaaaaggacaacagaggtgtattctggaaatcctatggccatagatggctgtgctacttttttccgcagagacaagttttcgcatgttaaaaaatacgaggttgagttcaataaggctgcacagtccttaacagatgcgattattccttctgctcagaaaagactggctttaaatcgtttgattaaagacaacattgcactaattgcggttttagaagccaaatttgctaatcatggagctgaaaatcctggtaaaagacagctactttgtgtggtacgtgaataaaatcttctttcttttggtgggtacaaagagcttgtaatatgcttagcatcatcctcatgttgaaaattgacgtttaccattttcctctagattttgagacctacttctatcatatattgctctttctctttatcatttacgtctttcccttacccttattggcacaccaatacaattttgttgtcatgaggctatctagcctcattgttttcttaaacgatttcaatttgcaggcaaatacacatataaatgttcatcaagacctaaaagatgtgaagctatgggaggttcataccctcttaaaaggattggagaagatagctgtcagcgcagacattcctatgttggtctgtggagatttcaactcgccccctgggagttctccacatgcgcttcttgcaatgggcaaagttgatcagcatcatccagatctggcaatagacccccttggaattttacgccctccaagcaagttgaatcatcagcttcctctggtcagtgcatactctgcatttgcaagaatggtaggtgttggctatgatttggagcatcagcggagaaggacagaccctgcaacaaatgaaccactcttcacaaattgcacaagagattttactggaactgttgattacatattttacacagcggactccttgacagtggattcattattggaacttttggatgaggaaagtttaagaaaagacacagctcttccatctcctggatggtcatcagatcacatagcactgttagccgagttccggtgcaagcctagaatcagaagttgacacattaggtcttgtagaaaaaggttattgtcatcatccttggtggtggaacagcgttccatgtgggtatgacgggacgcgggctctcggggaagcaagcagcctaggtagcagcctcagcaaggggaaggggcatgtaacatttgattttacccttttacattttagctcatgatactcaagctgcccatgtgtaccattacttcctatagaagaaaatacttgagagaaattttgaaggctagtttggaaactctattttttccaaggtatttctatttttcaaggggaaatgaaatattttttcgtggaaaaatagaaatctctagaaaaaatgaggttcctaaactagcccttaaagggctataagccccttttttttctttcactctggtcgcgttggatttaacctctttgctgtatccatatgctcgctgcctacaagatgtaggagccttcagtttctctaccaatgtaattccagttccagtttttgttctccatgttgctggttgctctcattgccgttagatgtctg

SEQ ID NO: 48582 - DNA, 2496 bp, Zea Mays
aaatttcaacgtccaagggtggcgcgagcacacagacatagaggcacggaaagcagagcgcgaggaagagagagacagagagaaaaacccaaaccctaacaatcatttccaggcccccgccccccggcgtctccagaacgttccagaaccttcaaggaaccatccacaggcgcgagcgcgggtgtttggatcgtgggaggcaacgctggcggctcgcagcggcagcaggtgatggcggattcgcctagcggtggaggatctagggcttgtgtctgctgggtgagacaggtcgaggaggcagcgtcggggctggtgctcgggagaaacgaacaggggaggagggagggaggatgctgagcgtggtccgggtgcaccttccgtccgagatcccgatcgtgggctgcgaggtcacgccctacgtgctactgcggcggcccgacggtgcagtctccaccgacgatgtccctgaaactgcgcccgctgatggccagttcatgcggtacagatggtaccgcatacagagcgatcggaaagtccctatctgcagtgtgcatccaatggaacaagcgacgattcagtgcctcggttgtctcaagtcaaaaatacctgttgctaagagctaccactgttcagctaaatgtttctctgatgcatggcagcaccacaaagttttgcatgaacgagccagtagtgctcaaaatgaaaatggggctgaagaagaggagttatgtggcagtgctgtggattcagaaaaaaggtctccaattggacctccgacctcagttatgacgtcacacgtaatccccgcaccaactccgacccctcgtcgccttatccaagtgaatggggatgttttgggtcacttggatttagacagccaaacttcatccttggggacattcactgtattatcttacaatattcttgctgatacatatgctacaagtgatgcatatagctactgcccaacatgggcacttacctggacttatagaagacaaaatttgttgcgtgaaattattggttatcatgctgatatcatctgtcttcaggaggtacaagtaaaccactttgaagattttttttcacctgagcttgacagacatggatatcaggcgctttacaagaaaaggacaacagaggtgtattctggaaatcctatggccatagatggctgtgctacttttttccgcagagacaagttttcgcatgttaaaaaatacgaggttgagttcaataaggctgcacagtccttaacagatgcgattattccttctgctcagaaaagactggctttaaatcgtttgattaaagacaacattgcactaattgcggttttagaagccaaatttgctaatcatggagctgaaaatcctggtaaaagacagctactttgtgtggcaaatacacatataaatgttcatcaagacctaaaagatgtgaagctatgggaggttcataccctcttaaaaggattggagaagatagctgtcagcgcagacattcctatgttggtctgtggagatttcaactcgccccctgggagttctccacatgcgcttcttgcaatgggcaaagttgatcagcatcatccagatctggcaatagacccccttggaattttacgccctccaagcaagttgaatcatcagcttcctctggtcagtgcatactctgcatttgcaagaatggtaggtgttggctatgatttggagcatcagcggagaaggacagaccctgcaacaaatgaaccactcttcacaaattgcacaagagattttactggaactgttgattacatattttacacagcggactccttgacagtggattcattattggaacttttggatgaggaaagtttaagaaaagacacagctcttccatctcctggatggtcatcagatcacatagcactgttagccgagttccggtgcaagcctagaatcagaagttgacacattaggtcttgtagaaaaaggttattgtcatcatccttggtggtggaacagcgttccatgtgggtatgacgggacgcgggctctcggggaagcaagcagcctaggtagcagcctcagcaaggggaaggggcatgtaacatttgattttacccttttacattttagctcatgatactcaagctgcccatgtgtaccattacttcctatagaagaaaatacttgagagaaattttgaaggctagtttggaaactctattttttccaaggtatttctatttttcaaggggaaatgaaatattttttcgtggaaaaatagaaatctctagaaaaaatgaggttcctaaactagcccttaaagggctataagccccttttttttctttcactctggtcgcgttggatttaacctctttgctgtatccatatgctcgctgcctacaagatgtaggagccttcagtttctctaccaatgtaattccagttccagtttttgttctccatgttgctggttgctctcattgccgttagatgtctg

SEQ ID NO: 48583 - DNA, 2241 bp, Zea Mays
caaaattttgcagtcaaattgtcctgacaaactggttattgagctcatggtaccgcatacagagcgatcggaaagtccctatctgcagtgtgcatccaatggaacaagcgacgattcagtgcctcggttgtctcaagtcaaaaatacctgttgctaagagctaccactgttcagctaaatgtttctctgatgcatggcagcaccacaaagttttgcatgaacgagccagtagtgctcaaaatgaaaatggggctgaagaagaggagttatgtggcagtggtggttctggggttctaagtactgctggatctggttctttgtcaaattttggacagagccctagtattaacaatgaacctgtgcctttgtatccctcaggtactgataaaaattctggagaaacttggtatgaagttgggcgcttgcgaacgtatacaccaactgctgctgatattgggcatgcactaaaatttgagtgtgtagctgtggattcagaaaaaaggtctccaattggacctccgacctcagttatgacgtcacacgtaatccccgcaccaactccgacccctcgtcgccttatccaagtgaatggggatgttttgggtcacttggatttagacagccaaacttcatccttggggacattcactgtattatcttacaatattcttgctgatacatatgctacaagtgatgcatatagctactgcccaacatgggcacttacctggacttatagaagacaaaatttgttgcgtgaaattattggttatcatgctgatatcatctgtcttcaggaggtacaagtaaaccactttgaagattttttttcacctgagcttgacagacatggatatcaggcgctttacaagaaaaggacaacagaggtgtattctggaaatcctatggccatagatggctgtgctacttttttccgcagagacaagttttcgcatgttaaaaaatacgaggttgagttcaataaggctgcacagtccttaacagatgcgattattccttctgctcagaaaagactggctttaaatcgtttgattaaagacaacattgcactaattgcggttttagaagccaaatttgctaatcatggagctgaaaatcctggtaaaagacagctactttgtgtggcaaatacacatataaatgttcatcaagacctaaaagatgtgaagctatgggaggttcataccctcttaaaaggattggagaagatagctgtcagcgcagacattcctatgttggtctgtggagatttcaactcgccccctgggagttctccacatgcgcttcttgcaatgggcaaagttgatcagcatcatccagatctggcaatagacccccttggaattttacgccctccaagcaagttgaatcatcagcttcctctggtcagtgcatactctgcatttgcaagaatggtaggtgttggctatgatttggagcatcagcggagaaggacagaccctgcaacaaatgaaccactcttcacaaattgcacaagagattttactggaactgttgattacatattttacacagcggactccttgacagtggattcattattggaacttttggatgaggaaagtttaagaaaagacacagctcttccatctcctggatggtcatcagatcacatagcactgttagccgagttccggtgcaagcctagaatcagaagttgacacattaggtcttgtagaaaaaggttattgtcatcatccttggtggtggaacagcgttccatgtgggtatgacgggacgcgggctctcggggaagcaagcagcctaggtagcagcctcagcaaggggaaggggcatgtaacatttgattttacccttttacattttagctcatgatactcaagctgcccatgtgtaccattacttcctatagaagaaaatacttgagagaaattttgaaggctagtttggaaactctattttttccaaggtatttctatttttcaaggggaaatgaaatattttttcgtggaaaaatagaaatctctagaaaaaatgaggttcctaaactagcccttaaagggctataagccccttttttttctttcactctggtcgcgttggatttaacctctttgctgtatccatatgctcgctgcctacaagatgtaggagccttcagtttctctaccaatgtaattccagttccagtttttgttctccatgttgctggttgctctcattgccgttagatgtctg

SEQ ID NO: 48584 - DNA, 2433 bp, Zea Mays
ccaagtatatttttggaaatattgattccggtctcggtgtggaagcaaaagtaagaatattcgtatggaaatggagagaagtaaaaagcgaagaaaaagattcaagtattcaactacacagctcaactttcgaatcgcagtattctcggtctgggggtgggtgggaatctttcaaaagctcacttctgaaacccgtatttttaggttaggccagggtgcatcttacaaaaatcatccacttcctcaccccctgcgtttcctccgacgtctgctctcccggcgaaggaagggaaggagccacgcgaaagaaagctgacgcccacgcgcccaggagcaccaccggtgacgcgtgatcatattcgagcaccaatcccctcatcctccccagcccccggcgctaaaatctacacaaagcctcgctaaaccggcctgattcgcgctcccgatctcgcgttcgatcccagcccaccgtgaggtcctccagcctcccgcctcccgccagatctcggtgtcgttcgttcggtttcgatttggtggtggaagggaagggatgagcgggatgagcgcacggataaaggagatggtgcgtgtggccacggcgcggctgggcggtgagcaggcggggggtggcggggcttcctcctcaggcttcgcgcgccgggagtccacggcgcggctcggcggcgggggcaccagcctccggaggcagccgcagccgatggcaccctccgtgcgcaccgtctgttgcaacgaccgcgaggccaacgcccctgtcgggtacaagggaaattctgtgtcgactacgaagtacaacatcctaactttcttacctaaaggattattcgagcagttcaggcgggttgcaaatctttactttctcatgatctcaatcatgtcaactacacctatcagtccagttcatcctgtcactaatgttgttcccctaagtcttgtgcttctggtgtctctcatcaaggaagcttttgaggattggaagcgttttcagaatgatatgtcaattaacaatgcacatgtcgatgtattgcaaggtcaatgttgggaaagtactccatggaaacgactgcaggttggagatattgtgaggatcaagcaagatggttatttccctgctgacttgctcttcctatcaagtacaaaccctgatggtgtttgctacatcgagacagcaaatcttgatggggaaacaaatctgaaaataaggaaggctttggagaagacttgggactatgtaattcctgaaaaggcttctgagttcaaaggtgaagtgcagtgtgaacaaccaaacaattccctttatacgtttactggcaatcttatcatggacaagcagactatacctctctcaccgaaccagttactcctaagaggatgcagccttcgtaatacagaatacattgttggtgttgtcatattcaccgggcacgagacaaaagttatgatgaattccatgaatgttccctccaaaagaagtacattggagaaaaagctagacaagcttatccttgccctttttgcaaccctcttcacaatgtgtgttattggtgccattggaagtggtgtgtttattaatgaaaaatacttttatcttggattgcgtgggcatgtggaggaccagttcaatccccaaaacaaatttgtggtgaccattttaaccatgtttactctaataactctatactcaaccatcatcccaatttctctttatgtgtccattgagatgatcaaattcatacagtgcacaaaattcattaataacgatcttcatatgtaccatgctgagagtaacacccctgctttggcgcggacttctaatcttaatgaggaacttgggcaggttgaatatatattttctgacaaaactggaacgcttacaagaaacctgatggaattctttaaatgctcgattggtggagaaatgtatggaactggcatcacagagattgagaaaggaggagcagagcgggctggaattaaaattgatgatgatgagggtaaaaggtctgccaatgcagtccatgaaaaaggattcaattttgatgacgctagaatcatgcgtggtgcatggagaaatgaacctaatcttgaggcttgcaaggaattctttagatgccttgcaatctgtcatacagttcttccagagggtgaggaaactccggaaaagataagttaccaggctgcctcacctgatgaggctgcacttgtggctgctgctaagaattttggtttcttcttttacagctcttctcctaacccctcagcttcctacgcggcgagtggccacgcggtacttcagagttcagactgctcttcctcttccactggtggacactgcaacgacgcgcgactcctcttccacgggcggccactgcaacgacgcgcgattcctcttccacgggtggccactgcaatgac

SEQ ID NO: 48585 - DNA, 4297 bp, Zea Mays
ctgggggtgggtgggaatctttcaaaagctcacttctgaaacccgtatttttaggttaggccagggtgcatcttacaaaaatcatccacttcctcaccccctgcgtttcctccgacgtctgctctcccggcgaaggaagggaaggagccacgcgaaagaaagctgacgcccacgcgcccaggagcaccaccggtgacgcgtgatcatattcgagcaccaatcccctcatcctccccagcccccggcgctaaaatctacacaaagcctcgctaaaccggcctgattcgcgctcccgatctcgcgttcgatcccagcccaccgtgaggtcctccagcctcccgcctcccgccagatctcggtgtcgttcgttcggtttcgatttggtggtggaagggaagggatgagcgggatgagcgcacggataaaggagatggtgcgtgtggccacggcgcggctgggcggtgagcaggcggggggtggcggggcttcctcctcaggcttcgcgcgccgggagtccacggcgcggctcggcggcgggggcaccagcctccggaggcagccgcagccgatggcaccctccgtgcgcaccgtctgttgcaacgaccgcgaggccaacgcccctgtcgggtacaagggaaattctgtgtcgactacgaagtacaacatcctaactttcttacctaaaggattattcgagcagttcaggcgggttgcaaatctttactttctcatgatctcaatcatgtcaactacacctatcagtccagttcatcctgtcactaatgttgttcccctaagtcttgtgcttctggtgtctctcatcaaggaagcttttgaggattggaagcgttttcagaatgatatgtcaattaacaatgcacatgtcgatgtattgcaaggtcaatgttgggaaagtactccatggaaacgactgcaggttggagatattgtgaggatcaagcaagatggttatttccctgctgacttgctcttcctatcaagtacaaaccctgatggtgtttgctacatcgagacagcaaatcttgatggggaaacaaatctgaaaataaggaaggctttggagaagacttgggactatgtaattcctgaaaaggcttctgagttcaaaggtgaagtgcagtgtgaacaaccaaacaattccctttatacgtttactggcaatcttatcatggacaagcagactatacctctctcaccgaaccagttactcctaagaggatgcagccttcgtaatacagaatacattgttggtgttgtcatattcaccgggcacgagacaaaagttatgatgaattccatgaatgttccctccaaaagaagtacattggagaaaaagctagacaagcttatccttgccctttttgcaaccctcttcacaatgtgtgttattggtgccattggaagtggtgtgtttattaatgaaaaatacttttatcttggattgcgtgggcatgtggaggaccagttcaatccccaaaacaaatttgtggtgaccattttaaccatgtttactctaataactctatactcaaccatcatcccaatttctctttatgtgtccattgagatgatcaaattcatacagtgcacaaaattcattaataacgatcttcatatgtaccatgctgagagtaacacccctgctttggcgcggacttctaatcttaatgaggaacttgggcaggttgaatatatattttctgacaaaactggaacgcttacaagaaacctgatggaattctttaaatgctcgattggtggagaaatgtatggaactggcatcacagagattgagaaaggaggagcagagcgggctggaattaaaattgatgatgatgagggtaaaaggtctgccaatgcagtccatgaaaaaggattcaattttgatgacgctagaatcatgcgtggtgcatggagaaatgaacctaatcttgaggcttgcaaggaattctttagatgccttgcaatctgtcatacagttcttccagagggtgaggaaactccggaaaagataagttaccaggctgcctcacctgatgaggctgcacttgtggctgctgctaagaattttggtttcttcttttacaggcgtacacccaccacagttatggttcgtgagtcacatgttgaaaggatggggagtatacaagatgttccatatgaaattctgaatgttctggaattcaacagcacgagaaagcgacaatcggtggtttgccgtttcccaaatggaagattagttctctattgcaagggtgctgataatgtcgtatatgaacgattggctgatggaaatcatgatatgaaaaagacaagcagagaacatctagagcaatttggttctgctggcttgcgtactctttgtcttgcctatcgggatcttagcagggagcaatacgaaagctggaatgaaaagtttgtacaagcaaagtcatctttacgagatcgtgataagaagctcgatgaggtggctgagttgattgaaaaagaccttatattagttgggtgcacagctatagaggacaaactgcaagaaggcgtgccaacctgcattgaaactctctctgcagctggcataaaaatttgggtgttaacgggagataagatggaaacagcaattaacattgcatatgcatgcagcttggtaaacaatgacaccaaacagttcatcattagttcagagacagacactattagggaggctgaagaccggggtgaccctgtggaaattgcacgtgttattaaagattcagtaaaacagagtctgaaaagctttcacgaggaagcccgacattctttgattagcacccctgaaaggaagttggctctcattattgatggtagatgcctgatgtatgcactggacccaactcttcgtgttgatcttcttggattgagtctaagttgccactcagttgtatgctgccgagtttctccgctgcaaaaggcacaggttacaagtttagttaggaagggcgctcagaaaataactctcagcattggtgacggtgctaatgatgtgagtatgattcaagctgctcatgttgggattggcatcagtggccaagaaggaatgcaagctgttatggctagcgactttgccattgcccagtttcgttttcttactgatttgcttcttgtacatggacggtggtcttacttgagactctgcaaggttatcacatacttcttctacaagaatctgacatttacactaactcagttctggttcactttccaaactggcttttctggtcagcggttttatgatgactggtttcagtctctatataatgttatcttcacggcactacctgtaattatagttggattgtttgataaggatgttagcgcgtcactgtcaaaaaaatacccacagctttacaaggaaggaatcaggaattcattcttcaagtggagagtgattgcagtgtggggtttctttgctttctatcagtcaatagtgttcttctacttcactgcagctgcaagtcagcatggtcacggttcatctggcaagattcttggcctatgggatgttagcactatggcctttacttgtgtcgtggtaactgtgaatctccgccttctcatggcatgcaactctataacgaggtggcattacatcagtgtggctggcagtatagtggcctggtttatgtttattttcatatactctgcaataatgacgtcgtttgacagacaggaaaatgagtattttgtgatttatgttctgatgagcacctttttcttctatatgacaatcttgcttgttccgatcattgccctgtttggtgatttcctatatttatcgattcaaaggtggctattcccctacgactaccaaataattcaggagcagcacaaggacgagccccacgtgtacagcagggtgcagctacccgagaccagccacctaagcccacaggaagcgagaagctacatgatgtcgatgctccctcgggagtcatcaaagcacactggctttgccttcgactccccaggatacgagtcgttcttcgcctcgcagcaaggcgtcggcgtgccacacaagccgtgggatgtagcccggagagcaagcatgaagcagcaacgagcaggaaaatcctaatctccgccgtgtaaagttttgtatatctggtttcttgattgcaatcgcagaccacaggaattagtataggcagccctttttcgtgtttgccagtggttcacccatatgtggttttgggatgaggcatctgcccatttagggcttgttcggttacaccaatccaga

SEQ ID NO: 48586 - DNA, 2938 bp, Zea Mays
caaaagctcacttctgaaacccgtatttttaggttaggccagggtgcatcttacaaaaatcatccacttcctcaccccctgcgtttcctccgacgtctgctctcccggcgaaggaagggaaggagccacgcgaaagaaagctgacgcccacgcgcccaggagcaccaccggtgacgcgtgatcatattcgagcaccaatcccctcatcctccccagcccccggcgctaaaatctacacaaagcctcgctaaaccggcctgattcgcgctcccgatctcgcgttcgatcccagcccaccgtgaggtcctccagcctcccgcctcccgccagatctcggtgtcgttcgttcggtttcgatttggtggtggaagggaagggatgagcgggatgagcgcacggataaaggagatggtgcgtgtggccacggcgcggctgggcggtgagcaggcggggggtggcggggcttcctcctcaggcttcgcgcgccgggagtccacggcgcggctcggcggcgggggcaccagcctccggaggcagccgcagccgatggcaccctccgtgcgcaccgtctgttgcaacgaccgcgaggccaacgcccctgtcgggtacaagggaaattctgtgtcgactacgaagtacaacatcctaactttcttacctaaaggattattcgagcagttcaggcgggttgcaaatctttactttctcatgatctcaatcatgtcaactacacctatcagtccagttcatcctgtcactaatgttgttcccctaagtcttgtgcttctggtgtctctcatcaaggaagcttttgaggattggaagcgttttcagaatgatatgtcaattaacaatgcacatgtcgatgtattgcaaggtcaatgttgggaaagtactccatggaaacgactgcaggttggagatattgtgaggatcaagcaagatggttatttccctgctgacttgctcttcctatcaagtacaaaccctgatggtgtttgctacatcgagacagcaaatcttgatggggaaacaaatctgaaaataaggaaggctttggagaagacttgggactatgtaattcctgaaaaggcttctgagttcaaaggtgaagtgcagtgtgaacaaccaaacaattccctttatacgtttactggcaatcttatcatggacaagcagactatacctctctcaccgaaccagttactcctaagaggatgcagccttcgtaatacagaatacattgttggtgttgtcatattcaccgggcacgagacaaaagttatgatgaattccatgaatgttccctccaaaagaagtacattggagaaaaagctagacaagcttatccttgccctttttgcaaccctcttcacaatgtgtgttattggtgccattggaagtggtgtgtttattaatgaaaaatacttttatcttggattgcgtgggcatgtggaggaccagttcaatccccaaaacaaatttgtggtgaccattttaaccatgtttactctaataactctatactcaaccatcatcccaatttctctttatgtgtccattgagatgatcaaattcatacagtgcacaaaattcattaataacgatcttcatatgtaccatgctgagagtaacacccctgctttggcgcggacttctaatcttaatgaggaacttgggcaggttgaatatatattttctgacaaaactggaacgcttacaagaaacctgatggaattctttaaatgctcgattggtggagaaatgtatggaactggcatcacagagattgagaaaggaggagcagagcgggctggaattaaaattgatgatgatgagggtaaaaggtctgccaatgcagtccatgaaaaaggattcaattttgatgacgctagaatcatgcgtggtgcatggagaaatgaacctaatcttgaggcttgcaaggaattctttagatgccttgcaatctgtcatacagttcttccagagggtgaggaaactccggaaaagataagttaccaggctgcctcacctgatgaggctgcacttgtggctgctgctaagaattttggtttcttcttttacaggcgtacacccaccacagttatggttcgtgagtcacatgttgaaaggatggggagtatacaagatgttccatatgaaattctgaatgttctggaattcaacagcacgagaaagcgacaatcggtggtttgccgtttcccaaatggaagattagttctctattgcaagggtgctgataatgtcgtatatgaacgattggctgatggaaatcatgatatgaaaaagacaagcagagaacatctagagcaatttggttctgctggcttgcgtactctttgtcttgcctatcgggatcttagcagggagcaatacgaaagctggaatgaaaagtttgtacaagcaaagtcatctttacgagatcgtgataagaagctcgatgaggtggctgagttgattgaaaaagaccttatattagttgggtgcacagctatagaggacaaactgcaagaaggcgtgccaacctgcattgaaactctctctgcagctggcataaaaatttgggtgttaacgggagataagatggaaacagcaattaacattgcatatgcatgcagcttggtaaacaatgacaccaaacagttcatcattagttcagagacagacactattagggaggctgaagaccggaggttgtgcatctttatccacaagccgtgacacccatctgtcacgaggtcatgaatcccatacacctctaccgaggagtcgaggcaaggtagcactacgaggcctttccaaagttccactagtttgagaaaacccgctacggtttcaggaagaaggaagcataggaatcactcgtccgaaaagctattacatacagttcgacccagagggcctccctatactctgc

SEQ ID NO: 48587 - DNA, 4185 bp, Zea Mays
caaaagctcacttctgaaacccgtatttttaggttaggccagggtgcatcttacaaaaatcatccacttcctcaccccctgcgtttcctccgacgtctgctctcccggcgaaggaagggaaggagccacgcgaaagaaagctgacgcccacgcgcccaggagcaccaccggtgacgcgtgatcatattcgagcaccaatcccctcatcctccccagcccccggcgctaaaatctacacaaagcctcgctaaaccggcctgattcgcgctcccgatctcgcgttcgatcccagcccaccgtgaggtcctccagcctcccgcctcccgccagatctcggtgtcgttcgttcggtttcgatttggtggtggaagggaagggatgagcgggatgagcgcacggataaaggagatggtgcgtgtggccacggcgcggctgggcggtgagcaggcggggggtggcggggcttcctcctcaggcttcgcgcgccgggagtccacggcgcggctcggcggcgggggcaccagcctccggaggcagccgcagccgatggcaccctccgtgcgcaccgtctgttgcaacgaccgcgaggccaacgcccctgtcgggtacaagggaaattctgtgtcgactacgaagtacaacatcctaactttcttacctaaaggattattcgagcagttcaggcgggttgcaaatctttactttctcatgatctcaatcatgtcaactacacctatcagtccagttcatcctgtcactaatgttgttcccctaagtcttgtgcttctggtgtctctcatcaaggaagcttttgaggattggaagcgttttcagaatgatatgtcaattaacaatgcacatgtcgatgtattgcaaggtcaatgttgggaaagtactccatggaaacgactgcaggttggagatattgtgaggatcaagcaagatggttatttccctgctgacttgctcttcctatcaagtacaaaccctgatggtgtttgctacatcgagacagcaaatcttgatggggaaacaaatctgaaaataaggaaggctttggagaagacttgggactatgtaattcctgaaaaggcttctgagttcaaaggtgaagtgcagtgtgaacaaccaaacaattccctttatacgtttactggcaatcttatcatggacaagcagactatacctctctcaccgaaccagttactcctaagaggatgcagccttcgtaatacagaatacattgttggtgttgtcatattcaccgggcacgagacaaaagttatgatgaattccatgaatgttccctccaaaagaagtacattggagaaaaagctagacaagcttatccttgccctttttgcaaccctcttcacaatgtgtgttattggtgccattggaagtggtgtgtttattaatgaaaaatacttttatcttggattgcgtgggcatgtggaggaccagttcaatccccaaaacaaatttgtggtgaccattttaaccatgtttactctaataactctatactcaaccatcatcccaatttctctttatgtgtccattgagatgatcaaattcatacagtgcacaaaattcattaataacgatcttcatatgtaccatgctgagagtaacacccctgctttggcgcggacttctaatcttaatgaggaacttgggcaggttgaatatatattttctgacaaaactggaacgcttacaagaaacctgatggaattctttaaatgctcgattggtggagaaatgtatggaactggcatcacagagattgagaaaggaggagcagagcgggctggaattaaaattgatgatgatgagggtaaaaggtctgccaatgcagtccatgaaaaaggattcaattttgatgacgctagaatcatgcgtggtgcatggagaaatgaacctaatcttgaggcttgcaagatgccttgcaatctgtcatacagttcttccagagggtgaggaaactccggaaaagataagttaccaggctgcctcacctgatgaggctgcacttgtggctgctgctaagaattttggtttcttcttttacaggcgtacacccaccacagttatggttcgtgagtcacatgttgaaaggatggggagtatacaagatgttccatatgaaattctgaatgttctggaattcaacagcacgagaaagcgacaatcggtggtttgccgtttcccaaatggaagattagttctctattgcaagggtgctgataatgtcgtatatgaacgattggctgatggaaatcatgatatgaaaaagacaagcagagaacatctagagcaatttggttctgctggcttgcgtactctttgtcttgcctatcgggatcttagcagggagcaatacgaaagctggaatgaaaagtttgtacaagcaaagtcatctttacgagatcgtgataagaagctcgatgaggtggctgagttgattgaaaaagaccttatattagttgggtgcacagctatagaggacaaactgcaagaaggcgtgccaacctgcattgaaactctctctgcagctggcataaaaatttgggtgttaacgggagataagatggaaacagcaattaacattgcatatgcatgcagcttggtaaacaatgacaccaaacagttcatcattagttcagagacagacactattagggaggctgaagaccggggtgaccctgtggaaattgcacgtgttattaaagattcagtaaaacagagtctgaaaagctttcacgaggaagcccgacattctttgattagcacccctgaaaggaagttggctctcattattgatggtagatgcctgatgtatgcactggacccaactcttcgtgttgatcttcttggattgagtctaagttgccactcagttgtatgctgccgagtttctccgctgcaaaaggcacaggttacaagtttagttaggaagggcgctcagaaaataactctcagcattggtgacggtgctaatgatgtgagtatgattcaagctgctcatgttgggattggcatcagtggccaagaaggaatgcaagctgttatggctagcgactttgccattgcccagtttcgttttcttactgatttacactaactcagttctggttcactttccaaactggcttttctggtcagcggttttatgatgactggtttcagtctctatataatgttatcttcacggcactacctgtaattatagttggattgtttgataaggatgttagcgcgtcactgtcaaaaaaatacccacagctttacaaggaaggaatcaggaattcattcttcaagtggagagtgattgcagtgtggggtttctttgctttctatcagtcaatagtgttcttctacttcactgcagctgcaagtcagcatggtcacggttcatctggcaagattcttggcctatgggatgttagcactatggcctttacttgtgtcgtggtaactgtgaatctccgccttctcatggcatgcaactctataacgaggtggcattacatcagtgtggctggcagtatagtggcctggtttatgtttattttcatatactctgcaataatgacgtcgtttgacagacaggaaaatgagtattttgtgatttatgttctgatgagcacctttttcttctatatgacaatcttgcttgttccgatcattgccctgtttggtgatttcctatatttatcgattcaaaggtggctattcccctacgactaccaaataattcaggagcagcacaaggacgagccccacgtgtacagcagggtgcagctacccgagaccagccacctaagcccacaggaagcgagaagctacatgatgtcgatgctccctcgggagtcatcaaagcacactggctttgccttcgactccccaggatacgagtcgttcttcgcctcgcagcaaggcgtcggcgtgccacacaagccgtgggatgtagcccggagagcaagcatgaagcagcaacgagcaggaaaatcctaatctccgccgtgtaaagttttgtatatctggtttcttgattgcaatcgcagaccacaggaattagtataggcagccctttttcgtgtttgccagtggttcacccatatgtggttttgggatgaggcatctgcccatttagggcttgttcggttacaccaatccaga

SEQ ID NO: 48588 - DNA, 4035 bp, Zea Mays
caaaagctcacttctgaaacccgtatttttaggttaggccagggtgcatcttacaaaaatcatccacttcctcaccccctgcgtttcctccgacgtctgctctcccggcgaaggaagggaaggagccacgcgaaagaaagctgacgcccacgcgcccaggagcaccaccggtgacgcgtgatcatattcgagcaccaatcccctcatcctccccagcccccggcgctaaaatctacacaaagcctcgctaaaccggcctgattcgcgctcccgatctcgcgttcgatcccagcccaccgtgaggtcctccagcctcccgcctcccgccagatctcggtgtcgttcgttcggtttcgatttggtggtggaagggaagggatgagcgggatgagcgcacggataaaggagatggtgcgtgtggccacggcgcggctgggcggtgagcaggcggggggtggcggggcttcctcctcaggcttcgcgcgccgggagtccacggcgcggctcggcggcgggggcaccagcctccggaggcagccgcagccgatggcaccctccgtgcgcaccgtctgttgcaacgaccgcgaggccaacgcccctgtcgggtacaagggaaattctgtgtcgactacgaagtacaacatcctaactttcttacctaaaggattattcgagcagttcaggcgggttgcaaatctttactttctcatgatctcaatcatgtcaactacacctatcagtccagttcatcctgtcactaatgttgttcccctaagtcttgtgcttctggtgtctctcatcaaggaagcttttgaggattggaagcgttttcagaatgatatgtcaattaacaatgcacatgtcgatgtattgcaaggtcaatgttgggaaagtactccatggaaacgactgcaggttggagatattgtgaggatcaagcaagatggttatttccctgctgacttgctcttcctatcaagtacaaaccctgatggtgtttgctacatcgagacagcaaatcttgatggggaaacaaatctgaaaataaggaaggctttggagaagacttgggactatgtaattcctgaaaaggcttctgagttcaaaggtgaagtgcagtgtgaacaaccaaacaattccctttatacgtttactggcaatcttatcatggacaagcagactatacctctctcaccgaaccagttactcctaagaggatgcagccttcgtaatacagaatacattgttggtgttgtcatattcaccgggcacgagacaaaagttatgatgaattccatgaatgttccctccaaaagaagtacattggagaaaaagctagacaagcttatccttgccctttttgcaaccctcttcacaatgtgtgttattggtgccattggaagtggtgtgtttattaatgaaaaatacttttatcttggattgcgtgggcatgtggaggaccagttcaatccccaaaacaaatttgtggtgaccattttaaccatgtttactctaataactctatactcaaccatcatcccaatttctctttatgtgtccattgagatgatcaaattcatacagtgcacaaaattcattaataacgatcttcatatgtaccatgctgagagtaacacccctgctttggcgcggacttctaatcttaatgaggaacttgggcaggttgaatatatattttctgacaaaactggaacgcttacaagaaacctgatggaattctttaaatgctcgattggtggagaaatgtatggaactggcatcacagagattgagaaaggaggagcagagcgggctggaattaaaattgatgatgatgagggtaaaaggtctgccaatgcagtccatgaaaaaggattcaattttgatgacgctagaatcatgcgtggtgcatggagaaatgaacctaatcttgaggcttgcaaggaattctttagatgccttgcaatctgtcatacagttcttccagagggtgaggaaactccggaaaagataagttaccaggctgcctcacctgatgaggctgcacttgtggctgctgctaagaattttggtttcttcttttacaggcgtacacccaccacagttatggttcgtgagtcacatgttgaaaggatggggagtatacaagatgttccatatgaaattctgaatgttctggaattcaacagcacgagaaagcgacaatcggtggtttgccgtttcccaaatggaagattagttctctattgcaagggtgctgataatgtcgtatatgaacgattggctgatggaaatcatgatatgaaaaagacaagcagagaacatctagagcaatttggttctgctggcttgcgtactctttgtcttgcctatcgggatcttagcagggagcaatacgaaagctggaatgaaaagtttgtacaagcaaagtcatctttacgagatcgtgataagaagctcgatgaggtggctgagttgattgaaaaagaccttatattagttgggtgcacagctatagaggacaaactgcaagaaggcgtgccaacctgcattgaaactctctctgcagctggcataaaaatttgggtgttaacgggagataagatggaaacagcaattaacattgcatatgcatgcagcttggtaaacaatgacaccaaacagttcatcattagttcagagacagacactattagggaggctgaagaccgggttacaagtttagttaggaagggcgctcagaaaataactctcagcattggtgacggtgctaatgatgtgagtatgattcaagctgctcatgttgggattggcatcagtggccaagaaggaatgcaagctgttatggctagcgactttgccattgcccagtttcgttttcttactgatttgcttcttgtacatggacggtggtcttacttgagactctgcaaggttatcacatacttcttctacaagaatctgacatttacactaactcagttctggttcactttccaaactggcttttctggtcagcggttttatgatgactggtttcagtctctatataatgttatcttcacggcactacctgtaattatagttggattgtttgataaggatgttagcgcgtcactgtcaaaaaaatacccacagctttacaaggaaggaatcaggaattcattcttcaagtggagagtgattgcagtgtggggtttctttgctttctatcagtcaatagtgttcttctacttcactgcagctgcaagtcagcatggtcacggttcatctggcaagattcttggcctatgggatgttagcactatggcctttacttgtgtcgtggtaactgtgaatctccgccttctcatggcatgcaactctataacgaggtggcattacatcagtgtggctggcagtatagtggcctggtttatgtttattttcatatactctgcaataatgacgtcgtttgacagacaggaaaatgagtattttgtgatttatgttctgatgagcacctttttcttctatatgacaatcttgcttgttccgatcattgccctgtttggtgatttcctatatttatcgattcaaaggtggctattcccctacgactaccaaataattcaggagcagcacaaggacgagccccacgtgtacagcagggtgcagctacccgagaccagccacctaagcccacaggaagcgagaagctacatgatgtcgatgctccctcgggagtcatcaaagcacactggctttgccttcgactccccaggatacgagtcgttcttcgcctcgcagcaaggcgtcggcgtgccacacaagccgtgggatgtagcccggagagcaagcatgaagcagcaacgagcaggaaaatcctaatctccgccgtgtaaagttttgtatatctggtttcttgattgcaatcgcagaccacaggaattagtataggcagccctttttcgtgtttgccagtggttcacccatatgtggttttgggatgaggcatctgcccatttagggcttgttcggttacaccaatccaga

SEQ ID NO: 48589 - DNA, 4241 bp, Zea Mays
caaaagctcacttctgaaacccgtatttttaggttaggccagggtgcatcttacaaaaatcatccacttcctcaccccctgcgtttcctccgacgtctgctctcccggcgaaggaagggaaggagccacgcgaaagaaagctgacgcccacgcgcccaggagcaccaccggtgacgcgtgatcatattcgagcaccaatcccctcatcctccccagcccccggcgctaaaatctacacaaagcctcgctaaaccggcctgattcgcgctcccgatctcgcgttcgatcccagcccaccgtgaggtcctccagcctcccgcctcccgccagatctcggtgtcgttcgttcggtttcgatttggtggtggaagggaagggatgagcgggatgagcgcacggataaaggagatggtgcgtgtggccacggcgcggctgggcggtgagcaggcggggggtggcggggcttcctcctcaggcttcgcgcgccgggagtccacggcgcggctcggcggcgggggcaccagcctccggaggcagccgcagccgatggcaccctccgtgcgcaccgtctgttgcaacgaccgcgaggccaacgcccctgtcgggtacaagggaaattctgtgtcgactacgaagtacaacatcctaactttcttacctaaaggattattcgagcagttcaggcgggttgcaaatctttactttctcatgatctcaatcatgtcaactacacctatcagtccagttcatcctgtcactaatgttgttcccctaagtcttgtgcttctggtgtctctcatcaaggaagcttttgaggattggaagcgttttcagaatgatatgtcaattaacaatgcacatgtcgatgtattgcaaggtcaatgttgggaaagtactccatggaaacgactgcaggttggagatattgtgaggatcaagcaagatggttatttccctgctgacttgctcttcctatcaagtacaaaccctgatggtgtttgctacatcgagacagcaaatcttgatggggaaacaaatctgaaaataaggaaggctttggagaagacttgggactatgtaattcctgaaaaggcttctgagttcaaaggtgaagtgcagtgtgaacaaccaaacaattccctttatacgtttactggcaatcttatcatggacaagcagactatacctctctcaccgaaccagttactcctaagaggatgcagccttcgtaatacagaatacattgttggtgttgtcatattcaccgggcacgagacaaaagttatgatgaattccatgaatgttccctccaaaagaagtacattggagaaaaagctagacaagcttatccttgccctttttgcaaccctcttcacaatgtgtgttattggtgccattggaagtggtgtgtttattaatgaaaaatacttttatcttggattgcgtgggcatgtggaggaccagttcaatccccaaaacaaatttgtggtgaccattttaaccatgtttactctaataactctatactcaaccatcatcccaatttctctttatgtgtccattgagatgatcaaattcatacagtgcacaaaattcattaataacgatcttcatatgtaccatgctgagagtaacacccctgctttggcgcggacttctaatcttaatgaggaacttgggcaggttgaatatatattttctgacaaaactggaacgcttacaagaaacctgatggaattctttaaatgctcgattggtggagaaatgtatggaactggcatcacagagattgagaaaggaggagcagagcgggctggaattaaaattgatgatgatgagggtaaaaggtctgccaatgcagtccatgaaaaaggattcaattttgatgacgctagaatcatgcgtggtgcatggagaaatgaacctaatcttgaggcttgcaaggaattctttagatgccttgcaatctgtcatacagttcttccagagggtgaggaaactccggaaaagataagttaccaggctgcctcacctgatgaggctgcacttgtggctgctgctaagaattttggtttcttcttttacaggcgtacacccaccacagttatggttcgtgagtcacatgttgaaaggatggggagtatacaagatgttccatatgaaattctgaatgttctggaattcaacagcacgagaaagcgacaatcggtggtttgccgtttcccaaatggaagattagttctctattgcaagggtgctgataatgtcgtatatgaacgattggctgatggaaatcatgatatgaaaaagacaagcagagaacatctagagcaatttggttctgctggcttgcgtactctttgtcttgcctatcgggatcttagcagggagcaatacgaaagctggaatgaaaagtttgtacaagcaaagtcatctttacgagatcgtgataagaagctcgatgaggtggctgagttgattgaaaaagaccttatattagttgggtgcacagctatagaggacaaactgcaagaaggcgtgccaacctgcattgaaactctctctgcagctggcataaaaatttgggtgttaacgggagataagatggaaacagcaattaacattgcatatgcatgcagcttggtaaacaatgacaccaaacagttcatcattagttcagagacagacactattagggaggctgaagaccggattcagtaaaacagagtctgaaaagctttcacgaggaagcccgacattctttgattagcacccctgaaaggaagttggctctcattattgatggtagatgcctgatgtatgcactggacccaactcttcgtgttgatcttcttggattgagtctaagttgccactcagttgtatgctgccgagtttctccgctgcaaaaggcacaggttacaagtttagttaggaagggcgctcagaaaataactctcagcattggtgacggtgctaatgatgtgagtatgattcaagctgctcatgttgggattggcatcagtggccaagaaggaatgcaagctgttatggctagcgactttgccattgcccagtttcgttttcttactgatttgcttcttgtacatggacggtggtcttacttgagactctgcaaggttatcacatacttcttctacaagaatctgacatttacactaactcagttctggttcactttccaaactggcttttctggtcagcggttttatgatgactggtttcagtctctatataatgttatcttcacggcactacctgtaattatagttggattgtttgataaggatgttagcgcgtcactgtcaaaaaaatacccacagctttacaaggaaggaatcaggaattcattcttcaagtggagagtgattgcagtgtggggtttctttgctttctatcagtcaatagtgttcttctacttcactgcagctgcaagtcagcatggtcacggttcatctggcaagattcttggcctatgggatgttagcactatggcctttacttgtgtcgtggtaactgtgaatctccgccttctcatggcatgcaactctataacgaggtggcattacatcagtgtggctggcagtatagtggcctggtttatgtttattttcatatactctgcaataatgacgtcgtttgacagacaggaaaatgagtattttgtgatttatgttctgatgagcacctttttcttctatatgacaatcttgcttgttccgatcattgccctgtttggtgatttcctatatttatcgattcaaaggtggctattcccctacgactaccaaataattcaggagcagcacaaggacgagccccacgtgtacagcagggtgcagctacccgagaccagccacctaagcccacaggaagcgagaagctacatgatgtcgatgctccctcgggagtcatcaaagcacactggctttgccttcgactccccaggatacgagtcgttcttcgcctcgcagcaaggcgtcggcgtgccacacaagccgtgggatgtagcccggagagcaagcatgaagcagcaacgagcaggaaaatcctaatctccgccgtgtaaagttttgtatatctggtttcttgattgcaatcgcagaccacaggaattagtataggcagccctttttcgtgtttgccagtggttcacccatatgtggttttgggatgaggcatctgcccatttagggcttgttcggttacaccaatccaga

SEQ ID NO: 48590 - DNA, 4241 bp, Zea Mays
caaaagctcacttctgaaacccgtatttttaggttaggccagggtgcatcttacaaaaatcatccacttcctcaccccctgcgtttcctccgacgtctgctctcccggcgaaggaagggaaggagccacgcgaaagaaagctgacgcccacgcgcccaggagcaccaccggtgacgcgtgatcatattcgagcaccaatcccctcatcctccccagcccccggcgctaaaatctacacaaagcctcgctaaaccggcctgattcgcgctcccgatctcgcgttcgatcccagcccaccgtgaggtcctccagcctcccgcctcccgccagatctcggtgtcgttcgttcggtttcgatttggtggtggaagggaagggatgagcgggatgagcgcacggataaaggagatggtgcgtgtggccacggcgcggctgggcggtgagcaggcggggggtggcggggcttcctcctcaggcttcgcgcgccgggagtccacggcgcggctcggcggcgggggcaccagcctccggaggcagccgcagccgatggcaccctccgtgcgcaccgtctgttgcaacgaccgcgaggccaacgcccctgtcgggtacaagggaaattctgtgtcgactacgaagtacaacatcctaactttcttacctaaaggattattcgagcagttcaggcgggttgcaaatctttactttctcatgatctcaatcatgtcaactacacctatcagtccagttcatcctgtcactaatgttgttcccctaagtcttgtgcttctggtgtctctcatcaaggaagcttttgaggattggaagcgttttcagaatgatatgtcaattaacaatgcacatgtcgatgtattgcaaggtcaatgttgggaaagtactccatggaaacgactgcaggttggagatattgtgaggatcaagcaagatggttatttccctgctgacttgctcttcctatcaagtacaaaccctgatggtgtttgctacatcgagacagcaaatcttgatggggaaacaaatctgaaaataaggaaggctttggagaagacttgggactatgtaattcctgaaaaggcttctgagttcaaaggtgaagtgcagtgtgaacaaccaaacaattccctttatacgtttactggcaatcttatcatggacaagcagactatacctctctcaccgaaccagttactcctaagaggatgcagccttcgtaatacagaatacattgttggtgttgtcatattcaccgggcacgagacaaaagttatgatgaattccatgaatgttccctccaaaagaagtacattggagaaaaagctagacaagcttatccttgccctttttgcaaccctcttcacaatgtgtgttattggtgccattggaagtggtgtgtttattaatgaaaaatacttttatcttggattgcgtgggcatgtggaggaccagttcaatccccaaaacaaatttgtggtgaccattttaaccatgtttactctaataactctatactcaaccatcatcccaatttctctttatgtgtccattgagatgatcaaattcatacagtgcacaaaattcattaataacgatcttcatatgtaccatgctgagagtaacacccctgctttggcgcggacttctaatcttaatgaggaacttgggcaggttgaatatatattttctgacaaaactggaacgcttacaagaaacctgatggaattctttaaatgctcgattggtggagaaatgtatggaactggcatcacagagattgagaaaggaggagcagagcgggctggaattaaaattgatgatgatgagggtaaaaggtctgccaatgcagtccatgaaaaaggattcaattttgatgacgctagaatcatgcgtggtgcatggagaaatgaacctaatcttgaggcttgcaagttcttccagagggtgaggaaactccggaaaagataagttaccaggctgcctcacctgatgaggctgcacttgtggctgctgctaagaattttggtttcttcttttacaggcgtacacccaccacagttatggttcgtgagtcacatgttgaaaggatggggagtatacaagatgttccatatgaaattctgaatgttctggaattcaacagcacgagaaagcgacaatcggtggtttgccgtttcccaaatggaagattagttctctattgcaagggtgctgataatgtcgtatatgaacgattggctgatggaaatcatgatatgaaaaagacaagcagagaacatctagagcaatttggttctgctggcttgcgtactctttgtcttgcctatcgggatcttagcagggagcaatacgaaagctggaatgaaaagtttgtacaagcaaagtcatctttacgagatcgtgataagaagctcgatgaggtggctgagttgattgaaaaagaccttatattagttgggtgcacagctatagaggacaaactgcaagaaggcgtgccaacctgcattgaaactctctctgcagctggcataaaaatttgggtgttaacgggagataagatggaaacagcaattaacattgcatatgcatgcagcttggtaaacaatgacaccaaacagttcatcattagttcagagacagacactattagggaggctgaagaccggggtgaccctgtggaaattgcacgtgttattaaagattcagtaaaacagagtctgaaaagctttcacgaggaagcccgacattctttgattagcacccctgaaaggaagttggctctcattattgatggtagatgcctgatgtatgcactggacccaactcttcgtgttgatcttcttggattgagtctaagttgccactcagttgtatgctgccgagtttctccgctgcaaaaggcacaggttacaagtttagttaggaagggcgctcagaaaataactctcagcattggtgacggtgctaatgatgtgagtatgattcaagctgctcatgttgggattggcatcagtggccaagaaggaatgcaagctgttatggctagcgactttgccattgcccagtttcgttttcttactgatttgcttcttgtacatggacggtggtcttacttgagactctgcaaggttatcacatacttcttctacaagaatctgacatttacactaactcagttctggttcactttccaaactggcttttctggtcagcggttttatgatgactggtttcagtctctatataatgttatcttcacggcactacctgtaattatagttggattgtttgataaggatgttagcgcgtcactgtcaaaaaaatacccacagctttacaaggaaggaatcaggaattcattcttcaagtggagagtgattgcagtgtggggtttctttgctttctatcagtcaatagtgttcttctacttcactgcagctgcaagtcagcatggtcacggttcatctggcaagattcttggcctatgggatgttagcactatggcctttacttgtgtcgtggtaactgtgaatctccgccttctcatggcatgcaactctataacgaggtggcattacatcagtgtggctggcagtatagtggcctggtttatgtttattttcatatactctgcaataatgacgtcgtttgacagacaggaaaatgagtattttgtgatttatgttctgatgagcacctttttcttctatatgacaatcttgcttgttccgatcattgccctgtttggtgatttcctatatttatcgattcaaaggtggctattcccctacgactaccaaataattcaggagcagcacaaggacgagccccacgtgtacagcagggtgcagctacccgagaccagccacctaagcccacaggaagcgagaagctacatgatgtcgatgctccctcgggagtcatcaaagcacactggctttgccttcgactccccaggatacgagtcgttcttcgcctcgcagcaaggcgtcggcgtgccacacaagccgtgggatgtagcccggagagcaagcatgaagcagcaacgagcaggaaaatcctaatctccgccgtgtaaagttttgtatatctggtttcttgattgcaatcgcagaccacaggaattagtataggcagccctttttcgtgtttgccagtggttcacccatatgtggttttgggatgaggcatctgcccatttagggcttgttcggttacaccaatccaga

SEQ ID NO: 48591 - DNA, 2920 bp, Zea Mays
ctgaaacccgtatttttaggttaggccagggtgcatcttacaaaaatcatccacttcctcaccccctgcgtttcctccgacgtctgctctcccggcgaaggaagggaaggagccacgcgaaagaaagctgacgcccacgcgcccaggagcaccaccggtgacgcgtgatcatattcgagcaccaatcccctcatcctccccagcccccggcgctaaaatctacacaaagcctcgctaaaccggcctgattcgcgctcccgatctcgcgttcgatcccagcccaccgtgaggtcctccagcctcccgcctcccgccagatctcggtgtcgttcgttcggtttcgatttggtggtggaagggaagggatgagcgggatgagcgcacggataaaggagatggtgcgtgtggccacggcgcggctgggcggtgagcaggcggggggtggcggggcttcctcctcaggcttcgcgcgccgggagtccacggcgcggctcggcggcgggggcaccagcctccggaggcagccgcagccgatggcaccctccgtgcgcaccgtctgttgcaacgaccgcgaggccaacgcccctgtcgggtacaagggaaattctgtgtcgactacgaagtacaacatcctaactttcttacctaaaggattattcgagcaggcgggttgcaaatctttactttctcatgatctcaatcatgtcaactacacctatcagtccagttcatcctgtcactaatgttgttcccctaagtcttgtgcttctggtgtctctcatcaaggaagcttttgaggattggaagcgttttcagaatgatatgtcaattaacaatgcacatgtcgatgtattgcaaggtcaatgttgggaaagtactccatggaaacgactgcaggttggagatattgtgaggatcaagcaagatggttatttccctgctgacttgctcttcctatcaagtacaaaccctgatggtgtttgctacatcgagacagcaaatcttgatggggaaacaaatctgaaaataaggaaggctttggagaagacttgggactatgtaattcctgaaaaggcttctgagttcaaaggtgaagtgcagtgtgaacaaccaaacaattccctttatacgtttactggcaatcttatcatggacaagcagactatacctctctcaccgaaccagttactcctaagaggatgcagccttcgtaatacagaatacattgttggtgttgtcatattcaccgggcacgagacaaaagttatgatgaattccatgaatgttccctccaaaagaagtacattggagaaaaagctagacaagcttatccttgccctttttgcaaccctcttcacaatgtgtgttattggtgccattggaagtggtgtgtttattaatgaaaaatacttttatcttggattgcgtgggcatgtggaggaccagttcaatccccaaaacaaatttgtggtgaccattttaaccatgtttactctaataactctatactcaaccatcatcccaatttctctttatgtgtccattgagatgatcaaattcatacagtgcacaaaattcattaataacgatcttcatatgtaccatgctgagagtaacacccctgctttggcgcggacttctaatcttaatgaggaacttgggcaggttgaatatatattttctgacaaaactggaacgcttacaagaaacctgatggaattctttaaatgctcgattggtggagaaatgtatggaactggcatcacagagattgagaaaggaggagcagagcgggctggaattaaaattgatgatgatgagggtaaaaggtctgccaatgcagtccatgaaaaaggattcaattttgatgacgctagaatcatgcgtggtgcatggagaaatgaacctaatcttgaggcttgcaaggaattctttagatgccttgcaatctgtcatacagttcttccagagggtgaggaaactccggaaaagataagttaccaggctgcctcacctgatgaggctgcacttgtggctgctgctaagaattttggtttcttcttttacaggcgtacacccaccacagttatggttcgtgagtcacatgttgaaaggatggggagtatacaagatgttccatatgaaattctgaatgttctggaattcaacagcacgagaaagcgacaatcggtggtttgccgtttcccaaatggaagattagttctctattgcaagggtgctgataatgtcgtatatgaacgattggctgatggaaatcatgatatgaaaaagacaagcagagaacatctagagcaatttggttctgctggcttgcgtactctttgtcttgcctatcgggatcttagcagggagcaatacgaaagctggaatgaaaagtttgtacaagcaaagtcatctttacgagatcgtgataagaagctcgatgaggtggctgagttgattgaaaaagaccttatattagttgggtgcacagctatagaggacaaactgcaagaaggcgtgccaacctgcattgaaactctctctgcagctggcataaaaatttgggtgttaacgggagataagatggaaacagcaattaacattgcatatgcatgcagcttggtaaacaatgacaccaaacagttcatcattagttcagagacagacactattagggaggctgaagaccggaggttgtgcatctttatccacaagccgtgacacccatctgtcacgaggtcatgaatcccatacacctctaccgaggagtcgaggcaaggtagcactacgaggcctttccaaagttccactagtttgagaaaacccgctacggtttcaggaagaaggaagcataggaatcactcgtccgaaaagctattacatacagttcgacccagagggcctccctatactctgc

SEQ ID NO: 48592 - DNA, 4257 bp, Zea Mays
ctgaaacccgtatttttaggttaggccagggtgcatcttacaaaaatcatccacttcctcaccccctgcgtttcctccgacgtctgctctcccggcgaaggaagggaaggagccacgcgaaagaaagctgacgcccacgcgcccaggagcaccaccggtgacgcgtgatcatattcgagcaccaatcccctcatcctccccagcccccggcgctaaaatctacacaaagcctcgctaaaccggcctgattcgcgctcccgatctcgcgttcgatcccagcccaccgtgaggtcctccagcctcccgcctcccgccagatctcggtgtcgttcgttcggtttcgatttggtggtggaagggaagggatgagcgggatgagcgcacggataaaggagatggtgcgtgtggccacggcgcggctgggcggtgagcaggcggggggtggcggggcttcctcctcaggcttcgcgcgccgggagtccacggcgcggctcggcggcgggggcaccagcctccggaggcagccgcagccgatggcaccctccgtgcgcaccgtctgttgcaacgaccgcgaggccaacgcccctgtcgggtacaagggaaattctgtgtcgactacgaagtacaacatcctaactttcttacctaaaggattattcgagcaggcgggttgcaaatctttactttctcatgatctcaatcatgtcaactacacctatcagtccagttcatcctgtcactaatgttgttcccctaagtcttgtgcttctggtgtctctcatcaaggaagcttttgaggattggaagcgttttcagaatgatatgtcaattaacaatgcacatgtcgatgtattgcaaggtcaatgttgggaaagtactccatggaaacgactgcaggttggagatattgtgaggatcaagcaagatggttatttccctgctgacttgctcttcctatcaagtacaaaccctgatggtgtttgctacatcgagacagcaaatcttgatggggaaacaaatctgaaaataaggaaggctttggagaagacttgggactatgtaattcctgaaaaggcttctgagttcaaaggtgaagtgcagtgtgaacaaccaaacaattccctttatacgtttactggcaatcttatcatggacaagcagactatacctctctcaccgaaccagttactcctaagaggatgcagccttcgtaatacagaatacattgttggtgttgtcatattcaccgggcacgagacaaaagttatgatgaattccatgaatgttccctccaaaagaagtacattggagaaaaagctagacaagcttatccttgccctttttgcaaccctcttcacaatgtgtgttattggtgccattggaagtggtgtgtttattaatgaaaaatacttttatcttggattgcgtgggcatgtggaggaccagttcaatccccaaaacaaatttgtggtgaccattttaaccatgtttactctaataactctatactcaaccatcatcccaatttctctttatgtgtccattgagatgatcaaattcatacagtgcacaaaattcattaataacgatcttcatatgtaccatgctgagagtaacacccctgctttggcgcggacttctaatcttaatgaggaacttgggcaggttgaatatatattttctgacaaaactggaacgcttacaagaaacctgatggaattctttaaatgctcgattggtggagaaatgtatggaactggcatcacagagattgagaaaggaggagcagagcgggctggaattaaaattgatgatgatgagggtaaaaggtctgccaatgcagtccatgaaaaaggattcaattttgatgacgctagaatcatgcgtggtgcatggagaaatgaacctaatcttgaggcttgcaaggaattctttagatgccttgcaatctgtcatacagttcttccagagggtgaggaaactccggaaaagataagttaccaggctgcctcacctgatgaggctgcacttgtggctgctgctaagaattttggtttcttcttttacaggcgtacacccaccacagttatggttcgtgagtcacatgttgaaaggatggggagtatacaagatgttccatatgaaattctgaatgttctggaattcaacagcacgagaaagcgacaatcggtggtttgccgtttcccaaatggaagattagttctctattgcaagggtgctgataatgtcgtatatgaacgattggctgatggaaatcatgatatgaaaaagacaagcagagaacatctagagcaatttggttctgctggcttgcgtactctttgtcttgcctatcgggatcttagcagggagcaatacgaaagctggaatgaaaagtttgtacaagcaaagtcatctttacgagatcgtgataagaagctcgatgaggtggctgagttgattgaaaaagaccttatattagttgggtgcacagctatagaggacaaactgcaagaaggcgtgccaacctgcattgaaactctctctgcagctggcataaaaatttgggtgttaacgggagataagatggaaacagcaattaacattgcatatgcatgcagcttggtaaacaatgacaccaaacagttcatcattagttcagagacagacactattagggaggctgaagaccggggtgaccctgtggaaattgcacgtgttattaaagattcagtaaaacagagtctgaaaagctttcacgaggaagcccgacattctttgattagcacccctgaaaggaagttggctctcattattgatggtagatgcctgatgtatgcactggacccaactcttcgtgttgatcttcttggattgagtctaagttgccactcagttgtatgctgccgagtttctccgctgcaaaaggcacaggttacaagtttagttaggaagggcgctcagaaaataactctcagcattggtgacggtgctaatgatgtgagtatgattcaagctgctcatgttgggattggcatcagtggccaagaaggaatgcaagctgttatggctagcgactttgccattgcccagtttcgttttcttactgatttgcttcttgtacatggacggtggtcttacttgagactctgcaaggttatcacatacttcttctacaagaatctgacatttacactaactcagttctggttcactttccaaactggcttttctggtcagcggttttatgatgactggtttcagtctctatataatgttatcttcacggcactacctgtaattatagttggattgtttgataaggatgttagcgcgtcactgtcaaaaaaatacccacagctttacaaggaaggaatcaggaattcattcttcaagtggagagtgattgcagtgtggggtttctttgctttctatcagtcaatagtgttcttctacttcactgcagctgcaagtcagcatggtcacggttcatctggcaagattcttggcctatgggatgttagcactatggcctttacttgtgtcgtggtaactgtgaatctccgccttctcatggcatgcaactctataacgaggtggcattacatcagtgtggctggcagtatagtggcctggtttatgtttattttcatatactctgcaataatgacgtcgtttgacagacaggaaaatgagtattttgtgatttatgttctgatgagcacctttttcttctatatgacaatcttgcttgttccgatcattgccctgtttggtgatttcctatatttatcgattcaaaggtggctattcccctacgactaccaaataattcaggagcagcacaaggacgagccccacgtgtacagcagggtgcagctacccgagaccagccacctaagcccacaggaagcgagaagctacatgatgtcgatgctccctcgggagtcatcaaagcacactggctttgccttcgactccccaggatacgagtcgttcttcgcctcgcagcaaggcgtcggcgtgccacacaagccgtgggatgtagcccggagagcaagcatgaagcagcaacgagcaggaaaatcctaatctccgccgtgtaaagttttgtatatctggtttcttgattgcaatcgcagaccacaggaattagtataggcagccctttttcgtgtttgccagtggttcacccatatgtggttttgggatgaggcatctgcccatttagggcttgttcggttacaccaatccaga

SEQ ID NO: 48593 - DNA, 4256 bp, Zea Mays
gttaggccagggtgcatcttacaaaaatcatccacttcctcaccccctgcgtttcctccgacgtctgctctcccggcgaaggaagggaaggagccacgcgaaagaaagctgacgcccacgcgcccaggagcaccaccggtgacgcgtgatcatattcgagcaccaatcccctcatcctccccagcccccggcgctaaaatctacacaaagcctcgctaaaccggcctgattcgcgctcccgatctcgcgttcgatcccagcccaccgtgaggtcctccagcctcccgcctcccgccagatctcggtgtcgttcgttcggtttcgatttggtggtggaagggaagggatgagcgggatgagcgcacggataaaggagatggtgcgtgtggccacggcgcggctgggcggtgagcaggcggggggtggcggggcttcctcctcaggcttcgcgcgccgggagtccacggcgcggctcggcggcgggggcaccagcctccggaggcagccgcagccgatggcaccctccgtgcgcaccgtctgttgcaacgaccgcgaggccaacgcccctgtcgggtacaagggaaattctgtgtcgactacgaagtacaacatcctaactttcttacctaaaggattattcgagcagttcaggcgggttgcaaatctttactttctcatgatctcaatcatgtcaactacacctatcagtccagttcatcctgtcactaatgttgttcccctaagtcttgtgcttctggtgtctctcatcaaggaagcttttgaggattggaagcgttttcagaatgatatgtcaattaacaatgcacatgtcgatgtattgcaaggtcaatgttgggaaagtactccatggaaacgactgcaggttggagatattgtgaggatcaagcaagatggttatttccctgctgacttgctcttcctatcaagtacaaaccctgatggtgtttgctacatcgagacagcaaatcttgatggggaaacaaatctgaaaataaggaaggctttggagaagacttgggactatgtaattcctgaaaaggcttctgagttcaaaggtgaagtgcagtgtgaacaaccaaacaattccctttatacgtttactggcaatcttatcatggacaagcagactatacctctctcaccgaaccagttactcctaagaggatgcagccttcgtaatacagaatacattgttggtgttgtcatattcaccgggcacgagacaaaaaaaaccgttgcaggttatgatgaattccatgaatgttccctccaaaagaagtacattggagaaaaagctagacaagcttatccttgccctttttgcaaccctcttcacaatgtgtgttattggtgccattggaagtggtgtgtttattaatgaaaaatacttttatcttggattgcgtgggcatgtggaggaccagttcaatccccaaaacaaatttgtggtgaccattttaaccatgtttactctaataactctatactcaaccatcatcccaatttctctttatgtgtccattgagatgatcaaattcatacagtgcacaaaattcattaataacgatcttcatatgtaccatgctgagagtaacacccctgctttggcgcggacttctaatcttaatgaggaacttgggcaggttgaatatatattttctgacaaaactggaacgcttacaagaaacctgatggaattctttaaatgctcgattggtggagaaatgtatggaactggcatcacagagattgagaaaggaggagcagagcgggctggaattaaaattgatgatgatgagggtaaaaggtctgccaatgcagtccatgaaaaaggattcaattttgatgacgctagaatcatgcgtggtgcatggagaaatgaacctaatcttgaggcttgcaaggaattctttagatgccttgcaatctgtcatacagttcttccagagggtgaggaaactccggaaaagataagttaccaggctgcctcacctgatgaggctgcacttgtggctgctgctaagaattttggtttcttcttttacaggcgtacacccaccacagttatggttcgtgagtcacatgttgaaaggatggggagtatacaagatgttccatatgaaattctgaatgttctggaattcaacagcacgagaaagcgacaatcggtggtttgccgtttcccaaatggaagattagttctctattgcaagggtgctgataatgtcgtatatgaacgattggctgatggaaatcatgatatgaaaaagacaagcagagaacatctagagcaatttggttctgctggcttgcgtactctttgtcttgcctatcgggatcttagcagggagcaatacgaaagctggaatgaaaagtttgtacaagcaaagtcatctttacgagatcgtgataagaagctcgatgaggtggctgagttgattgaaaaagaccttatattagttgggtgcacagctatagaggacaaactgcaagaaggcgtgccaacctgcattgaaactctctctgcagctggcataaaaatttgggtgttaacgggagataagatggaaacagcaattaacattgcatatgcatgcagcttggtaaacaatgacaccaaacagttcatcattagttcagagacagacactattagggaggctgaagaccggggtgaccctgtggaaattgcacgtgttattaaagattcagtaaaacagagtctgaaaagctttcacgaggaagcccgacattctttgattagcacccctgaaaggaagttggctctcattattgatggtagatgcctgatgtatgcactggacccaactcttcgtgttgatcttcttggattgagtctaagttgccactcagttgtatgctgccgagtttctccgctgcaaaaggcacaggttacaagtttagttaggaagggcgctcagaaaataactctcagcattggtgacggtgctaatgatgtgagtatgattcaagctgctcatgttgggattggcatcagtggccaagaaggaatgcaagctgttatggctagcgactttgccattgcccagtttcgttttcttactgatttgcttcttgtacatggacggtggtcttacttgagactctgcaaggttatcacatacttcttctacaagaatctgacatttacactaactcagttctggttcactttccaaactggcttttctggtcagcggttttatgatgactggtttcagtctctatataatgttatcttcacggcactacctgtaattatagttggattgtttgataaggatgttagcgcgtcactgtcaaaaaaatacccacagctttacaaggaaggaatcaggaattcattcttcaagtggagagtgattgcagtgtggggtttctttgctttctatcagtcaatagtgttcttctacttcactgcagctgcaagtcagcatggtcacggttcatctggcaagattcttggcctatgggatgttagcactatggcctttacttgtgtcgtggtaactgtgaatctccgccttctcatggcatgcaactctataacgaggtggcattacatcagtgtggctggcagtatagtggcctggtttatgtttattttcatatactctgcaataatgacgtcgtttgacagacaggaaaatgagtattttgtgatttatgttctgatgagcacctttttcttctatatgacaatcttgcttgttccgatcattgccctgtttggtgatttcctatatttatcgattcaaaggtggctattcccctacgactaccaaataattcaggagcagcacaaggacgagccccacgtgtacagcagggtgcagctacccgagaccagccacctaagcccacaggaagcgagaagctacatgatgtcgatgctccctcgggagtcatcaaagcacactggctttgccttcgactccccaggatacgagtcgttcttcgcctcgcagcaaggcgtcggcgtgccacacaagccgtgggatgtagcccggagagcaagcatgaagcagcaacgagcaggaaaatcctaatctccgccgtgtaaagttttgtatatctggtttcttgattgcaatcgcagaccacaggaattagtataggcagccctttttcgtgtttgccagtggttcacccatatgtggttttgggatgaggcatctgcccatttagggcttgttcggttacaccaatccaga

SEQ ID NO: 48594 - DNA, 4164 bp, Zea Mays
aaatcatccacttcctcaccccctgcgtttcctccgacgtctgctctcccggcgaaggaagggaaggagccacgcgaaagaaagctgacgcccacgcgcccaggagcaccaccggtgacgcgtgatcatattcgagcaccaatcccctcatcctccccagcccccggcgctaaaatctacacaaagcctcgctaaaccggcctgattcgcgctcccgatctcgcgttcgatcccagcccaccgtgaggtcctccagcctcccgcctcccgccagatctcggtgtcgttcgttcggtttcgatttggtggtggaagggaagggatgagcgggatgagcgcacggataaaggagatggtgcgtgtggccacggcgcggctgggcggtgagcaggcggggggtggcggggcttcctcctcaggcttcgcgcgccgggagtccacggcgcggctcggcggcgggggcaccagcctccggaggcagccgcagccgatggcaccctccgtgcgcaccgtctgttgcaacgaccgcgaggccaacgcccctgtcgggtacaagggaaattctgtgtcgactacgaagtacaacatcctaactttcttacctaaaggattattcgagcagttcaggcgggttgcaaatctttactttctcatgatctcaatcatgtcaactacacctatcagtccagttcatcctgtcactaatgttgttcccctaagtcttgtgcttctggtgtctctcatcaaggaagcttttgaggattgggtcaatgttgggaaagtactccatggaaacgactgcaggttggagatattgtgaggatcaagcaagatggttatttccctgctgacttgctcttcctatcaagtacaaaccctgatggtgtttgctacatcgagacagcaaatcttgatggggaaacaaatctgaaaataaggaaggctttggagaagacttgggactatgtaattcctgaaaaggcttctgagttcaaaggtgaagtgcagtgtgaacaaccaaacaattccctttatacgtttactggcaatcttatcatggacaagcagactatacctctctcaccgaaccagttactcctaagaggatgcagccttcgtaatacagaatacattgttggtgttgtcatattcaccgggcacgagacaaaagttatgatgaattccatgaatgttccctccaaaagaagtacattggagaaaaagctagacaagcttatccttgccctttttgcaaccctcttcacaatgtgtgttattggtgccattggaagtggtgtgtttattaatgaaaaatacttttatcttggattgcgtgggcatgtggaggaccagttcaatccccaaaacaaatttgtggtgaccattttaaccatgtttactctaataactctatactcaaccatcatcccaatttctctttatgtgtccattgagatgatcaaattcatacagtgcacaaaattcattaataacgatcttcatatgtaccatgctgagagtaacacccctgctttggcgcggacttctaatcttaatgaggaacttgggcaggttgaatatatattttctgacaaaactggaacgcttacaagaaacctgatggaattctttaaatgctcgattggtggagaaatgtatggaactggcatcacagagattgagaaaggaggagcagagcgggctggaattaaaattgatgatgatgagggtaaaaggtctgccaatgcagtccatgaaaaaggattcaattttgatgacgctagaatcatgcgtggtgcatggagaaatgaacctaatcttgaggcttgcaaggaattctttagatgccttgcaatctgtcatacagttcttccagagggtgaggaaactccggaaaagataagttaccaggctgcctcacctgatgaggctgcacttgtggctgctgctaagaattttggtttcttcttttacaggcgtacacccaccacagttatggttcgtgagtcacatgttgaaaggatggggagtatacaagatgttccatatgaaattctgaatgttctggaattcaacagcacgagaaagcgacaatcggtggtttgccgtttcccaaatggaagattagttctctattgcaagggtgctgataatgtcgtatatgaacgattggctgatggaaatcatgatatgaaaaagacaagcagagaacatctagagcaatttggttctgctggcttgcgtactctttgtcttgcctatcgggatcttagcagggagcaatacgaaagctggaatgaaaagtttgtacaagcaaagtcatctttacgagatcgtgataagaagctcgatgaggtggctgagttgattgaaaaagaccttatattagttgggtgcacagctatagaggacaaactgcaagaaggcgtgccaacctgcattgaaactctctctgcagctggcataaaaatttgggtgttaacgggagataagatggaaacagcaattaacattgcatatgcatgcagcttggtaaacaatgacaccaaacagttcatcattagttcagagacagacactattagggaggctgaagaccggggtgaccctgtggaaattgcacgtgttattaaagattcagtaaaacagagtctgaaaagctttcacgaggaagcccgacattctttgattagcacccctgaaaggaagttggctctcattattgatggtagatgcctgatgtatgcactggacccaactcttcgtgttgatcttcttggattgagtctaagttgccactcagttgtatgctgccgagtttctccgctgcaaaaggcacaggttacaagtttagttaggaagggcgctcagaaaataactctcagcattggtgacggtgctaatgatgtgagtatgattcaagctgctcatgttgggattggcatcagtggccaagaaggaatgcaagctgttatggctagcgactttgccattgcccagtttcgttttcttactgatttgcttcttgtacatggacggtggtcttacttgagactctgcaaggttatcacatacttcttctacaagaatctgacatttacactaactcagttctggttcactttccaaactggcttttctggtcagcggttttatgatgactggtttcagtctctatataatgttatcttcacggcactacctgtaattatagttggattgtttgataaggatgttagcgcgtcactgtcaaaaaaatacccacagctttacaaggaaggaatcaggaattcattcttcaagtggagagtgattgcagtgtggggtttctttgctttctatcagtcaatagtgttcttctacttcactgcagctgcaagtcagcatggtcacggttcatctggcaagattcttggcctatgggatgttagcactatggcctttacttgtgtcgtggtaactgtgaatctccgccttctcatggcatgcaactctataacgaggtggcattacatcagtgtggctggcagtatagtggcctggtttatgtttattttcatatactctgcaataatgacgtcgtttgacagacaggaaaatgagtattttgtgatttatgttctgatgagcacctttttcttctatatgacaatcttgcttgttccgatcattgccctgtttggtgatttcctatatttatcgattcaaaggtggctattcccctacgactaccaaataattcaggagcagcacaaggacgagccccacgtgtacagcagggtgcagctacccgagaccagccacctaagcccacaggaagcgagaagctacatgatgtcgatgctccctcgggagtcatcaaagcacactggctttgccttcgactccccaggatacgagtcgttcttcgcctcgcagcaaggcgtcggcgtgccacacaagccgtgggatgtagcccggagagcaagcatgaagcagcaacgagcaggaaaatcctaatctccgccgtgtaaagttttgtatatctggtttcttgattgcaatcgcagaccacaggaattagtataggcagccctttttcgtgtttgccagtggttcacccatatgtggttttgggatgaggcatctgcccatttagggcttgttcggttacaccaatccaga

SEQ ID NO: 48595 - DNA, 2880 bp, Zea Mays
ctcaccccctgcgtttcctccgacgtctgctctcccggcgaaggaagggaaggagccacgcgaaagaaagctgacgcccacgcgcccaggagcaccaccggtgacgcgtgatcatattcgagcaccaatcccctcatcctccccagcccccggcgctaaaatctacacaaagcctcgctaaaccggcctgattcgcgctcccgatctcgcgttcgatcccagcccaccgtgaggtcctccagcctcccgcctcccgccagatctcggtgtcgttcgttcggtttcgatttggtggtggaagggaagggatgagcgggatgagcgcacggataaaggagatggtgcgtgtggccacggcgcggctgggcggtgagcaggcggggggtggcggggcttcctcctcaggcttcgcgcgccgggagtccacggcgcggctcggcggcgggggcaccagcctccggaggcagccgcagccgatggcaccctccgtgcgcaccgtctgttgcaacgaccgcgaggccaacgcccctgtcgggtacaagggaaattctgtgtcgactacgaagtacaacatcctaactttcttacctaaaggattattcgagcagttcaggcgggttgcaaatctttactttctcatgatctcaatcatgtcaactacacctatcagtccagttcatcctgtcactaatgttgttcccctaagtcttgtgcttctggtgtctctcatcaaggaagcttttgaggattggaagcgttttcagaatgatatgtcaattaacaatgcacatgtcgatgtattgcaaggtcaatgttgggaaagtactccatggaaacgactgcaggttggagatattgtgaggatcaagcaagatggttatttccctgctgacttgctcttcctatcaagtacaaaccctgatggtgtttgctacatcgagacagcaaatcttgatggggaaacaaatctgaaaataaggaaggctttggagaagacttgggactatgtaattcctgaaaaggcttctgagttcaaaggtgaagtgcagtgtgaacaaccaaacaattccctttatacgtttactggcaatcttatcatggacaagcagactatacctctctcaccgaaccagttactcctaagaggatgcagccttcgtaatacagaatacattgttggtgttgtcatattcaccgggcacgagacaaaagttatgatgaattccatgaatgttccctccaaaagaagtacattggagaaaaagctagacaagcttatccttgccctttttgcaaccctcttcacaatgtgtgttattggtgccattggaagtggtgtgtttattaatgaaaaatacttttatcttggattgcgtgggcatgtggaggaccagttcaatccccaaaacaaatttgtggtgtgaccattttaaccatgtttactctaataactctatactcaaccatcatcccaatttctctttatgtgtccattgagatgatcaaattcatacagtgcacaaaattcattaataacgatcttcatatgtaccatgctgagagtaacacccctgctttggcgcggacttctaatcttaatgaggaacttgggcaggttgaatatatattttctgacaaaactggaacgcttacaagaaacctgatggaattctttaaatgctcgattggtggagaaatgtatggaactggcatcacagagattgagaaaggaggagcagagcgggctggaattaaaattgatgatgatgagggtaaaaggtctgccaatgcagtccatgaaaaaggattcaattttgatgacgctagaatcatgcgtggtgcatggagaaatgaacctaatcttgaggcttgcaaggaattctttagatgccttgcaatctgtcatacagttcttccagagggtgaggaaactccggaaaagataagttaccaggctgcctcacctgatgaggctgcacttgtggctgctgctaagaattttggtttcttcttttacaggcgtacacccaccacagttatggttcgtgagtcacatgttgaaaggatggggagtatacaagatgttccatatgaaattctgaatgttctggaattcaacagcacgagaaagcgacaatcggtggtttgccgtttcccaaatggaagattagttctctattgcaagggtgctgataatgtcgtatatgaacgattggctgatggaaatcatgatatgaaaaagacaagcagagaacatctagagcaatttggttctgctggcttgcgtactctttgtcttgcctatcgggatcttagcagggagcaatacgaaagctggaatgaaaagtttgtacaagcaaagtcatctttacgagatcgtgataagaagctcgatgaggtggctgagttgattgaaaaagaccttatattagttgggtgcacagctatagaggacaaactgcaagaaggcgtgccaacctgcattgaaactctctctgcagctggcataaaaatttgggtgttaacgggagataagatggaaacagcaattaacattgcatatgcatgcagcttggtaaacaatgacaccaaacagttcatcattagttcagagacagacactattagggaggctgaagaccggggtgaccctgtggaaattgcacgtgttattaaagattcagtaaaacagagtctgaaaagctttcacgaggaagcccgacattctttgattagcacccctgaaaggaagttggctctcattattgatggtagatgcctgatgtatgcactggacccaactcttcgtgttgatcttcttggattgagtctaagttgccactcagttgtatgctgccgagtttctccgctgcaaaaggc

SEQ ID NO: 48596 - DNA, 1257 bp, Zea Mays
tttcctccgacgtctgctctcccggcgaaggaagggaaggagccacgcgaaagaaagctgacgcccacgcgcccaggagcaccaccggtgacgcgtgatcatattcgagcaccaatcccctcatcctccccagcccccggcgctaaaatctacacaaagcctcgctaaaccggcctgattcgcgctcccgatctcgcgttcgatcccagcccaccgtgaggtcctccagcctcccgcctcccgccagatctcggtgtcgttcgttcggtttcgatttggtggtggaagggaagggatgagcgggatgagcgcacggataaaggagatggtgcgtgtggccacggcgcggctgggcggtgagcaggcggggggtggcggggcttcctcctcaggcttcgcgcgccgggagtccacggcgcggctcggcggcgggggcaccagcctccggaggcagccgcagccgatggcaccctccgtgcgcaccgtctgttgcaacgaccgcgaggccaacgcccctgtcgggtacaagggaaattctgtgtcgactacgaagtacaacatcctaactttcttacctaaaggattattcgagcagttcaggcgggttgcaaatctttactttctcatgatctcaatcatgtcaactacacctatcagtccagttcatcctgtcactaatgttgttcccctaagtcttgtgcttctggtgtctctcatcaaggaagcttttgaggattgggtcaatgttgggaaagtactccatggaaacgactgcaggttggagatattgtgaggatcaagcaagatggttatttccctgctgacttgctcttcctatcaagtacaaaccctgatggtgtttgctacatcgagacagcaaatcttgatggggaaacaaatctgaaaataaggaaggctttggagaagacttgggactatgtaattcctgaaaaggcttctgagttcaaaggtgaagtgcagtgtgaacaaccaaacaattccctttatacgtttactggcaatcttatcatggacaagcagactatacctctctcaccgaaccagttactcctaagaggatgcagccttcgtaatacagaatacattgttggtgtaaccgaacatacccttagctgttaaagcatcatgtagggatacttggtagataaaccaaggtggtattgaaaatgcagttaggaaagttttttcaggcgttcattgcgtgatgcatactgcttttacactgttcaagttgac

SEQ ID NO: 48597 - DNA, 4225 bp, Zea Mays
gggaaggagccacgcgaaagaaagctgacgcccacgcgcccaggagcaccaccggtgacgcgtgatcatattcgagcaccaatcccctcatcctccccagcccccggcgctaaaatctacacaaagcctcgctaaaccggcctgattcgcgctcccgatctcgcgttcgatcccagcccaccgtgaggtcctccagcctcccgcctcccgccagatctcggtgtcgttcgttcggtttcgatttggtggtggaagggaagggatgagcgggatgagcgcacggataaaggagatggtgcgtgtggccacggcgcggctgggcggtgagcaggcggggggtggcggggcttcctcctcaggcttcgcgcgccgggagtccacggcgcggctcggcggcgggggcaccagcctccggaggcagccgcagccgatggcaccctccgtgcgcaccgtctgttgcaacgaccgcgaggccaacgcccctgtcgggtacaagatattgattatagagttatttgaagctgatactctaagagcatctccaacaagggaaattctgtgtcgactacgaagtacaacatcctaactttcttacctaaaggattattcgagcagttcaggcgggttgcaaatctttactttctcatgatctcaatcatgtcaactacacctatcagtccagttcatcctgtcactaatgttgttcccctaagtcttgtgcttctggtgtctctcatcaaggaagcttttgaggattggaagcgttttcagaatgatatgtcaattaacaatgcacatgtcgatgtattgcaaggtcaatgttgggaaagtactccatggaaacgactgcaggttggagatattgtgaggatcaagcaagatggttatttccctgctgacttgctcttcctatcaagtacaaaccctgatggtgtttgctacatcgagacagcaaatcttgatggggaaacaaatctgaaaataaggaaggctttggagaagacttgggactatgtaattcctgaaaaggcttctgagttcaaaggtgaagtgcagtgtgaacaaccaaacaattccctttatacgtttactggcaatcttatcatggacaagcagactatacctctctcaccgaaccagttactcctaagaggatgcagccttcgtaatacagaatacattgttggtgttgtcatattcaccgggcacgagacaaaaaaaaccgttgcaggttatgatgaattccatgaatgttccctccaaaagaagtacattggagaaaaagctagacaagcttatccttgccctttttgcaaccctcttcacaatgtgtgttattggtgccattggaagtggtgtgtttattaatgaaaaatacttttatcttggattgcgtgggcatgtggaggaccagttcaatccccaaaacaaatttgtggtgaccattttaaccatgtttactctaataactctatactcaaccatcatcccaatttctctttatgtgtccattgagatgatcaaattcatacagtgcacaaaattcattaataacgatcttcatatgtaccatgctgagagtaacacccctgctttggcgcggacttctaatcttaatgaggaacttgggcaggttgaatatatattttctgacaaaactggaacgcttacaagaaacctgatggaattctttaaatgctcgattggtggagaaatgtatggaactggcatcacagagattgagaaaggaggagcagagcgggctggaattaaaattgatgatgatgagggtaaaaggtctgccaatgcagtccatgaaaaaggattcaattttgatgacgctagaatcatgcgtggtgcatggagaaatgaacctaatcttgaggcttgcaaggaattctttagatgccttgcaatctgtcatacagttcttccagagggtgaggaaactccggaaaagataagttaccaggctgcctcacctgatgaggctgcacttgtggctgctgctaagaattttggtttcttcttttacaggcgtacacccaccacagttatggttcgtgagtcacatgttgaaaggatggggagtatacaagatgttccatatgaaattctgaatgttctggaattcaacagcacgagaaagcgacaatcggtggtttgccgtttcccaaatggaagattagttctctattgcaagggtgctgataatgtcgtatatgaacgattggctgatggaaatcatgatatgaaaaagacaagcagagaacatctagagcaatttggttctgctggcttgcgtactctttgtcttgcctatcgggatcttagcagggagcaatacgaaagctggaatgaaaagtttgtacaagcaaagtcatctttacgagatcgtgataagaagctcgatgaggtggctgagttgattgaaaaagaccttatattagttgggtgcacagctatagaggacaaactgcaagaaggcgtgccaacctgcattgaaactctctctgcagctggcataaaaatttgggtgttaacgggagataagatggaaacagcaattaacattgcatatgcatgcagcttggtaaacaatgacaccaaacagttcatcattagttcagagacagacactattagggaggctgaagaccggggtgaccctgtggaaattgcacgtgttattaaagattcagtaaaacagagtctgaaaagctttcacgaggaagcccgacattctttgattagcacccctgaaaggaagttggctctcattattgatggtagatgcctgatgtatgcactggacccaactcttcgtgttgatcttcttggattgagtctaagttgccactcagttgtatgctgccgagtttctccgctgcaaaaggcacaggttacaagtttagttaggaagggcgctcagaaaataactctcagcattggtgacggtgctaatgatgtgagtatgattcaagctgctcatgttgggattggcatcagtggccaagaaggaatgcaagctgttatggctagcgactttgccattgcccagtttcgttttcttactgatttgcttcttgtacatggacggtggtcttacttgagactctgcaaggttatcacatacttcttctacaagaatctgacatttacactaactcagttctggttcactttccaaactggcttttctggtcagcggttttatgatgactggtttcagtctctatataatgttatcttcacggcactacctgtaattatagttggattgtttgataaggatgttagcgcgtcactgtcaaaaaaatacccacagctttacaaggaaggaatcaggaattcattcttcaagtggagagtgattgcagtgtggggtttctttgctttctatcagtcaatagtgttcttctacttcactgcagctgcaagtcagcatggtcacggttcatctggcaagattcttggcctatgggatgttagcactatggcctttacttgtgtcgtggtaactgtgaatctccgccttctcatggcatgcaactctataacgaggtggcattacatcagtgtggctggcagtatagtggcctggtttatgtttattttcatatactctgcaataatgacgtcgtttgacagacaggaaaatgagtattttgtgatttatgttctgatgagcacctttttcttctatatgacaatcttgcttgttccgatcattgccctgtttggtgatttcctatatttatcgattcaaaggtggctattcccctacgactaccaaataattcaggagcagcacaaggacgagccccacgtgtacagcagggtgcagctacccgagaccagccacctaagcccacaggaagcgagaagctacatgatgtcgatgctccctcgggagtcatcaaagcacactggctttgccttcgactccccaggatacgagtcgttcttcgcctcgcagcaaggcgtcggcgtgccacacaagccgtgggatgtagcccggagagcaagcatgaagcagcaacgagcaggaaaatcctaatctccgccgtgtaaagttttgtatatctggtttcttgattgcaatcgcagaccacaggaattagtataggcagccctttttcgtgtttgccagtggttcacccatatgtggttttgggatgaggcatctgcccatttagggcttgttcggttacaccaatccaga

SEQ ID NO: 48598 - DNA, 4152 bp, Zea Mays
gggaaggagccacgcgaaagaaagctgacgcccacgcgcccaggagcaccaccggtgacgcgtgatcatattcgagcaccaatcccctcatcctccccagcccccggcgctaaaatctacacaaagcctcgctaaaccggcctgattcgcgctcccgatctcgcgttcgatcccagcccaccgtgaggtcctccagcctcccgcctcccgccagatctcggtgtcgttcgttcggtttcgatttggtggtggaagggaagggatgagcgggatgagcgcacggataaaggagatggtgcgtgtggccacggcgcggctgggcggtgagcaggcggggggtggcggggcttcctcctcaggcttcgcgcgccgggagtccacggcgcggctcggcggcgggggcaccagcctccggaggcagccgcagccgatggcaccctccgtgcgcaccgtctgttgcaacgaccgcgaggccaacgcccctgtcgggtacaagggaaattctgtgtcgactacgaagtacaacatcctaactttcttacctaaaggattattcgagcagttcaggcgggttgcaaatctttactttctcatgatctcaatcatgtcaactacacctatcagtccagttcatcctgtcactaatgttgttcccctaagtcttgtgcttctggtgtctctcatcaaggaagcttttgaggattgggtcaatgttgggaaagtactccatggaaacgactgcaggttggagatattgtgaggatcaagcaagatggttatttccctgctgacttgctcttcctatcaagtacaaaccctgatggtgtttgctacatcgagacagcaaatcttgatggggaaacaaatctgaaaataaggaaggctttggagaagacttgggactatgtaattcctgaaaaggcttctgagttcaaaggtgaagtgcagtgtgaacaaccaaacaattccctttatacgtttactggcaatcttatcatggacaagcagactatacctctctcaccgaaccagttactcctaagaggatgcagccttcgtaatacagaatacattgttggtgttgtcatattcaccgggcacgagacaaaagttatgatgaattccatgaatgttccctccaaaagaagtacattggagaaaaagctagacaagcttatccttgccctttttgcaaccctcttcacaatgtgtgttattggtgccattggaagtggtgtgtttattaatgaaaaatacttttatcttggattgcgtgggcatgtggaggaccagttcaatccccaaaacaaatttgtggtgaccattttaaccatgtttactctaataactctatactcaaccatcatcccaatttctctttatgtgtccattgagatgatcaaattcatacagtgcacaaaattcattaataacgatcttcatatgtaccatgctgagagtaacacccctgctttggcgcggacttctaatcttaatgaggaacttgggcaggttgaatatatattttctgacaaaactggaacgcttacaagaaacctgatggaattctttaaatgctcgattggtggagaaatgtatggaactggcatcacagagattgagaaaggaggagcagagcgggctggaattaaaattgatgatgatgagggtaaaaggtctgccaatgcagtccatgaaaaaggattcaattttgatgacgctagaatcatgcgtggtgcatggagaaatgaacctaatcttgaggcttgcaagttcttccagagggtgaggaaactccggaaaagataagttaccaggctgcctcacctgatgaggctgcacttgtggctgctgctaagaattttggtttcttcttttacaggcgtacacccaccacagttatggttcgtgagtcacatgttgaaaggatggggagtatacaagatgttccatatgaaattctgaatgttctggaattcaacagcacgagaaagcgacaatcggtggtttgccgtttcccaaatggaagattagttctctattgcaagggtgctgataatgtcgtatatgaacgattggctgatggaaatcatgatatgaaaaagacaagcagagaacatctagagcaatttggttctgctggcttgcgtactctttgtcttgcctatcgggatcttagcagggagcaatacgaaagctggaatgaaaagtttgtacaagcaaagtcatctttacgagatcgtgataagaagctcgatgagaatctatctttttcattggtttatgtgaactttatcatgcaaatcactggctatctgcaattctgcattctagaaagaataggtggctgagttgattgaaaaagaccttatattagttgggtgcacagctatagaggacaaactgcaagaaggcgtgccaacctgcattgaaactctctctgcagctggcataaaaatttgggtgttaacgggagataagatggaaacagcaattaacattgcatatgcatgcagcttggtaaacaatgacaccaaacagttcatcattagttcagagacagacactattagggaggctgaagaccggggtgaccctgtggaaattgcacgtgttattaaagattcagtaaaacagagtctgaaaagctttcacgaggaagcccgacattctttgattagcacccctgaaaggaagttggctctcattattgatggtagatgcctgatgtatgcactggacccaactcttcgtgttgatcttcttggattgagtctaagttgccactcagttgtatgctgccgagtttctccgctgcaaaaggcacaggttacaagtttagttaggaagggcgctcagaaaataactctcagcattggtgacggtgctaatgatgtgagtatgattcaagctgctcatgttgggattggcatcagtggccaagaaggaatgcaagctgttatggctagcgactttgccattgcccagtttcgttttcttactgatttgcttcttgtacatggacggtggtcttacttgagactctgcaaggttatcacatacttcttctacaagaatctgacatttacactaactcagttctggttcactttccaaactggcttttctggtcagcggttttatgatgactggtttcagtctctatataatgttatcttcacggcactacctgtaattatagttggattgtttgataaggatgttagcgcgtcactgtcaaaaaaatacccacagctttacaaggaaggaatcaggaattcattcttcaagtggagagtgattgcagtgtggggtttctttgctttctatcagtcaatagtgttcttctacttcactgcagctgcaagtcagcatggtcacggttcatctggcaagattcttggcctatgggatgttagcactatggcctttacttgtgtcgtggtaactgtgaatctccgccttctcatggcatgcaactctataacgaggtggcattacatcagtgtggctggcagtatagtggcctggtttatgtttattttcatatactctgcaataatgacgtcgtttgacagacaggaaaatgagtattttgtgatttatgttctgatgagcacctttttcttctatatgacaatcttgcttgttccgatcattgccctgtttggtgatttcctatatttatcgattcaaaggtggctattcccctacgactaccaaataattcaggagcagcacaaggacgagccccacgtgtacagcagggtgcagctacccgagaccagccacctaagcccacaggaagcgagaagctacatgatgtcgatgctccctcgggagtcatcaaagcacactggctttgccttcgactccccaggatacgagtcgttcttcgcctcgcagcaaggcgtcggcgtgccacacaagccgtgggatgtagcccggagagcaagcatgaagcagcaacgagcaggaaaatcctaatctccgccgtgtaaagttttgtatatctggtttcttgattgcaatcgcagaccacaggaattagtataggcagccctttttcgtgtttgccagtggttcacccatatgtggttttgggatgaggcatctgcccatttagggcttgttcggttacaccaatccaga

SEQ ID NO: 48599 - DNA, 1274 bp, Zea Mays
gggaaggagccacgcgaaagaaagctgacgcccacgcgcccaggagcaccaccggtgacgcgtgatcatattcgagcaccaatcccctcatcctccccagcccccggcgctaaaatctacacaaagcctcgctaaaccggcctgattcgcgctcccgatctcgcgttcgatcccagcccaccgtgaggtcctccagcctcccgcctcccgccagatctcggtgtcgttcgttcggtttcgatttggtggtggaagggaagggatgagcgggatgagcgcacggataaaggagatggtgcgtgtggccacggcgcggctgggcggtgagcaggcggggggtggcggggcttcctcctcaggcttcgcgcgccgggagtccacggcgcggctcggcggcgggggcaccagcctccggaggcagccgcagccgatggcaccctccgtgcgcaccgtctgttgcaacgaccgcgaggccaacgcccctgtcgggtacaagggaaattctgtgtcgactacgaagtacaacatcctaactttcttacctaaaggattattcgagcaggcgggttgcaaatctttactttctcatgatctcaatcatgtcaactacacctatcagtccagttcatcctgtcactaatgttgttcccctaagtcttgtgcttctggtgtctctcatcaaggaagcttttgaggattggaagcgttttcagaatgatatgtcaattaacaatgcacatgtcgatgtattgcaaggtcaatgttgggaaagtactccatggaaacgactgcaggttggagatattgtgaggatcaagcaagatggttatttccctgctgacttgctcttcctatcaagtacaaaccctgatggtgtttgctacatcgagacagcaaatcttgatggggaaacaaatctgaaaataaggaaggctttggagaagacttgggactatgtaattcctgaaaaggcttctgagttcaaaggtgaagtgcagtgtgaacaaccaaacaattccctttatacgtttactggcaatcttatcatggacaagcagactatacctctctcaccgaaccagttactcctaagaggatgcagccttcgtaatacagaatacattgttggtgtaaccgaacatacccttagctgttaaagcatcatgtagggatacttggtagataaaccaaggtggtattgaaaatgcagttaggaaagttttttcaggcgttcattgcgtgatgcatactgcttttacactgttcaagttgac

SEQ ID NO: 48600 - DNA, 3536 bp, Zea Mays
ctgatactctaagagcatctccaacaagggaaattctgtgtcgactacgaagtacaacatcctaactttcttacctaaaggattattcgagcaggcgggttgcaaatctttactttctcatgatctcaatcatgtcaactacacctatcagtccagttcatcctgtcactaatgttgttcccctaagtcttgtgcttctggtgtctctcatcaaggaagcttttgaggattggaagcgttttcagaatgatatgtcaattaacaatgcacatgtcgatgtattgcaaggtcaatgttgggaaagtactccatggaaacgactgcaggttggagatattgtgaggatcaagcaagatggttatttccctgctgacttgctcttcctatcaagtacaaaccctgatggtgtttgctacatcgagacagcaaatcttgatggggaaacaaatctgaaaataaggaaggctttggagaagacttgggactatgtaattcctgaaaaggcttctgagttcaaaggtgaagtgcagtgtgaacaaccaaacaattccctttatacgtttactggcaatcttatcatggacaagcagactatacctctctcaccgaaccagttactcctaagaggatgcagccttcgtaatacagaatacattgttggtgttgtcatattcaccgggcacgagacaaaaaaaaccgttgcaggttatgatgaattccatgaatgttccctccaaaagaagtacattggagaaaaagctagacaagcttatccttgccctttttgcaaccctcttcacaatgtgtgttattggtgccattggaagatgatcaaattcatacagtgcacaaaattcattaataacgatcttcatatgtaccatgctgagagtaacacccctgctttggcgcggacttctaatcttaatgaggaacttgggcaggttgaatatatattttctgacaaaactggaacgcttacaagaaacctgatggaattctttaaatgctcgattggtggagaaatgtatggaactggcatcacagagattgagaaaggaggagcagagcgggctggaattaaaattgatgatgatgagggtaaaaggtctgccaatgcagtccatgaaaaaggattcaattttgatgacgctagaatcatgcgtggtgcatggagaaatgaacctaatcttgaggcttgcaaggaattctttagatgccttgcaatctgtcatacagttcttccagagggtgaggaaactccggaaaagataagttaccaggctgcctcacctgatgaggctgcacttgtggctgctgctaagaattttggtttcttcttttacaggcgtacacccaccacagttatggttcgtgagtcacatgttgaaaggatggggagtatacaagatgttccatatgaaattctgaatgttctggaattcaacagcacgagaaagcgacaatcggtggtttgccgtttcccaaatggaagattagttctctattgcaagggtgctgataatgtcgtatatgaacgattggctgatggaaatcatgatatgaaaaagacaagcagagaacatctagagcaatttggttctgctggcttgcgtactctttgtcttgcctatcgggatcttagcagggagcaatacgaaagctggaatgaaaagtttgtacaagcaaagtcatctttacgagatcgtgataagaagctcgatgaggtggctgagttgattgaaaaagaccttatattagttgggtgcacagctatagaggacaaactgcaagaaggcgtgccaacctgcattgaaactctctctgcagctggcataaaaatttgggtgttaacgggagataagatggaaacagcaattaacattgcatatgcatgcagcttggtaaacaatgacaccaaacagttcatcattagttcagagacagacactattagggaggctgaagaccggggtgaccctgtggaaattgcacgtgttattaaagattcagtaaaacagagtctgaaaagctttcacgaggaagcccgacattctttgattagcacccctgaaaggaagttggctctcattattgatggtagatgcctgatgtatgcactggacccaactcttcgtgttgatcttcttggattgagtctaagttgccactcagttgtatgctgccgagtttctccgctgcaaaaggcacaggttacaagtttagttaggaagggcgctcagaaaataactctcagcattggtgacggtgctaatgatgtgagtatgattcaagctgctcatgttgggattggcatcagtggccaagaaggaatgcaagctgttatggctagcgactttgccattgcccagtttcgttttcttactgatttgcttcttgtacatggacggtggtcttacttgagactctgcaaggttatcacatacttcttctacaagaatctgacatttacactaactcagttctggttcactttccaaactggcttttctggtcagcggttttatgatgactggtttcagtctctatataatgttatcttcacggcactacctgtaattatagttggattgtttgataaggatgttagcgcgtcactgtcaaaaaaatacccacagctttacaaggaaggaatcaggaattcattcttcaagtggagagtgattgcagtgtggggtttctttgctttctatcagtcaatagtgttcttctacttcactgcagctgcaagtcagcatggtcacggttcatctggcaagattcttggcctatgggatgttagcactatggcctttacttgtgtcgtggtaactgtgaatctccgccttctcatggcatgcaactctataacgaggtggcattacatcagtgtggctggcagtatagtggcctggtttatgtttattttcatatactctgcaataatgacgtcgtttgacagacaggaaaatgagtattttgtgatttatgttctgatgagcacctttttcttctatatgacaatcttgcttgttccgatcattgccctgtttggtgatttcctatatttatcgattcaaaggtggctattcccctacgactaccaaataattcaggagcagcacaaggacgagccccacgtgtacagcagggtgcagctacccgagaccagccacctaagcccacaggaagcgagaagctacatgatgtcgatgctccctcgggagtcatcaaagcacactggctttgccttcgactccccaggatacgagtcgttcttcgcctcgcagcaaggcgtcggcgtgccacacaagccgtgggatgtagcccggagagcaagcatgaagcagcaacgagcaggaaaatcctaatctccgccgtgtaaagttttgtatatctggtttcttgattgcaatcgcagaccacaggaattagtataggcagccctttttcgtgtttgccagtggttcacccatatgtggttttgggatgaggcatctgcccatttagggcttgttcggttacaccaatccaga

SEQ ID NO: 48601 - DNA, 2394 bp, Zea Mays
ggcggtcggttgattgattgattcccagcgtggcggcgaacgagcttggcggcgatgacagcgtcccagcgcggcggtcggacgacggcagcgcggccgccggacgacgcatcgtcccagcgcgacacaacgtccggcggccggacgacgcatcatcccagcgcggcggtcggacaacggcagcgcggcggcgcggcttcctcaaggcgtacacccaccacagttatggttcgtgagtcacatgttgaaaggatggggagtatacaagatgttccatatgaaattctgaatgttctggaattcaacagcacgagaaagcgacaatcggtggtttgccgtttcccaaatggaagattagttctctattgcaagggtgctgataatgtcgtatatgaacgattggctgatggaaatcatgatatgaaaaagacaagcagagaacatctagagcaatttggttctgctggcttgcgtactctttgtcttgcctatcgggatcttagcagggagcaatacgaaagctggaatgaaaagtttgtacaagcaaagtcatctttacgagatcgtgataagaagctcgatgaggtggctgagttgattgaaaaagaccttatattagttgggtgcacagctatagaggacaaactgcaagaaggcgtgccaacctgcattgaaactctctctgcagctggcataaaaatttgggtgttaacgggagataagatggaaacagcaattaacattgcatatgcatgcagcttggtaaacaatgacaccaaacagttcatcattagttcagagacagacactattagggaggctgaagaccggggtgaccctgtggaaattgcacgtgttattaaagattcagtaaaacagagtctgaaaagctttcacgaggaagcccgacattctttgattagcacccctgaaaggaagttggctctcattattgatggtagatgcctgatgtatgcactggacccaactcttcgtgttgatcttcttggattgagtctaagttgccactcagttgtatgctgccgagtttctccgctgcaaaaggcacaggttacaagtttagttaggaagggcgctcagaaaataactctcagcattggtgacggtgctaatgatgtgagtatgattcaagctgctcatgttgggattggcatcagtggccaagaaggaatgcaagctgttatggctagcgactttgccattgcccagtttcgttttcttactgatttgcttcttgtacatggacggtggtcttacttgagactctgcaaggttatcacatacttcttctacaagaatctgacatttacactaactcagttctggttcactttccaaactggcttttctggtcagcggttttatgatgactggtttcagtctctatataatgttatcttcacggcactacctgtaattatagttggattgtttgataaggatgttagcgcgtcactgtcaaaaaaatacccacagctttacaaggaaggaatcaggaattcattcttcaagtggagagtgattgcagtgtggggtttctttgctttctatcagtcaatagtgttcttctacttcactgcagctgcaagtcagcatggtcacggttcatctggcaagattcttggcctatgggatgttagcactatggcctttacttgtgtcgtggtaactgtgaatctccgccttctcatggcatgcaactctataacgaggtggcattacatcagtgtggctggcagtatagtggcctggtttatgtttattttcatatactctgcaataatgacgtcgtttgacagacaggaaaatgagtattttgtgatttatgttctgatgagcacctttttcttctatatgacaatcttgcttgttccgatcattgccctgtttggtgatttcctatatttatcgattcaaaggtggctattcccctacgactaccaaataattcaggagcagcacaaggacgagccccacgtgtacagcagggtgcagctacccgagaccagccacctaagcccacaggaagcgagaagctacatgatgtcgatgctccctcgggagtcatcaaagcacactggctttgccttcgactccccaggatacgagtcgttcttcgcctcgcagcaaggcgtcggcgtgccacacaagccgtgggatgtagcccggagagcaagcatgaagcagcaacgagcaggaaaatcctaatctccgccgtgtaaagttttgtatatctggtttcttgattgcaatcgcagaccacaggaattagtataggcagccctttttcgtgtttgccagtggttcacccatatgtggttttgggatgaggcatctgcccatttagggcttgttcggttacaccaatccaga

SEQ ID NO: 48602 - DNA, 1597 bp, Zea Mays
ctgcaattctgcattctagaaagaataggtggctgagttgattgaaaaagaccttatattagttgggtgcacagctatagaggacaaactgcaagaaggcgtgccaacctgcattgaaactctctctgcagctggcataaaaatttgggtgttaacgggagataagatggaaacagcaattaacattgcatatgcatgcagcttggtaaacaatgacaccaaacagttcatcattagttcagagacagacactattagggaggctgaagaccgggttacaagtttagttaggaagggcgctcagaaaataactctcagcattggtgacggtgctaatgatgtgagtatgattcaagctgctcatgttgggattggcatcagtggccaagaaggaatgcaagctgttatggctagcgactttgccattgcccagtttcgttttcttactgatttgcttcttgtacatggacggtggtcttacttgagactctgcaaggttatcacatacttcttctacaagaatctgacatttacactaactcagttctggttcactttccaaactggcttttctggtcagcggttttatgatgactggtttcagtctctatataatgttatcttcacggcactacctgtaattatagttggattgtttgataaggatgttagcgcgtcactgtcaaaaaaatacccacagctttacaaggaaggaatcaggaattcattcttcaagtggagagtgattgcagtgtggggtttctttgctttctatcagtcaatagtgttcttctacttcactgcagctgcaagtcagcatggtcacggttcatctggcaagattcttggcctatgggatgttagcactatggcctttacttgtgtcgtggtaactgtgaatctccgccttctcatggcatgcaactctataacgaggtggcattacatcagtgtggctggcagtatagtggcctggtttatgtttattttcatatactctgcaataatgacgtcgtttgacagacaggaaaatgagtattttgtgatttatgttctgatgagcacctttttcttctatatgacaatcttgcttgttccgatcattgccctgtttggtgatttcctatatttatcgattcaaaggtggctattcccctacgactaccaaataattcaggagcagcacaaggacgagccccacgtgtacagcagggtgcagctacccgagaccagccacctaagcccacaggaagcgagaagctacatgatgtcgatgctccctcgggagtcatcaaagcacactggctttgccttcgactccccaggatacgagtcgttcttcgcctcgcagcaaggcgtcggcgtgccacacaagccgtgggatgtagcccggagagcaagcatgaagcagcaacgagcaggaaaatcctaatctccgccgtgtaaagttttgtatatctggtttcttgattgcaatcgcagaccacaggaattagtataggcagccctttttcgtgtttgccagtggttcacccatatgtggttttgggatgaggcatctgcccatttagggcttgttcggttacaccaatccaga

SEQ ID NO: 48603 - DNA, 2043 bp, Zea Mays
cttcctgccagaaccgagcggagatcatctggagccgggtcccggcgattaccctgcgcggcgccaatggagcccgaggcggcggtgttggcacagctgcagctgcagctcctcgtcctcgtctctgagttccgccatctccgcgagcgggagcgcggcgcccgcgaggagctccgagacgccggccagaggtgggaggcggcggcggcggaacaacgtagggaggcccgggagctgcgcgtggaggtggcctcgcgggacgactcgctacggaggctcgaggccaggataaaatgccttgagaatgagaatgagcagctggagaaaaacgaaaacaacttgaaagaaagcatggatgtgctgcttcaatccagggaggctttcataaaacactatgaggcaggggttttagcttaggttctgaatcaaccttcaacctgtgcatggaagcaaactgacatttggctcacataccatttcggtagaaaaggaagttgctgctgtgaaacaagtactaggtgatgtgcattgtctagttggtgagaaggaaaatgtagttgctgacttgaaggataaagtccaaaggatttctgtgcttgagaaagattttgtagagaatcttaatttcttggaaagcaaaatcagtgcataccagcttgaactccgtagtagggcgaggatcatatatgagttaaaaaatcgccttcaggatgagaagcttaacagcagttttcagccccatctggaagaacttaataaaactttgttggtgaaggattacgctattgatagattaacttcagagaatcaggcaatgcgtttggaacttcataacatggaaattgctttacagaaatttcaagatttattcagtagtattgggcatgagggaatgaatagtttttcagcaatttctgaaaatcaggacgtacaggatgtgaataatgaacaacatgaaagggttccaggtacacaatgtggtctagcaaatgagcataccttggtaactgcagttgtcaaagaagccaccacacaaaatgtagatcaccagttggaaactgatccaggcagcatgcaagtacaaagcccagtgcacttcaagtctggtgcaatgccatctccggagctagtagctgcaaatacagaaaaagctgacagccttcttgaacccaatgtagacattggcatgggcagtttatctcctgcacgaccaacagattgtttgaatatggatcttgacacggagagtcagtcctgacaatgcaatttatatcccttcacacctggtattcggatacgtatatttaacaatctcgtagttggttgtggagcatattttattattttcttgtagttgatcaactgtcttgtgtgcgtagcctgtttagttagccactaaagagatagatcaggtagtgtaaagagcatcttggctcatctctctaccgccacaatgtccgagattcggatggcagctcagctgatgagaccgaggagaaagaaatgatagctgtcattgtctcttgggataaatctgagggctcttattggaggagatgaaaaaaacagactcttaaaaataggaggggctctcaaaagaaaaatagagagctatatttcgagggctgttgctagactggagatgctctaaggtgtatttgttttttggcttttgttctaagactgtctccaacaacgttctttatattcatcctctatatctgtcttttacagtcttctaaaagattcttttctctatatcttctctatctctagcagcgtcctctatatctcgtcctttatacataagtatcgatattagagacataatttacttttaatttttgcacatatgtatttatcatactatcaaatgtattatacacattttagtttaatatgtggtgttaaactaaaatatgtagagatttttgttggagttagtctaacatagggtgtcttgagaaccatgtcagcagtattattgtacattgcaattgttgaacgtcgttgatatgaatttaagtcaaccctatatttgtt

SEQ ID NO: 48604 - DNA, 2146 bp, Zea Mays
cttcctgccagaaccgagcggagatcatctggagccgggtcccggcgattaccctgcgcggcgccaatggagcccgaggcggcggtgttggcacagctgcagctgcagctcctcgtcctcgtctctgagttccgccatctccgcgagcgggagcgcggcgcccgcgaggagctccgagacgccggccagaggtgggaggcggcggcggcggaacaacgtagggaggcccgggagctgcgcgtggaggtggcctcgcgggacgactcgctacggaggctcgaggccaggataaaatgccttgagaatgagaatgagcagctggagaaaaacgaaaacaacttgaaagaaagcatggatgtgctgcttcaatccagggaggctttcataaaacactatgaggcaggggttttagcttaggttctgaatcaaccttcaacctgtgcatggaagcaaactgacatttggctcacataccatgttcgtaggcaggactctacttgttctatgcagtggacaatccagctgaaggataaacagattgctgtaatgtcagagaaattgaattcacatcttgttttgtttagttcggtagaaaaggaagttgctgctgtgaaacaagtactaggtgatgtgcattgtctagttggtgagaaggaaaatgtagttgctgacttgaaggataaagtccaaaggatttctgtgcttgagaaagattttagaatcttaatttcttggaaagcaaaatcagtgcataccagcttgaactccgtagtagggcgaggatcatatatgagttaaaaaatcgccttcaggatgagaagcttaacagcagttttcagccccatctggaagaacttaataaaactttgttggtgaaggattacgctattgatagattaacttcagagaatcaggcaatgcgtttggaacttcataacatggaaattgctttacagaaatttcaagatttattcagtagtattgggcatgagggaatgaatagtttttcagcaatttctgaaaatcaggacgtacaggatgtgaataatgaacaacatgaaagggttccaggtacacaatgtggtctagcaaatgagcataccttggtaactgcagttgtcaaagaagccaccacacaaaatgtagatcaccagttggaaactgatccaggcagcatgcaagtacaaagcccagtgcacttcaagtctggtgcaatgccatctccggagctagtagctgcaaatacagaaaaagctgacagccttcttgaacccaatgtagacattggcatgggcagtttatctcctgcacgaccaacagattgtttgaatatggatcttgacacggagagtcagtcctgacaatgcaatttatatcccttcacacctggtattcggatacgtatatttaacaatctcgtagttggttgtggagcatattttattattttcttgtagttgatcaactgtcttgtgtgcgtagcctgtttagttagccactaaagagatagatcaggtagtgtaaagagcatcttggctcatctctctaccgccacaatgtccgagattcggatggcagctcagctgatgagaccgaggagaaagaaatgatagctgtcattgtctcttgggataaatctgagggctcttattggaggagatgaaaaaaacagactcttaaaaataggaggggctctcaaaagaaaaatagagagctatatttcgagggctgttgctagactggagatgctctaaggtgtatttgttttttggcttttgttctaagactgtctccaacaacgttctttatattcatcctctatatctgtcttttacagtcttctaaaagattcttttctctatatcttctctatctctagcagcgtcctctatatctcgtcctttatacataagtatcgatattagagacataatttacttttaatttttgcacatatgtatttatcatactatcaaatgtattatacacattttagtttaatatgtggtgttaaactaaaatatgtagagatttttgttggagttagtctaacatagggtgtcttgagaaccatgtcagcagtattattgtacattgcaattgttgaacgtcgttgatatgaatttaagtcaaccctatatttgtt

SEQ ID NO: 48605 - DNA, 2142 bp, Zea Mays
cttcctgccagaaccgagcggagatcatctggagccgggtcccggcgattaccctgcgcggcgccaatggagcccgaggcggcggtgttggcacagctgcagctgcagctcctcgtcctcgtctctgagttccgccatctccgcgagcgggagcgcggcgcccgcgaggagctccgagacgccggccagaggtgggaggcggcggcggcggaacaacgtagggaggcccgggagctgcgcgtggaggtggcctcgcgggacgactcgctacggaggctcgaggccaggataaaatgccttgagaatgagaatgagcagctggagaaaaacgaaaacaacttgaaagaaagcatggatgtgctgcttcaatccagggaggctttcataaaacactatgaggggttttagcttaggttctgaatcaaccttcaacctgtgcatggaagcaaactgacatttggctcacataccatgttcgtaggcaggactctacttgttctatgcagtggacaatccagctgaaggataaacagattgctgtaatgtcagagaaattgaattcacatcttgttttgtttagttcggtagaaaaggaagttgctgctgtgaaacaagtactaggtgatgtgcattgtctagttggtgagaaggaaaatttgctgacttgaaggataaagtccaaaggatttctgtgcttgagaaagattttgtagagaatcttaatttcttggaaagcaaaatcagtgcataccagcttgaactccgtagtagggcgaggatcatatatgagttaaaaaatcgccttcaggatgagaagcttaacagcagttttcagccccatctggaagaacttaataaaactttgttggtgaaggattacgctattgatagattaacttcagagaatcaggcaatgcgtttggaacttcataacatggaaattgctttacagaaatttcaagatttattcagtagtattgggcatgagggaatgaatagtttttcagcaatttctgaaaatcaggacgtacaggatgtgaataatgaacaacatgaaagggttccaggtacacaatgtggtctagcaaatgagcataccttggtaactgcagttgtcaaagaagccaccacacaaaatgtagatcaccagttggaaactgatccaggcagcatgcaagtacaaagcccagtgcacttcaagtctggtgcaatgccatctccggagctagtagctgcaaatacagaaaaagctgacagccttcttgaacccaatgtagacattggcatgggcagtttatctcctgcacgaccaacagattgtttgaatatggatcttgacacggagagtcagtcctgacaatgcaatttatatcccttcacacctggtattcggatacgtatatttaacaatctcgtagttggttgtggagcatattttattattttcttgtagttgatcaactgtcttgtgtgcgtagcctgtttagttagccactaaagagatagatcaggtagtgtaaagagcatcttggctcatctctctaccgccacaatgtccgagattcggatggcagctcagctgatgagaccgaggagaaagaaatgatagctgtcattgtctcttgggataaatctgagggctcttattggaggagatgaaaaaaacagactcttaaaaataggaggggctctcaaaagaaaaatagagagctatatttcgagggctgttgctagactggagatgctctaaggtgtatttgttttttggcttttgttctaagactgtctccaacaacgttctttatattcatcctctatatctgtcttttacagtcttctaaaagattcttttctctatatcttctctatctctagcagcgtcctctatatctcgtcctttatacataagtatcgatattagagacataatttacttttaatttttgcacatatgtatttatcatactatcaaatgtattatacacattttagtttaatatgtggtgttaaactaaaatatgtagagatttttgttggagttagtctaacatagggtgtcttgagaaccatgtcagcagtattattgtacattgcaattgttgaacgtcgttgatatgaatttaagtcaaccctatatttgtt

SEQ ID NO: 48606 - DNA, 1949 bp, Zea Mays
cttcctgccagaaccgagcggagatcatctggagccgggtcccggcgattaccctgcgcggcgccaatggagcccgaggcggcggtgttggcacagctgcagctgcagctcctcgtcctcgtctctgagttccgccatctccgcgagcgggagcgcggcgcccgcgaggagctccgagacgccggccagaggtgggaggcggcggcggcggaacaacgtagggaggcccgggagctgcgcgtggaggtggcctcgcgggacgactcgctacggaggctcgaggccagggcaggactctacttgttctatgcagtggacaatccagctgaaggataaacagattgctgtaatgtcagagaaattgaattcacatcttgttttgtttagttcggtagaaaaggaagttgctgctgtgaaacaagtactaggtgatgtgcattgtctagttggtgagaaggaaaatgtagttgctgacttgaaggataaagtccaaaggatttctgtgcttgagaaagattttagaatcttaatttcttggaaagcaaaatcagtgcataccagcttgaactccgtagtagggcgaggatcatatatgagttaaaaaatcgccttcaggatgagaagcttaacagcagttttcagccccatctggaagaacttaataaaactttgttggtgaaggattacgctattgatagattaacttcagagaatcaggcaatgcgtttggaacttcataacatggaaattgctttacagaaatttcaagatttattcagtagtattgggcatgagggaatgaatagtttttcagcaatttctgaaaatcaggacgtacaggatgtgaataatgaacaacatgaaagggttccaggtacacaatgtggtctagcaaatgagcataccttggtaactgcagttgtcaaagaagccaccacacaaaatgtagatcaccagttggaaactgatccaggcagcatgcaagtacaaagcccagtgcacttcaagtctggtgcaatgccatctccggagctagtagctgcaaatacagaaaaagctgacagccttcttgaacccaatgtagacattggcatgggcagtttatctcctgcacgaccaacagattgtttgaatatggatcttgacacggagagtcagtcctgacaatgcaatttatatcccttcacacctggtattcggatacgtatatttaacaatctcgtagttggttgtggagcatattttattattttcttgtagttgatcaactgtcttgtgtgcgtagcctgtttagttagccactaaagagatagatcaggtagtgtaaagagcatcttggctcatctctctaccgccacaatgtccgagattcggatggcagctcagctgatgagaccgaggagaaagaaatgatagctgtcattgtctcttgggataaatctgagggctcttattggaggagatgaaaaaaacagactcttaaaaataggaggggctctcaaaagaaaaatagagagctatatttcgagggctgttgctagactggagatgctctaaggtgtatttgttttttggcttttgttctaagactgtctccaacaacgttctttatattcatcctctatatctgtcttttacagtcttctaaaagattcttttctctatatcttctctatctctagcagcgtcctctatatctcgtcctttatacataagtatcgatattagagacataatttacttttaatttttgcacatatgtatttatcatactatcaaatgtattatacacattttagtttaatatgtggtgttaaactaaaatatgtagagatttttgttggagttagtctaacatagggtgtcttgagaaccatgtcagcagtattattgtacattgcaattgttgaacgtcgttgatatgaatttaagtcaaccctatatttgtt

SEQ ID NO: 48607 - DNA, 2490 bp, Zea Mays
caaacatgcaaaggattgttacttgtgtcctaaaaaaaggcacaaaaaaatgacattcgtgcccctctactgcctaggttcaccccgattcaactccgacttcgcgagtcgtgtctcacctctatcgccatccgttccctactccacttcaatctgctattcctgctccactccgcttcaatccgccgcccctgctccagtaggaacgttccccaccccggcaaccccccacgctagctactccggagcaccggaacgcaccgtcgcccccgtcaagcaggttgcgccgcccgcccgtggtgccggcgctgtgctggaggcggtggagctggggccgtggggaagcttctcgctggggagagccgggacaagctagagcgacggacatgggtcaccagtaagccacggtcaggggcatttcagtcctacctagcagtggtgatggcaaaaatctaacataatgattgaagtgttatctgaataggaatgctctggtggatttgcagcaagaaaaaccttggaatgaatgtacaagccacttagggtgctgtattagagctgtaacaggatgggttcgttatgctgcgtggcggcacggcctcatggggctagcacagcaagccgggagtggtcctctattagccgtagcgacccaccctggcgtactggtgctggcttctccccacctctgtctagagggtgggagtacaggatcaactcggaagggctgtcttatggatcccatggtgatagtggggtcgctgtgaactatggatcatcactatcatcaaatagtaaaggggctagtaggagctgggagaggaatgagcttccacaagatcaccgctactctacatctgagggtgccatttcgtatctcaacagcccagatatcagcttccagaatcaccatattatgctaccgatgctgcaagattctagtgttgatgaatacatgagagtttcagtcgctgagcctattggttctttattattgtcagagggaatgtcaggtcaacataatagtggtggttccacctcctcttgctctgatggaagcgaatatgatattgtacctaaatcatacacatcaacgccccgcaacttcccaagtcgtcgatcattcctgtcgaagccaatccaccctgtttcatttccagaacatgcactagaagcacaggaaactcgaagtcatgttgcaagcgcaagctccaacaatcctctgtgctctgaatacaagggaacaggagaactttgcttcccggactacggtagcggccgtcacggggagtcaggaaattggagtgctgcaagcagcatggatcttactgatctatcagaacaacccgaagctggacaagctggactactgcgtcctaacaatgcaatgcagaaaacaaggtgcgacctctgcgagaggcttctgacaaagaggtcaccttgtggttctcgtagaatcgtacgcaccggagatttgcctgttgctggtgttctaccatgctcccatgtctaccatgccgagtgtctagagcggaccacacccaaggggcagaagcacgaccctccttgccccgtgtgcgacaagctggctggtaaagataccgagcagtggtcaatctgcaggttgaaaaatgggttcccaaggttccgctcgctaggggaagggccttctcgggttttcagctgcgctgatgctggagattgcgttgctggggccgttcagattccaagatcaaatagcatcgggctattgactcgcagtggtcacaagaggcatgcatcttcgaagggagagcccagcaaagactcggctgagacatcaagaaatgcttgcatgtaacttcctaatgcactcagtaggtcttatgtccatgaccttgcattgttatagttgcaaggtcttatgtccatgacctcgcattgttatagttgcaaggttatgtatgcatgcttacggatgttttcatggcttaatggcgccgctaggaaatgacatagatatgcctgtttatctcctatcatccctggtttgatgacaaggggataggagaggagaggaaatcccttgctattcaaaaaattttcttcaccatggatcccctctaattctcttgtcgccaaactagctctcggttatcaggttgccacttgtgcataatgttgttcagttgtattgtgctggaaatcgcaagtaaactgctcatccagttctatgaaactaccgcaattacctggcccctacagtctacggccctacattgtaacactgtatggttgtaacgctgtcaatattgagacgagatttgacatggaacttggtcgctgctctgtattgatctgtaaaccgaaacgcaaattggatgaggctaggaaagcaaacttttcaggtgctcgatgaacctttcgtagaaggcgatgccattgctttggttggttggctctgaaaggaagctgcatctgggacagttcagccattttgctgcatgttcg

SEQ ID NO: 48608 - DNA, 1993 bp, Zea Mays
ctgcctaggttcaccccgattcaactccgacttcgcgagtcgtgtctcacctctatcgccatccgttccctactccacttcaatctgctattcctgctccactccgcttcaatccgccgcccctgctccagtaggaacgttccccaccccggcaaccccccacgctagctactccggagcaccggaacgcaccgtcgcccccgtcaagcaggttgcgccgcccgcccgtggtgccggcgctgtgctggaggcggtggagctggggccgtggggaagcttctcgctggggagagccgggacaagctagagcgacggacatgggtcaccagtaagccacggtcaggggcatttcagtcctacctagcagtggtgatggcaaaaatctaacataatgcccagatatcagcttccagaatcaccatattatgctaccgatgctgcaagattctagtgttgatgaatacatgagagtcgctgagcctattggttctttattattgtcagagggaatgtcaggtcaacataatagtggtggttccacctcctcttgctctgatggaagcgaatatgatattgtacctaaatcatacacatcaacgccccgcaacttcccaagtcgtcgatcattcctgtcgaagccaatccaccctgtttcatttccagaacatgcactagaagcacaggaaactcgaagtcatgttgcaagcgcaagctccaacaatcctctgtgctctgaatacaagggaacaggagaactttgcttcccggactacggtagcggccgtcacggggagtcaggaaattggagtgctgcaagcagcatggatcttactgatctatcagaacaacccgaagctggacaagctggactactgcgtcctaacaatgcaatgcagaaaacaaggtgcgacctctgcgagaggcttctgacaaagaggtcaccttgtggttctcgtagaatcgtacgcaccggagatttgcctgttgctggtgttctaccatgctcccatgtctaccatgccgagtgtctagagcggaccacacccaaggggcagaagcacgaccctccttgccccgtgtgcgacaagctggctggtaaagataccgagcagtggtcaatctgcaggttgaaaaatgggttcccaaggttccgctcgctaggggaagggccttctcgggttttcagctgcgctgatgctggagattgcgttgctggggccgttcagattccaagatcaaatagcatcgggctattgactcgcagtggtcacaagaggcatgcatcttcgaagggagagcccagcaaagactcggctgagacatcaagaaatgcttgcatgtaacttcctaatgcactcagtaggtcttatgtccatgaccttgcattgttatagttgcaaggtcttatgtccatgacctcgcattgttatagttgcaaggttatgtatgcatgcttacggatgttttcatggcttaatggcgccgctaggaaatgacatagatatgcctgtttatctcctatcatccctggtttgatgacaaggggataggagaggagaggaaatcccttgctattcaaaaaattttcttcaccatggatcccctctaattctcttgtcgccaaactagctctcggttatcaggttgccacttgtgcataatgttgttcagttgtattgtgctggaaatcgcaagtaaactgctcatccagttctatgaaactaccgcaattacctggcccctacagtctacggccctacattgtaacactgtatggttgtaacgctgtcaatattgagacgagatttgacatggaacttggtcgctgctctgtattgatctgtaaaccgaaacgcaaattggatgaggctaggaaagcaaacttttcaggtgctcgatgaacctttcgtagaaggcgatgccattgctttggttggttggctctgaaaggaagctgcatctgggacagttcagccattttgctgcatgttcg

SEQ ID NO: 48609 - DNA, 2740 bp, Zea Mays
aaaccgatgcagtgaaacagatggcttgaccggttccatatgcggcggcggcacacgccatacagcagggaaagcattcgccgcagacccgtggtagaagaagaggatcggagcaagagcaaagcgcggggtgtaaatcctgagaggaggaagagaaggaggagaggagatcgagaccggctccccccgtcttgcttgtgcttgtcgcgtacggttcttgtaagaacccgcagctgccgcgtccggttctttcaagaacccgcggcggggatggatctgtacgacaagcgagaggacatggcgttgcaagacggggactcctgcctggcttcccgggcttcgcggggcggatgcgacgtcgatttacagtgggtggatggcctcctcgaaggcgccggacggaagcggcgtgcgccggaagacttcgaagacgaggtccagaaaatggacgaggtggatggcggtggcaagcgcagcaagccgccgtcaccgcagccacacacgccagatattcatgaagctcatgtccctggccgccgcaccaccgtggtggctggtggtggggagcacagcggtggtgggggtgacctcataggagaaatcggtcgggacctgtccatcaactgcctcctccggctgtctcggtcagagtatggctcagtggcatcgttgaatcatgatttccggtctctggtgagaggaggggggatctacaggctgcggcggcagaataacatagcggagcattgggtgtacttctcctgtaatgttttggagtgggatgcctatgacccctaccgcaagcgttggatctcggtgcccaagatgccgcctgacgagtgcttcatgtgctcggacaaggagtctttggctgtgggcaccgaactacttgtgtttgggatggcacatattgtcttcagatacagtatactgacaaactcttggtcacgaggtgaggtgatgaactctcctcggtgtttatttgggtcggcaagcgttggtgagaaggcatatgttgctggtggcactgattctcttggcaggatccttagctcagcagagctatacaactctgagacacatacttggacacctcttcctagcatgaataaggcacggaaaaattgctctgggttgttcatggatggcaagttttatgtaattggcggtgtgacaaacaacaacatggtattgacctgcggtgaagtgtacgatgtgcagagcaagacttggagggtgatcgagaacatgtctggtggtctaaatggagtgagcggtgcacccccacttgttgcagtggtcaagaatgagctttatgctgctgactatagtgagaaggatgtgaagaagtatgacaagcagaataataggtggatcacacttggtaaattgcctgagcgatctgtgtccatgaatggatggggccttgcattcagggcatgtggtgagaggcttattgtcattggtggcccaagaacgccagttgggggaacgattgagctaacctcatggattcctgatgacaagccacctgtgtggaatctgatggacagacggccatctggaaattttgtgtataattgcgctgtgatgagctgctgagttcacttcatcaaggattctgcacagtgatgtttacaaagagaggtattcacaatggaaggcctgtttagcttcagcactccatgagtttctgcctttgacctggtagctgatgtagttggcatcagcagagcagcagcaggatcttgtaaaacttgagttcatacaagctgatgctcatgaactgaatacaaacaaaagatttccatgacacttaaaccagtgactgttgtgagtgctgggttcttttttggacaagtacctctttggactgttcttttttgagtaaggaaaaagggcgctagatttgacatggtaatctgaatttcaaaggattttgattccttgttctcgatggaaatctagctggtttgagatgctcaccagtcaccattttgtttgacaaaactaactggtataatccgttattggagtctgactgcaaaaaggtatatttccatgtgtttcgtccgcagcacagggttattgcacctggtagaaatcaggtgctgttccatcactagttcgacttgagatttgctctgttttttaaagaataaaacagtgaactcttgcaccatttcgcttttgttacatagtgattttctgacttgagatttgctctgttttttaaatactatctgacggaggaatgtaaatgtgcaagttggcgtaaggttctcgactctgaacctctgacattaaccgttctcttccaacatagtgattttctgcactttaccaagtttttacacctctgcagcagctaatcatttttttgctgaattaatagttttttatgcggtagtgtgaactactttttttttcatttttgttgggagtcttaacatgaggccatgacccataagcactcaattgtcgcacatatacggcatatttttattttgctagcgaaggaataccttagtggagaatttcgttgaagatagattaaaaagcgctatctggtggaatagattgaaatgtgtgtgaaaggcaacattggatggtcagtctggaaaagttgtttttgcctttttgcggggcgtggagaagagatggacgacgtaacggctgctgtttctggttttggtttctcatcgtcagcgtcaccatcttttttgtctttatgtttttc

SEQ ID NO: 48610 - DNA, 2618 bp, Zea Mays
aaaccgatgcagtgaaacagatggcttgaccggttccatatgcggcggcggcacacgccatacagcagggaaagcattcgccgcagacccgtggtagaagaagaggatcggagcaagagcaaagcgcggggtgtaaatcctgagaggaggaagagaaggaggagaggagatcgagaccggctccccccgtcttgcttgtgcttgtcgcgtacggttcttgtaagaacccgcagctgccgcgtccggttctttcaagaacccgcggcggggatggatctgtacgacaagcgagaggacatggcgttgcaagacggggactcctgcctggcttcccgggcttcgcggggcggatgcgacgtcgatttacagtgggtggatggcctcctcgaaggcgccggacggaagcggcgtgcgccggaagacttcgaagacgaggtccagaaaatggacgaggtggatggcggtggcaagcgcagcaagccgccgtcaccgcagccacacacgccagatattcatgaagctcatgtccctggccgccgcaccaccgtggtggctggtggtggggagcacagcggtggtgggggtgacctcataggagaaatcggtcgggacctgtccatcaactgcctcctccggctgtctcggtcagagtatggctcagtggcatcgttgaatcatgatttccggtctctggtgagaggaggggggatctacaggctgcggcggcagaataacatagcggagcattgggtgtacttctcctgtaatgttttggagtgggatgcctatgacccctaccgcaagcgttggatctcggtgcccaagatgccgcctgacgagtgcttcatgtgctcggacaaggagtctttggctgtgggcaccgaactacttgtgtttgggatggcacatattgtcttcagatacagtatactgacaaactcttggtcacgaggtgaggtgatgaactctcctcggtgtttatttgggtcggcaagcgttggtgagaaggcatatgttgctggtggcactgattctcttggcaggatccttagctcagcagagctatacaactctgagacacatacttggacacctcttcctagcatgaataaggcacggaaaaattgctctgggttgttcatggatggcaagttttatgtaattggcggtgtgacaaacaacaacatggtattgacctgcggtgaagtgtacgatgtgcagagcaagacttggagggtgatcgagaacatgtctggtggtctaaatggagtgagcggtgcacccccacttgttgcagtggtcaagaatgagctttatgctgctgactatagtgagaaggatgtgaagaagtatgacaagcagaataataggtggatcacacttggtaaattgcctgagcgatctgtgtccatgaatggatggggccttgcattcagggcatgtggtgagaggcttattgtcattggtggcccaagaacgccagttgggggaacgattgagctaacctcatggattcctgatgacaagccacctgtgtggaatctgatggacagacggccatctggaaattttgtgtataattgcgctgtgatgagctgctgagttcacttcatcaaggattctgcacagtgatgtttacaaagagagaagctgatgctcatgaactgaatacaaacaaaagatttccatgacacttaaaccagtgactgttgtgagtgctgggttcttttttggacaagtacctctttggactgttcttttttgagtaaggaaaaagggcgctagatttgacatggtaatctgaatttcaaaggattttgattccttgttctcgatggaaatctagctggtttgagatgctcaccagtcaccattttgtttgacaaaactaactggtataatccgttattggagtctgactgcaaaaaggtatatttccatgtgtttcgtccgcagcacagggttattgcacctggtagaaatcaggtgctgttccatcactagttcgacttgagatttgctctgttttttaaagaataaaacagtgaactcttgcaccatttcgcttttgttacatagtgattttctgacttgagatttgctctgttttttaaatactatctgacggaggaatgtaaatgtgcaagttggcgtaaggttctcgactctgaacctctgacattaaccgttctcttccaacatagtgattttctgcactttaccaagtttttacacctctgcagcagctaatcatttttttgctgaattaatagttttttatgcggtagtgtgaactactttttttttcatttttgttgggagtcttaacatgaggccatgacccataagcactcaattgtcgcacatatacggcatatttttattttgctagcgaaggaataccttagtggagaatttcgttgaagatagattaaaaagcgctatctggtggaatagattgaaatgtgtgtgaaaggcaacattggatggtcagtctggaaaagttgtttttgcctttttgcggggcgtggagaagagatggacgacgtaacggctgctgtttctggttttggtttctcatcgtcagcgtcaccatcttttttgtctttatgtttttc

SEQ ID NO: 48611 - DNA, 2981 bp, Zea Mays
aaaccgatgcagtgaaacagatggcttgaccggttccatatgcggcggcggcacacgccatacagcagggaaagcattcgccgcagacccgtggtagaagaagagggtgagaccagtccatctatttctagctatccatcttctatatatatacgcagttatattatatggccaattagatagagattagagagggagctgggaatgaaattttgtacagggaagagagagagagagggtagttgatgggaagggtttgatgtgactgccctttcttttcgctttgcttcctggatccaactgccgccgccgcatctgtcttcgttgattcggtgttcttcgatcggatgcctttatctgcctaggtacgtgcgccgattcttgcgtcgggggattcaattctcggatgggtggagggggattcgtcattcgtgttactgagctatgagtgggtggatgggttcgtgagatcggagcaagagcaaagcgcggggtgtaaatcctgagaggaggaagagaaggaggagaggagatcgagaccggctccccccgtcttgcttgtgcttgtcgcgtacggttcttgtaagaacccgcagctgccgcgtccggttctttcaagaacccgcggcggggatggatctgtacgacaagcgagaggacatggcgttgcaagacggggactcctgcctggcttcccgggcttcgcggggcggatgcgacgtcgatttacagtgggtggatggcctcctcgaaggcgccggacggaagcggcgtgcgccggaagacttcgaagacgaggtccagaaaatggacgaggtggatggcggtggcaagcgcagcaagccgccgtcaccgcagccacacacgccagatattcatgaagctcatgtccctggccgccgcaccaccgtggtggctggtggtggggagcacagcggtggtgggggtgacctcataggagaaatcggtcgggacctgtccatcaactgcctcctccggctgtctcggtcagagtatggctcagtggcatcgttgaatcatgatttccggtctctggtgagaggaggggggatctacaggctgcggcggcagaataacatagcggagcattgggtgtacttctcctgtaatgttttggagtgggatgcctatgacccctaccgcaagcgttggatctcggtgcccaagatgccgcctgacgagtgcttcatgtgctcggacaaggagtctttggctgtgggcaccgaactacttgtgtttgggatggcacatattgtcttcagatacagtatactgacaaactcttggtcacgaggtgaggtgatgaactctcctcggtgtttatttgggtcggcaagcgttggtgagaaggcatatgttgctggtggcactgattctcttggcaggatccttagctcagcagagctatacaactctgagacacatacttggacacctcttcctagcatgaataaggcacggaaaaattgctctgggttgttcatggatggcaagttttatgtaattggcggtgtgacaaacaacaacatggtattgacctgcggtgaagtgtacgatgtgcagagcaagacttggagggtgatcgagaacatgtctggtggtctaaatggagtgagcggtgcacccccacttgttgcagtggtcaagaatgagctttatgctgctgactatagtgagaaggatgtgaagaagtatgacaagcagaataataggtggatcacacttggtaaattgcctgagcgatctgtgtccatgaatggatggggccttgcattcagggcatgtggtgagaggcttattgtcattggtggcccaagaacgccagttgggggaacgattgagctaacctcatggattcctgatgacaagccacctgtgtggaatctgatggacagacggccatctggaaattttgtgtataattgcgctgtgatgagctgctgagttcacttcatcaaggattctgcacagtgatgtttacaaagagagaagctgatgctcatgaactgaatacaaacaaaagatttccatgacacttaaaccagtgactgttgtgagtgctgggttcttttttggacaagtacctctttggactgttcttttttgagtaaggaaaaagggcgctagatttgacatggtaatctgaatttcaaaggattttgattccttgttctcgatggaaatctagctggtttgagatgctcaccagtcaccattttgtttgacaaaactaactggtataatccgttattggagtctgactgcaaaaaggtatatttccatgtgtttcgtccgcagcacagggttattgcacctggtagaaatcaggtgctgttccatcactagttcgacttgagatttgctctgttttttaaagaataaaacagtgaactcttgcaccatttcgcttttgttacatagtgattttctgacttgagatttgctctgttttttaaatactatctgacggaggaatgtaaatgtgcaagttggcgtaaggttctcgactctgaacctctgacattaaccgttctcttccaacatagtgattttctgcactttaccaagtttttacacctctgcagcagctaatcatttttttgctgaattaatagttttttatgcggtagtgtgaactactttttttttcatttttgttgggagtcttaacatgaggccatgacccataagcactcaattgtcgcacatatacggcatatttttattttgctagcgaaggaataccttagtggagaatttcgttgaagatagattaaaaagcgctatctggtggaatagattgaaatgtgtgtgaaaggcaacattggatggtcagtctggaaaagttgtttttgcctttttgcggggcgtggagaagagatggacgacgtaacggctgctgtttctggttttggtttctcatcgtcagcgtcaccatcttttttgtctttatgtttttc

SEQ ID NO: 48612 - DNA, 947 bp, Zea Mays
gttctgtctagctagcttagctaagcggggctgagaaggagaggagattctcgtaccatgcatgtgttcaaaacggaaagtctgatctgaagccagcagacgtgaaaccgacagcacgtacgtacgtgtgagggctgagggctgctcggcggccatgggacaatggtgctttaagaaacgcgcagctctggtgattattgtggccattagctcgctgcagctgctcctgataactgctcaagaagctggaggagaccacgaggtgtggtcgtcgtcatcctcgccggccggtggtcgtggtggcggcgccgtcgtcgtcccgacggcgcggatggggccggacgggtcgtcgacgtcgtgttcgggggaggaggcggtggtggtgtaccagagcagcgccaaccctctgcccagcggcatcccggcctacaccgtgcagatcatcaacgtctgcggcggagggtgcaccgtgtacgacgtgcacgtctcctgcggcgacttcgcctccacggagctcgtcgacccggccaagttccagcgcgtcgccttcgacgactgcgtcgtcaagggcggcgccgccttggaacccagcgagaccgtctccttccagtactccaactccttctcctaccagctcagtgtcgcctccgtcgcgtgccactagagatcatcgaaccacaggaccactactactagatgatcatcgtcggtcgtcgttacgttgtgctgtactagtactactgctgttgttatgctaactagctagttccacgtacgttaattgttcagtctatctgcacttctgtttaatttctatcgtgtgtgtgtaactatatatttctacggtcgtcgtagttcggcatcaaactggaagtgatcaatcaagggaaaaatctctatctctactatattaaagcactaatttttctggtttatatgggtctttg

SEQ ID NO: 48613 - DNA, 2553 bp, Zea Mays
tcaaactccccggcttcccaaaacgatgcatccgccttcccgcctgctggtcctcctccacgccggcgccgtccacccgccgtcgttccgcgtccttctgaagcttcacgcgcaccacctcgtctccggcctcctctcctcccactccacgtcgcccttcatcgaccgcctcgtcgccgcctttgcccactccgaccccgcctctccgcgcccgcttctccacgcgcttgccatcctcgcttccctcccatccccgccggactctgcattcccctacaatgccgccttccgcgcgctctccctctgcccgcatcaacacctcgtggaccgccactgcctcccgctctaccgcgccctcctccactccggttccgcgcgccccgatcacctcacgttcccgttcctcatcaaggcctgtgcgcgcctgcagtacagatcgtacggtgccgcggttcttgggcatgtgcagaaactggggttcagcgctgacgtcttcgtggtgaacgccgcgatgcatttctggtctgttcgtgggcccatggctttcgcccgaaggttgttcgacgaaagtccagtcagggacgtggtctcgtggaacacactgattggtgggtacgtgaggagtggcctcccgcgggaggcgctagagttgttttggaggttggcggaagacggcaatgcagtgaggcctgacgaggtcacggtgatcggagcagtgtcgggatgtgcacagatgggggatttggagctagggaagaggctgcatgagtttgtggacaataaaggggtgaggtgcacggtgaggctgatgaacgcggtgatggatatgtatgtcaagtgtggcagtttagagttagcaaactcggtgtttgaaaggatcagtaacagaactgctgtttcttggacaaccatgatcgtggggcatgcgaggctggggatgatggaagatgcacggatgttgttcgatgagatgcctgaaagggatgtattcccatggaatgctctgatggctggttatgtacagaataagcagggcaaggaggctattgcactgtttcatgagatgcagaaatcaaaggtggatcctaatgagatcaccatggttaatctcttatctgcttgctcgcagctaggagcattagaaatggggatgtgggtccaccattacattgaccgacataaacttcatcttagtgttgcacttggtacatctctggtggacatgtatgcaaagtgtggcaacatcaagaaggcaatctgtgttttcaatgaaatcccagttcaaaatgcactcacatggacctcaatgatatgtggtcttgcaaatcatggacatgctgatgaggccatagaatacttccagagaatgatagatcttggattgcagccagatgagataacatttataggggttctgtcagcttgttgccatgccggtttggttgaagcaggtcgtcaatttttctccttaatgcatgcaaaatatcaccttgagaggaaaatgaaacattattcatgtatgatagacttgctaggcagagcagggcatttggatgaagcagaacagcttgtgaacgccatgcctatggatcctgatgcagtagtttggggtgctcttttctttgcttgtaggatgcatggtaatataactcttggtgagaaggcagcaatgaaattggtagaacttgacccaagtgatagtggaatctatgtgttattggctaacatgtatgcggaggcaaatatgaggaagaaggctgacaaagtgagggttatgatgaggcatttgggagtggagaaggttcctggatgtagttgcattgagctaaacggtgttgttcatgaatttatcgtgaaagataagtctcatttggacactaatgcaatttatgactgcttacatgagatcacattacaaatgaggcatattgcaaacctgattgacatttccgaaagtggctcacatatttagttcagaaactatatctaattatataaaatggtatgttcagttgtatcacataattaaattgtgatgtgtgtcagctgccaggcaataagcctctcactgtcatcaatcatgttatgaaattctgtcctatcagtgactctgaagggaataccagaaatcagaagattgaagatgttgggatgtaattcctggacttggaggcacatcctgtcccaaaagtagtctcatttgcgtttctcaactgtgccgttgctgcctgcagcgtgctggtagcatggagttgaggactcgaggcttccccgaggcaccacagaaggtcacaaggttttaatcgcataggtgtcgaggtgtaccgctagtgccagaggacactaacaacgcctcaaagaccatgagttaaactaatttgatattgtagatgttgattcattttctataaacttggtcatagttagagaagtttgacttagaggaaaagtgaactatatgttggaacagagagagtatgtatatacatatatgcaatgaagtggcaagattgctttgaaaatttcagtgatacaacattagcaacatgtaag

SEQ ID NO: 48614 - DNA, 1445 bp, Zea Mays
gtcgtcgtgaggacacctaatcctcaattcgcataaatattcacctacaccccttgcgtccaagatagcctagaaggtgagcgggcgtggaaggagaaatccgggaagcgatgagctttagcgccgcaagagtctcggagcatggcggcgagttcgaggaggcaagggggatgccggcagaggtgagctgggagatgctcgacaagtcgcggttttttgtactcggcgccgcgctcttctctggcgtctccgcggcgctatatccggccgtcgtcctcaagacgcacctccaggttgctgcccccgcacaggccgcggcctcggcggcagcggcggcgattctccggcgcgacggtccccgagggttctaccgtggcttcggtgcgtccctcgcgggcacggtgcccgcgcgcgctctctatatggcggcgctcgaggccaccaagagcgtcgtgggctccgccgccctccgcctcggcgtcgcggaaccggccgcctcggctgccgcctcggccgcgggcggcgtctccgctgccgtagccgcgcaggtcgtctggaccccggtggacgtcgtcagccagcgtctcatgcttcagacggcgcccctcgctgccgcccgctaccgcggcggtaccgacgcgttccggaagatcctactcgcggacggcgtgcgcggcctgtaccgcggcttcggcatctcggtgctgacctacgcgccctccagtgccgcgtggtgggcctcctacgtgaccgcgcagcggctcctctggcgcgccgtcggccccgcggcgcacgacagccgcggcgccgcgatagccctgcagggtgcgagcgcggccgcggcgggaagcgcggcggcgctggtgacgatgccgctggacaccgtgaagacgcggctgcaggttatggacgctggggcgcaggcgccgacgctcgcggccgcggcgcgcgcgctagttcgggagggaggttggtctgcttgctaccgcgggctcgggccgcggtgggcgtccatgtcgctgtcttcggccaccatggtcaccgtctacgagttcttgaagcggctctcggccaaggaaggctccctctaagctctggatcaaagtgtatccatggatgatccttgtaagcatccatgtccaaatgcgaatatcctgcactgatctcttgatgggatgttaggaagcaagatttctgctgggtttgtctgttgatgacgatgatgatgaattttgtaaaataaagatttgtgtatatacttctaggaatattgttgtgggtctcattcctccatggtgcgaatgttggcaactgtggccactagaactgctggtgggcatttacgctttcgcgtgtaacaaagatcagaagatatttcgagggaaatgttctgttgcggaccaagagaatggtgaagtcgtgttcaaaaggattgggtgcctgtg

SEQ ID NO: 48615 - DNA, 1503 bp, Zea Mays
aaggtatttctttttacttttgcgtttgcacaggccactccaccggttctcctattcttcctagcacaaaggggaggaagtaaagccttcccctcgccggagatgctgccgtcggcgaccggatagcctagaaggtgagcgggcgtggaaggagaaatccgggaagcgatgagctttagcgccgcaagagtctcggagcatggcggcgagttcgaggaggcaagggggatgccggcagaggtgagctgggagatgctcgacaagtcgcggttttttgtactcggcgccgcgctcttctctggcgtctccgcggcgctatatccggccgtcgtcctcaagacgcacctccaggttgctgcccccgcacaggccgcggcctcggcggcagcggcggcgattctccggcgcgacggtccccgagggttctaccgtggcttcggtgcgtccctcgcgggcacggtgcccgcgcgcgctctctatatggcggcgctcgaggccaccaagagcgtcgtgggctccgccgccctccgcctcggcgtcgcggaaccggccgcctcggctgccgcctcggccgcgggcggcgtctccgctgccgtagccgcgcaggtcgtctggaccccggtggacgtcgtcagccagcgtctcatgcttcagacggcgcccctcgctgccgcccgctaccgcggcggtaccgacgcgttccggaagatcctactcgcggacggcgtgcgcggcctgtaccgcggcttcggcatctcggtgctgacctacgcgccctccagtgccgcgtggtgggcctcctacgtgaccgcgcagcggctcctctggcgcgccgtcggccccgcggcgcacgacagccgcggcgccgcgatagccctgcagggtgcgagcgcggccgcggcgggaagcgcggcggcgctggtgacgatgccgctggacaccgtgaagacgcggctgcaggttatggacgctggggcgcaggcgccgacgctcgcggccgcggcgcgcgcgctagttcgggagggaggttggtctgcttgctaccgcgggctcgggccgcggtgggcgtccatgtcgctgtcttcggccaccatggtcaccgtctacgagttcttgaagcggctctcggccaaggaaggctccctctaagctctggatcaaagtgtatccatggatgatccttgtaagcatccatgtccaaatgcgaatatcctgcactgatctcttgatgggatgttaggaagcaagatttctgctgggtttgtctgttgatgacgatgatgatgaattttgtaaaataaagatttgtgtatatacttctaggaatattgttgtgggtctcattcctccatggtgcgaatgttggcaactgtggccactagaactgctggtgggcatttacgctttcgcgtgtaacaaagatcagaagatatttcgagggaaatgttctgttgcggaccaagagaatggtgaagtcgtgttcaaaaggattgggtgcctgtg

SEQ ID NO: 48616 - DNA, 1539 bp, Zea Mays
aaggtatttctttttacttttgcgtttgcacaggccactccaccggttctcctattcttcctagcacaaaggggaggaagtaaagccttcccctcgccggagatgctgccgtcggcgaccgggtacactgccggcgacgtccactcggcacgcgagatatagcctagaaggtgagcgggcgtggaaggagaaatccgggaagcgatgagctttagcgccgcaagagtctcggagcatggcggcgagttcgaggaggcaagggggatgccggcagaggtgagctgggagatgctcgacaagtcgcggttttttgtactcggcgccgcgctcttctctggcgtctccgcggcgctatatccggccgtcgtcctcaagacgcacctccaggttgctgcccccgcacaggccgcggcctcggcggcagcggcggcgattctccggcgcgacggtccccgagggttctaccgtggcttcggtgcgtccctcgcgggcacggtgcccgcgcgcgctctctatatggcggcgctcgaggccaccaagagcgtcgtgggctccgccgccctccgcctcggcgtcgcggaaccggccgcctcggctgccgcctcggccgcgggcggcgtctccgctgccgtagccgcgcaggtcgtctggaccccggtggacgtcgtcagccagcgtctcatgcttcagacggcgcccctcgctgccgcccgctaccgcggcggtaccgacgcgttccggaagatcctactcgcggacggcgtgcgcggcctgtaccgcggcttcggcatctcggtgctgacctacgcgccctccagtgccgcgtggtgggcctcctacgtgaccgcgcagcggctcctctggcgcgccgtcggccccgcggcgcacgacagccgcggcgccgcgatagccctgcagggtgcgagcgcggccgcggcgggaagcgcggcggcgctggtgacgatgccgctggacaccgtgaagacgcggctgcaggttatggacgctggggcgcaggcgccgacgctcgcggccgcggcgcgcgcgctagttcgggagggaggttggtctgcttgctaccgcgggctcgggccgcggtgggcgtccatgtcgctgtcttcggccaccatggtcaccgtctacgagttcttgaagcggctctcggccaaggaaggctccctctaagctctggatcaaagtgtatccatggatgatccttgtaagcatccatgtccaaatgcgaatatcctgcactgatctcttgatgggatgttaggaagcaagatttctgctgggtttgtctgttgatgacgatgatgatgaattttgtaaaataaagatttgtgtatatacttctaggaatattgttgtgggtctcattcctccatggtgcgaatgttggcaactgtggccactagaactgctggtgggcatttacgctttcgcgtgtaacaaagatcagaagatatttcgagggaaatgttctgttgcggaccaagagaatggtgaagtcgtgttcaaaaggattgggtgcctgtg

SEQ ID NO: 48617 - DNA, 1346 bp, Zea Mays
aggttgagatgaacgtctctcgccaaaactccatctaaaatagcagcgacgagacgagcgagaatatctgccaattcaaaaccaaaaaggagaggaggggagccccggacggagaagagaacagaagaaaccccgcggccaccccttcctgcctatatttctctctctgtcttgcgcgacagggagagaccagcgccaacacctccggtttcttgattgggtggtgatcggtgaaggaaggagaaattaagatgagcctcttcgggcttgggagcaagaatcagaagacgttcaggcctaagaagaatgcaccgtctggcaacaagggtgtgcagctgaagaaacacatcgatgcaaccttaggaagcgggaatttgagggatgctgtccgattgccaccaggggaggatctcaatgaatggctagctgttaacagtgaacatcctgtatggtactctaatggagttctgcacaccagctacatgcccaacaatgtcagctggaccaaagtttgagtatagatgggccgatggggtgcagatcaagaaaccaattgaggtttcagcaccaaagtatgttgagtacttgatggattggatcgaagctcagcttgatgacgaatccatcttccctcagaaactcggaaccccttttccacaaaatttcaaggaagttgtgaagacaatctttaagcgacttttccgtgtttatgctcatatttaccactcacattttcaaaagattgtcagccttaaggaggaagcacatcttaacacttgcttcaagcattttacattgttcacttgggaattcacgttgattgacaaggctgagcttgcaccacttattgatctaattgaatccattgtttcagtttgttgacatgacatcaatgattatttggatcattttcttatttttggagagcaaggagttacaactaagtgtccagtatgagggtgagactaagaatggtcaaaagtttttttttgttatcttttaggtgtctgtctctacaatgggacttgtgcatgtttgtcttatgaagtcctgaagaaactatttagggctcaatgagataatgttgtgtatccttctcttgaatgactccataagttctgtttgcaacaagcattaatttctcattcctaaaggagaactttattcatctattcatgtaaaatattagtcttgtttatagatacatcactataaaaggagttattttctttaagaaaaatcatctcaaaatgtattttggaatcattacaataaggtatgtagtactattcaatgtgacatacaattcttttttattgtttttgtggttgcatcaagatagatgt

SEQ ID NO: 48618 - DNA, 1007 bp, Zea Mays
aggttgagatgaacgtctctcgccaaaactccatctaaaatagcagcgacgagacgagcgagaatatctgccaattcaaaaccaaaaaggagaggaggggagccccggacggagaagagaacagaagaaaccccgcggccaccccttcctgcctatatttctctctctgtcttgcgcgacagggagagaccagcgccaacacctccggtttcttgattgggtggtgatcggtgaaggaaggagaaattaagatgagcctcttcgggcttgggagcaagaatcagaagacgttcaggcctaagaagaatgcaccgtctggcaacaagggtgtgcagctgaagaaacacatcgatgcaaccttaggaagcgggaatttgagggatgctgtccgattgccaccaggggaggatctcaatgaatggctagctgttaacactgttgatttcttcaaccaggtgaacatcctgtatggtactctaatggagttctgcacaccagctacatgcccaacaatgtcagctggaccaaagtttgagtatagatgggccgatggggtgcagatcaagaaaccaattgaggtttcagcaccaaagtatgttgagtacttgatggattggatcgaagctcagcttgatgacgaatccatcttccctcagaaactcggaaccccttttccacaaaatttcaaggaagttgtgaagacaatctttaagcgacttttccgtgtttatgctcatatttaccactcacattttcaaaagattgtcagccttaaggaggaagcacatcttaacacttgcttcaagcattttacattgttcacttgggaattcacgttgattgacaaggctgagcttgcaccacttattgatctaattgaatccattgtttcagtttgttgacatgacatcaatgattatttggatcattttcttatttttggagagcaaggagttacaactaagtgtccagtatgagggtgtgtttccatagggataaacaaaaca

SEQ ID NO: 48619 - DNA, 1370 bp, Zea Mays
ctccacccgatattcctccacttcgatcagcagctgcccgcacgcgcgctgatggggaagccggccgagtcgtcgtcgacgtcgtggtctgcgctgttcggtttcggttgcttcagctcttcccatgccgaccgctctggtgacggcccgggcaaggtggcctccgccggttccaggcctcccgcgccaccagcaccgctgctttcgccggatgacctatcactgtcgctggcgggatctgacgtgctggctttcacggtggaggagctccgggtggcgacgcgggacttctcgatgagcaacttcgtcggcgagggcgggttcgggcccgtgtacaagggccgcgtcgacgagcgggtcaggcccggcttgcggcagccgcaggccgtcgccgtcaagctgctcgacctcgagggctcccagggccacaaggagtggctggctgaggtcattttccttgggcagctgaggcatccgcaccttgtcaagctcatcggctactgctaccaggacgagcacaggcttctcgtgtacgagttcatggccaggggcagcttggagaagcatctcttcaaaagtagggcagggcactctgcttcccttccgtggtcaacgcgaatgaggatcgccattggagccgccaaaggtttggctttcctccacgacgctgccaaacccgtcatctaccgcgacttcaagacgtccaacatcctgctggactcggactacacggcgaagctgtcggatttcgggctagcgaaggctggacctggagaagacgagacccacgtgtcgacccgagtcatgggcacgcagggctacgccgcacccgagtacatcatgacagcttcggcgtcgtgctcctggagctgctaacggggcggaaggcgttggacaagaaccggccgccgcgagagcagagcctggtggaatgggcgcggccatgcctgcgcgacgctcgccggctggagcgcgtcatggaccggaggctgccgcgccccaccacgcccacccgagcagcccaaaaggccgccgggatagcccaccagtgcctcagtgtcagccccaaatcccggccccaaatgtcccacgttgtacaggccctggagtcgctgcttgctctagacgatgccgccgtggagccgtttgtgtacacggcgccgccggagagcagatgacctgtgtcatcttgtgtaaaaagcaagcgccggtgagtcaacaatccgaaggtgttttgcccacagtagtccactatatatatattttctattgtaaaaaacattagttcacgcgtgagacgcgtacctctgtttttctcgcccctgggaaacttggtggctgcctctatatttacactgatctaatctagg

SEQ ID NO: 48620 - DNA, 1468 bp, Zea Mays
gcgaatgaaccacaccacacggctcactggctcaggtcggccacaccagaaaagcatgcgaactgaaatggcgccatgttcgcctctcctcctggccgtggcgctcctatgcgccgccgccgccgccgccgcggcaggcggattcggtggccccacggcgcggtacgatcgcgtattcagctttggcgactcgctcactgacaccgggaacgcgctgcacctcgcagcaaccgccggcgggcccgcgagccggccaccgtacggcgagaccttcttccgtcgcgccaccggccgcgcgtccgacggccgcctcgtcatcgacttcatcgtcgaggcgctggccgtgccgcagccgacgccgtacctcgctggcgcgacggcgacgggggcggatttccgccgcggcgtgaacttcgcgttcggcggggccacagcgctcgacctgcacttcttcgtgagcaggggactggggtcgttcgtgccggtttcgcttaggaaccagaccgtctggttccacaatgttctacgacttcttggctcagctcgcgaggaagaccatggccacctccctcttcctcgtcggagagatcggagtcaacgactacttcatcggcctcaacgagaaccgcaccgtgggcgaggtgcggaccttcgtgccccacgtcgtcggtgccatccgttcggtcatcactgacgtgatctccgccggagcaggcacggtggtggtgccggggatgataccgctgggctgcgagccgcagctgctcacgctctacagaggcagcgtcgacgccgccgggtatgacccggagtccggctgcatcacgcgtctcaacgacctcgcccagctgcacaaccgcgagctgcgccgcatgctcgccggcctccgacgagcccaccccggcacggccatcgtatacgccgacctctaccgagcagtcaccgacatcgtcgtgtcgccccgcgcatacggtttcaggcacatgccgctggacgcgtgctgcggcggcggcggcgcatacaactacgacgacgcatcgttctgcggcgcggcggggacggcgccgtgcgcagacccgtcggagtatgtctcctgggacggggtgcactacacggaggccgccaacaggctcatcgcttgcagcgtgctcgagggatctcactctcacgccgccgacgcgcccacgctgtcgaattcatcggccacaacggaggattggcttcacaggatcggctgcgtctagcagctagcattttgtgtctagagtctagactggacgaccagagtcgagagacatttcagtcgggccacggccatattttagttctttatttaaggaaacagtatattttcattcaattgtctgatgatgtagtaaaactagtaacacgtataggggtggtcacaaatcaggatccaaatatttttttcacagttcgtttaaacctttaattaattttagtccgg

SEQ ID NO: 48621 - DNA, 2253 bp, Zea Mays
aaattagcacaaagcgtcccaaaggaccgaactgtaaattcttaaaatcacgtgcgttcttcagtgttagttctccaccctctccttggcggaaaaccctaaccccctttctcggcgacgatccgacccctaccccatctcccggccgaccccacggcgctctccgccatgccggacgtgcaacctctcgtcagcgacttcgtcctcaagctcaagcgccggaaggtggaggggtcgcacgcggtggcccggcagacggcggagctgctacggtcggttgtgtcgcagcatcggatgggtagcagcgccaaccaggcggccacacttgccgatgccgtacgggctgtgggggagcagctcattgccgccaatcccattgagcttgctgttggaaacattgtgagacgtgttttgcatataataaaggaggaagatatatcttccacagcagttggtatcgaaggtctttctgttactgttgacagtgatgatgaatatgacagcgaacatgatgatcgccctgcattatctgctgctgttcttgctgcacatgctagaaatgcccttcgtgcaccttcattgcagactctgctagaagacattcctgtgagtcctgcaatttcccgcactgcatcatcaactggtgactcagacggaaaaagtaaatctggagataagagctcaactagaaaactgaagcatgatgtcatcgcagccattggtgatcttattgatgagattgactcatgctatgagccgatttctgagcaagctgtggaacttattcaccaaaatgaggtaatcctaactctaggtcgttctagaaccgtcaaggagttcctgtatgccgcgaaagaaaagaaacgatcttttcgtgtatttgttgctgaaggtgctccaagatatcagggccatgttctcgcaaaagagctggttgagaaaggtgtacaaactacagttataacagattcagcagtttttgctatgatatctcgagttaacatgctgtgtccgttgtatccacacaatccagaagtgttgttgaatgaactcaaatcgccgtctgatttgctcgattttggcgagttctcagattgcatgaatttcagtactcaggatggcagccccttgttaaatgttgtcaacccaacatttgactatgtgccaccgaagcttgtgagcctattcatcactgacactgggggacacagtccatcttatatgtatcggcttattgctgagtattactcagctgatgacctggtagtgagacggaaggcaacatcttgaaggaagacaaaagcgctgcgaagtctccttggtgttctgatcataggatttgcgatcttattggaatcctagtgttcttgtactcgtcatgatctgttgcctgtagagcggtgctgctgtgataagtggaatcacctgtttgtggatccagttactgtcaaactgcaggaaatcgatgcaagcattctcgcgcatcgttgtaaccatggcggcattttaagtataaactgttgaggaatggagcgttacgtcatggaagaattgtttcactataggagaggttcaaatatatgattgactggttgtgtagagggtgtctgtttcttttctggtcataggttaatctgggccttggctggtccaaattttgaatgttataaactccagcaagctgttcgatatgtctatgaagtgttaccatgcacactgatgggtatttgctgagccattttgttttctatatctatcgtatatatatgatagtgctcatttcatgctttttttggtgattcaatttcgtagatgctgggaaagggaaaaaaagggaattttaaggcttaaacaaattagtaagacaacttcgtagatgcttggaccggcgacgacctggacgcacacgcgccgcaggaggtcgtactctggcggggccatcggtggcagcgagaagtggtcgtacgtggagctcccggtccggacttcgcccatgttccggaagatgccttgcccggcgactgcctgttaacaacactagcaaggtactagagtggaagagaatccgggtacaagagagataaagttggggaagataaacagcctagagaatggaggaagatgaacaataaagaggttctctgttgattctttgataaccatcgcgtgtccagcttctccattttatagcagagaatacctcacttgccacttttcaagggcccacatggcaccacatgacactgtactgag

SEQ ID NO: 48622 - DNA, 2045 bp, Zea Mays
aatcgagtagctgtacgctgcttggatgtcagataataaagatgctgtcagcacagcatgtttgtagctttattggagggtgatgcttttaattcagccccctagcttgctgttggaaacattgtgagacgtgttttgcatataataaaggaggaagatatatcttccacagcagttggtatcgaaggtctttctgttactgttgacagtgatgatgaatatgacagcgaacatgatgatcgccctgcattatctgctgctgttcttgctgcacatgctagaaatgcccttcgtgcaccttcattgcagactctgctagaagacattcctcagctggagataagagctcaactagaaaactgaagcatgatgtcatcgcagccattggtgatcttattgatgagattgactcatgctatgagccgatttctgagcaagctgtggaacttattcaccaaaatgaggtaatcctaactctaggtcgttctagaaccgtcaaggagttcctgtatgccgcgaaagaaaagaaacgatcttttcgtgtatttgttgctgaaggtgctccaagatatcagggccatgttctcgcaaaagagctggttgagaaaggtgtacaaactacagttataacagattcagcagtttttgctatgatatctcgagttaacatggtcatcgttggagcgcatgctatcatggcaaatggtggagtcattgcaccagtagggatgaacatggttgcacttgctgctcaaaggcatgctgtgccttttgttgtggttgctggtagtcacaagctgtgtccgttgtatccacacaatccagaagtgttgttgaatgaactcaaatcgccgtctgatttgctcgattttggcgagttctcagattgcatgaatttcagtactcaggatggcagccccttgttaaatgttgtcaacccaacatttgactatgtgccaccgaagcttgtgagcctattcatcactgacactgggggacacagtccatcttatatgtatcggcttattgctgagtattactcagctgatgacctggtagtgagacggaaggcaacatcttgaaggaagacaaaagcgctgcgaagtctccttggtgttctgatcataggatttgcgatcttattggaatcctagtgttcttgtactcgtcatgatctgttgcctgtagagcggtgctgctgtgataagtggaatcacctgtttgtggatccagttactgtcaaactgcaggaaatcgatgcaagcattctcgcgcatcgttgtaaccatggcggcattttaagtataaactgttgaggaatggagcgttacgtcatggaagaattgtttcactataggagaggttcaaatatatgattgactggttgtgtagagggtgtctgtttcttttctggtcataggttaatctgggccttggctggtccaaattttgaatgttataaactccagcaagctgttcgatatgtctatgaagtgttaccatgcacactgatgggtatttgctgagccattttgttttctatatctatcgtatatatatgatagtgctcatttcatgctttttttggtgattcaatttcgtagatgctgggaaagggaaaaaaagggaattttaaggcttaaacaaattagtaagacaacttcgtagatgcttggaccggcgacgacctggacgcacacgcgccgcaggaggtcgtactctggcggggccatcggtggcagcgagaagtggtcgtacgtggagctcccggtccggacttcgcccatgttccggaagatgccttgcccggcgactgcctgttaacaacactagcaaggtactagagtggaagagaatccgggtacaagagagataaagttggggaagataaacagcctagagaatggaggaagatgaacaataaagaggttctctgttgattctttgataaccatcgcgtgtccagcttctccattttatagcagagaatacctcacttgccacttttcaagggcccacatggcaccacatgacactgtactgag

SEQ ID NO: 48623 - DNA, 1311 bp, Zea Mays
attaattctgaggcctgtcatcaagagcactatttacttgcaaggtgtcacttaagtgctcaactgtgtccgttgtatccacacaatccagaagtgttgttgaatgaactcaaatcgccgtctgatttgctcgattttggcgagttctcagattgcatgaatttcagtactcaggatggcagccccttgttaaatgttgtcaacccaacatttgactatgtgccaccgaagcttgtgagcctattcatcactgacactgggggacacagtccatcttatatgtatcggcttattgctgagtattactcagctgatgacctggtagtgagacggaaggcaacatcttgaaggaagacaaaagcgctgcgaagtctccttggtgttctgatcataggatttgcgatcttattggaatcctagtgttcttgtactcgtcatgatctgttgcctgtagagcggtgctgctgtgataagtggaatcacctgtttgtggatccagttactgtcaaactgcaggaaatcgatgcaagcattctcgcgcatcgttgtaaccatggcggcattttaagtataaactgttgaggaatggagcgttacgtcatggaagaattgtttcactataggagaggttcaaatatatgattgactggttgtgtagagggtgtctgtttcttttctggtcataggttaatctgggccttggctggtccaaattttgaatgttataaactccagcaagctgttcgatatgtctatgaagtgttaccatgcacactgatgggtatttgctgagccattttgttttctatatctatcgtatatatatgatagtgctcatttcatgctttttttggtgattcaatttcgtagatgctgggaaagggaaaaaaagggaattttaaggcttaaacaaattagtaagacaacttcgtagatgcttggaccggcgacgacctggacgcacacgcgccgcaggaggtcgtactctggcggggccatcggtggcagcgagaagtggtcgtacgtggagctcccggtccggacttcgcccatgttccggaagatgccttgcccggcgactgcctgttaacaacactagcaaggtactagagtggaagagaatccgggtacaagagagataaagttggggaagataaacagcctagagaatggaggaagatgaacaataaagaggttctctgttgattctttgataaccatcgcgtgtccagcttctccattttatagcagagaatacctcacttgccacttttcaagggcccacatggcaccacatgacactgtactgag

SEQ ID NO: 48624 - DNA, 541 bp, Zea Mays
ctctctcacatcggatttgtcttatcagatcgccggcgctgacggccgcggccacaatgaggatgctccgccgcggaagaagacagactccgctggcgccggcgccaacgaccccgccgaatacgttcctgatgaagcctcgtggctcaggctctgaaacccgctcttcactgcaaatttgcaggagaataatatgaatgagaagggcaagagtgctggcatgcatgccacacatcctctaaaatgatacaataatagtgccgtgtgtgcctgtcagaattcctaagaattcttaggcattgtttgaaagggctgtaacttttttttctgaaagcaccttgccgtgaagcttttagaacatctctaacaggagagatgtatagaactctagcgcaaaaaattgcttcaacgagagttctattttacaaaaattcatcaaaattataggactctgtcagatattgttaacattttatttcctaaataatatgatataggactcagttttgttggagccgtaaatatttttatggccttgaac

SEQ ID NO: 48625 - DNA, 1976 bp, Zea Mays
gcggaggactctgggatggggtgcgggggccgaggggccacgcgggcgcgcagaggcggggggcacgcgggggcaagcggaaccgtggtgaagcagtgtggacacctacgctatagccttctagagcagtagagattgacaccacgggcacgcacgtcagcgcctccaccttcctccccagccgcaagcagagcaagaaccggagctggggatcgattccgcgccgcctgatctgcgatcgggactcgatcgtgcataatccgagccgcggccggcacctctactctcgcccgccccctatgtcgtaagcgcgcaatcagaactcccgatcacccgcacgctggtgcgccagtgtcgtcttcgccaccatgaactccatcgagcccttcaacaggctggtgaagctggcggcccgcgccttctacgatgacgtctcaatgaagggcgacaaccagcccaagacctcccgcggggacaaccgcggcatggccgtcgtcgtcctggacgcgctcaccagacgaccgtgggtccgagaggaagatttggctaaagcattgaagctccactcgaaacagctgcgtcgcattctccgtttctttgaagaggagaaactagtcacaagggatcatcggaaggagtcagcaaaaaatgccaaagcacataatgctgcagctgctaatgacggtcaaacagttgctaaggagggagaagagaaagtaaagatgcacacacattcatactgttgcttggattatgctcagatatgtgatgttgtcaggtatcggattcaccgcatgaaaaaaaaattgaaggatgaattggacagcagaaatacaattcaacactatatatgtcctagctgtaataaaagatactcagcctttgatgcactacaactggtaagctacacggatgagtacttccattgtgaaacttgcaatggtgaactggttgctgaggatgacaagcttgcttctgaggaaatgggagatggcgatgacaatgttagaaagcgcaggcgtgagaaattaaaggacatgcagcaaagaattgaagttgaagttgatatattgagtgatggtgaaaaagaaggtgctgaatcaggtaaagatggttctgaactcaaagtcatacctccatggatgatcaaagatggcatgaatcttacaaaggaacaaagaggagagaaaattgagtcacaaaaacttgaaaaatctgaagccaaagatgataagaaacaggacttgaaagatgatcaaagtgtacaggaagaatacataaaggcctattatgaggccttgaggaaaaagcaggaagaggaagaagcaaaaaacagaatgcagcaggaaggcaagatttctgtccctgattctcaaactgaacgccaagtgggcaagaaatacaagcgggacgacgatgatgatgaagacattgaatgggaagagcatcaacctacagctgcagggaatgcaaccgaaacatacaaattggcagatttgaatgcggaggcccaagaatctggcgatgatgaagatgataatgtgtgggaagagggctaatgctaaaaagataacagactattcctgtgcggctgcgcccttaggattttggtatcccaccagaggtcgagagtatttcactaatgagcttagttatgttgaacgcatgatcccgagaaacttgtcaagtgaaaagccagcccctatgcatttttagttgaagatgtacaaattatacttaaatactttatgagccggtcagcagtttcccctgttacttcgaagagctgttgtagtcttgtagactgttaatgtgtgggcaacttgcatgcctttgtttcgctgaaaggaattacacgtacatgcacgtttatgtcctgaaagtgaaaatgcaatcgttgtagttgccattcatcgatgcccacattcgacatgtatttgatagttatctagtaatccaagtttctgagttgtcgc

SEQ ID NO: 48626 - DNA, 1011 bp, Zea Mays
acactttcctttctccctcctgtgactcagtcggtcatggcggctcagatccagactcctccggcgtgggcgggcgtgagatccccgacagcacggccctagcagcggccacccccggtgggcacggcttgtgcgcgaccgtcccggcctgtgcgcgggcgcggcgtggcccttgacggcgcgctggcaagcgccctgctggtgcacaggcgggcagccacgacggcgcgcgagcgaggacccccggcgacgcgtggccccggctccgatccagtctcgtccggcgggcgcgggccctgccccggcggctccccgtgaccctggtgcatgtctacgaacaacgggtaacagtagaatccaaggctacacaagatatgcatgcgtcccgacagcgagtgtgctgcaactgcagggccatgcaggaagatgttccatagtgctggaggtgaagaggtcattgatcgaccatctctctctcgcaacgacattatcattccagttttggtcccgacagaaatgtgcgcgcgctggctgttagcatcagctctgccaccagcaacatgtccgctagtagtccagcaaatgtcatggttgaacaaccccaatgatcagctatgagaagaaatgacacgtatctttcacacgcacataggagccatacgaagaacgtactaatgaaaagatcgatgaattatattgatatgatatgacgtgagtgttttgaaatgtttggtaggttctgtttatatggatttttgtatgtaagactgcattgttcttttgtatgaggctgcatatgacgaggcgatgtctagtcagcacggaccagactatgactggaggacctcacctattgatcctcaggctatgtatgtaagtggtggaaaagctcatagaaggtacacaatgtttgctaacgtcatcaactcgagccaggtgagggttcggcgtggaggttcgtcaaggtctgctactcgtagctcccatcgctccatgttatggtgatcggcg

SEQ ID NO: 48627 - DNA, 922 bp, Zea Mays
acactttcctttctccctcctgtgactcagtcggtcatggcggctcagatccagactcctccggcgtgggcgggcgtgagatccccgacagcacggccctagcagcggccacccccggtgggcacggcttgtgcgcgaccgtcccggcctgtgcgcgggcgcggcgtggcccttgacggcgcgctggcaagcgccctgctggtgcacaggcgggcagccacgacggcgcgcgagcgaggacccccggcgacgcgtggccccggctccgatccagtctcgtccggcgggcgcgggccctgccccggcggctccccgtgaccctggtgcatgtctacgaacaacgggtaacagtagaatccaaggctacacaagatatgcatgcgtcccgacagcgagtgtgctgcaactgcagggccatgcaggaagatgttccatagtgctggaggtgaagaggtcattgatcgaccatctctctctcgcaacgacattgcaaatgtcatggttgaacaaccccaatgatcagctatgagaagaaatgacacgtatctttcacacgcacataggagccatacgaagaacgtactaatgaaaagatcgatgaattatattgatatgatatgacgtgagtgttttgaaatgtttggtaggttctgtttatatggatttttgtatgtaagactgcattgttcttttgtatgaggctgcatatgacgaggcgatgtctagtcagcacggaccagactatgactggaggacctcacctattgatcctcaggctatgtatgtaagtggtggaaaagctcatagaaggtacacaatgtttgctaacgtcatcaactcgagccaggtgagggttcggcgtggaggttcgtcaaggtctgctactcgtagctcccatcgctccatgttatggtgatcggcg

SEQ ID NO: 48628 - DNA, 1767 bp, Zea Mays
gccatcgcgcgctcgcctccctccccgcgcccgcagtccccgccgcaatccccgcgtccgcgcccgcagtccccgccgccgagcagtcccgccgcgccccctctccctgcaaaccccgccacgacgcagcaactgatccaccatcgacgcgcgcgccgcgcgccccgacgcggaacgctggatcccgcgcagcagaaggcggccaaccagtcgccgtcgcccccggcccccaccccgcctgctgcagcaagcggcgtccgctaccgcatgccctcgtccccggacctcctcctccccgccgacgctaccaagatgcgccgctactccgcgctgcccaacggcggccgccaggagacgttggccgaccgcgtgcaccgctaccagggcgtcatgctcgtcatcctcgcctcgctcgcgctcgtctctctcgtcctcctcctcatgccacgctcacccgctggcaccatgggcggcgcccggggcagacagcgagatcgagctcttcgtccaggtacgcactcccccgcccggtgacccgttgccggacttggagtcacgctgcctagactcgcccgctgggtggattcgtcgcgttggaggtcggattgtgaccacgccgtccagttaggatgtcgtcgtctccagatccaggggatggggttgctcggcatggcggccaagggcccctcgcccacgcgtcgcctcctatcgcagccgcacttggccatctcctcgctggtggcctccgtggctctgatccactgcttcctcaacacccggagatggttgacgtcgccttcgccgtctcctcgccagtggcctccaccagccccgcagtccaagacaaagccgcgacatgagtcaacccaagtccggtcgcacctacaccgatgaccgtacccaacgtgagtcaagccaagtccattcccctcccttgcttcctcaacttgttgtcttgtggtctgaagtttgtctcggagaaggtgatgccatcatcatcagttgtgattatgaattatattctactgataggcttagataatttttggaacacaacattgctccaaaaaagtttttctgaagaaaaggtatcaatctgcagtttgttgagctttaagaggaacgtggtgtcattgtcatctgagctcaagggtgtgaggagcaagcttgcttcctaggagcagttgtttgtaagggaatctcaaactagaaagcttgcggagacaaaaacaaggagcatggaagaggaagtaatcaagctgcagaaatgcttataggacaaggatgaacaactgcattcattcacaagtagcacagaacaggaacccaactgaaccttcaacttgcttgttctgggagatctgtgagcaagcgagttgtcctataacagttggctcctcacaatgggtattcgacatgagccccatccctgccacagacttgggaaaggcacagtgatttttatggtgacatgaagacattcctcttcaaattatatctttaagcaaccaattttcgccctactggtgcaaacaagaatttgcaatggcatccaagacagggtcagtacactcttaagtcttagaataactgcagttggtgaaggaatcaaaccaagaccaacatggccatagaaagagacctcccaaccaaagtgaggtttggtcttgtacattccaacgctaatgacaagtatgaatacgggatttccatactgagctagacaaaatggtcacttgttctttattgtgttcttggagaatggca

SEQ ID NO: 48629 - DNA, 2504 bp, Zea Mays
gccatcgcgcgctcgcctccctccccgcgcccgcagtccccgccgcaatccccgcgtccgcgcccgcagtccccgccgccgagcagtcccgccgcgccccctctccctgcaaaccccgccacgacgcagcaactgatccaccatcgacgcgcgcgccgcgcgccccgacgcggaacgctggatcccgcgcagcagaaggcggccaaccagtcgccgtcgcccccggcccccaccccgcctgctgcagcaagcggcgtccgctaccgcatgccctcgtccccggacctcctcctccccgccgacgctaccaagatgcgccgctactccgcgctgcccaacggcggccgccaggagacgttggccgaccgcgtgcaccgctaccagggcgtcatgctcgtcatcctcgcctcgctcgcgctcgtctctctcgtcctcctcctcatgccacgctcacccgctggcaccatgggcggcgcccggggcagacagcgagatcgagctcttcgtccaggtacgcactcccccgcccggtgacccgttgccggacttggagtcacgctgcctagactcgcccgctgggtggattcgtcgcgttggaggtcggattgtgaccacgccgtccagttaggatgtcgtcgtctccagatccaggggatggggttgctcggcatggcggccaagggcccctcgcccacgcgtcgcctcctatcgcagccgcacttggccatctcctcgctggtggcctccgtggctctgatccactgcttcctcaacacccggagatggttgacgtcgccttcgccgtctcctcgccagtggcctccaccagccccgcagtccaagacaaagccgcgacatgagtcaacccaagtccggtcgcacctacaccgatgaccgtacccaacgtattcaatctctctattcggcaacaccttaaaaagtggattgcaggcttagataatttttggaacacaacattgctccaaaaaagtttttctgaagaaaaggtatcaatctgcagtttggtaagtgagtctgaatctgcagcaccaaggacttcaataattagtttgaacctgcacttacagttctatgggtcttctcaattcttaataatattatatttttaatgaataattgaatatatattgagtctgtgtcatagattcagtcgccttaacaccctttgttgttttcccacttaagttagttaatgagatgaatggatggaaattacgtagtgaatgtatgataagtccaggctacatgttaaaagacacacttggctacttgagctctgtatttccatgaagaaatcttattgacgggtgctttcatctgctatttggatccgttgctgatggatcttacaaagaagaagttgagctttaagaggaacgtggtgtcattgtcatctgagctcaagggtgtgaggagcaagcttgcttcctaggagcagttgtttgtaagggaatctcaaactagaaagcttgcggagacaaaaacaaggagcatggaagaggaagtaatcaagctgcagaaatgcttataggacaaggatgaacaactgcattcattcacaagtagcacagaacagtaccatcatgagttggatgatcttagaacacatctgtcatttactcaagctacaggagaagcaggaacccaactgaaccttcaacttgcttgttctgggagatctgtgagcaagcgagttgtcctataacagttggctcctcacaatgggtattcgacatgagccccatccctgccacagacttgggaaaggcacagtgatttttatggtgacatgaagacattcctcttcaaattatatctttaagcaaccaattttcgccctactggtgcaaacaagaatttgcaatggataggttactggctgcacttgtttgtgaatacttggagtgaccacaactaagtcacacaatgaaactttactttccagagtgtaacctgccggacttctaatagaatgaactgaaagacttctctaacaaaagtggagctgaggggagcaagagtgctaaaagtggtccaatgtttttagatgttctcgaatgttatctgaaatatgaggtatggtgcataaaaaagtaggaaccacaatgagattgtgatgctgcacatggcacatcaaggtgcgcaagatatgtaccatagaaattatcgtaaagtgcacacagctgtatgtatagatgtttagaagtgaccgaagttaggcttgctcaaccggggcaatgatttacttagcctgctgaaatgtactataggtagcattcaagtttgtgaccatcatgcaagtacatgtgggtttgttgaaattgtgtggtcatcggagatgtagcaaaatgttccctatcgagagctcgtgtactatatttgttttatgaacttaattttgttgatgtaggactattacaaagttctagagacaacttaatttttattacaacataatatgtggtcatacatatgttaatgtt

SEQ ID NO: 48630 - DNA, 2385 bp, Zea Mays
gccatcgcgcgctcgcctccctccccgcgcccgcagtccccgccgcaatccccgcgtccgcgcccgcagtccccgccgccgagcagtcccgccgcgccccctctccctgcaaaccccgccacgacgcagcaactgatccaccatcgacgcgcgcgccgcgcgccccgacgcggaacgctggatcccgcgcagcagaaggcggccaaccagtcgccgtcgcccccggcccccaccccgcctgctgcagcaagcggcgtccgctaccgcatgccctcgtccccggacctcctcctccccgccgacgctaccaagatgcgccgctactccgcgctgcccaacggcggccgccaggagacgttggccgaccgcgtgcaccgctaccagggcgtcatgctcgtcatcctcgcctcgctcgcgctcgtctctctcgtcctcctcctcatgccacgctcacccgctggcaccatgggcggcgcccggggcagacagcgagatcgagctcttcgtccaggtacgcactcccccgcccggtgacccgttgccggacttggagtcacgctgcctagactcgcccgctgggtggattcgtcgcgttggaggtcggattgtgaccacgccgtccagttaggatgtcgtcgtctccagatccaggggatggggttgctcggcatggcggccaagggcccctcgcccacgcgtcgcctcctatcgcagccgcacttggccatctcctcgctggtggcctccgtggctctgatccactgcttcctcaacacccggagatggttgacgtcgccttcgccgtctcctcgccagtggcctccaccagccccgcagtccaagacaaagccgcgacatgagtcaacccaagtccggtcgcacctacaccgatgaccgtacccaacgtgagtcaagccaagtccattcccctcccttgcttcctcaacttgttgtcttgtggtctgaagtttgtctcggagaaggtgatgccatcatcatcagttgtgattatgaattatattctactgataggtattcaatctctctattcggcaacaccttaaaaagtggattgcaggcttagataatttttggaacacaacattgctccaaaaaagtttttctgaagaaaaggtatcaatctgcagtttggtaagtgagtctgaatctgcagcaccaaggacttcaataattagtttgaacctgcacttacagttctatgggtcttctcaattcttaataatattatatttttaatgaataattgaatatatattgagtctgtgtcatagattcagtcgccttaacaccctttgttgttttcccacttaagttagttaatgagatgaatggatggaaattacgtagtgaatgtatgataagtccaggctacatgttaaaagacacacttggctacttgagctctgtatttccatgaagaaatcttattgacgggtgctttcatctgctatttggatccgttgctgatggatcttacaaagaagaagttgagctttaagaggaacgtggtgtcattgtcatctgagctcaagggtgtgaggagcaagcttgcttcctaggagcagttgtttgtaagggaatctcaaactagaaagcttgcggagacaaaaacaaggagcatggaagaggaagtaatcaagctgcagaaatgcttataggacaaggatgaacaactgcattcattcacaagtagcacagaacagtaccatcatgagttggatgatcttagaacacatctgtcatttactcaagctacaggagaagcagatctgtgagcaagcgagttgtcctataacagttggctcctcacaatgggtattcgacatgagccccatccctgccacagacttgggaaaggcacagtgatttttatggtgacatgaagacattcctcttcaaattatatctttaagcaaccaattttcgccctactggtgcaaacaagaatttgcaatgggtatggtgcataaaaaagtaggaaccacaatgagattgtgatgctgcacatggcacatcaaggtgcgcaagatatgtaccatagaaattatcgtaaagtgcacacagctgtatgtatagatgtttagaagtgaccgaagttaggcttgctcaaccggggcaatgatttacttagcctgctgaaatgtactataggtagcattcaagtttgtgaccatcatgcaagtacatgtgggtttgttgaaattgtgtggtcatcggagatgtagcaaaatgttccctatcgagagctcgtgtactatatttgttttatgaacttaattttgttgatgtaggactattacaaagttctagagacaacttaatttttattacaacataatatgtggtcatacatatgttaatgtt

SEQ ID NO: 48631 - DNA, 1905 bp, Zea Mays
gccatcgcgcgctcgcctccctccccgcgcccgcagtccccgccgcaatccccgcgtccgcgcccgcagtccccgccgccgagcagtcccgccgcgccccctctccctgcaaaccccgccacgacgcagcaactgatccaccatcgacgcgcgcgccgcgcgccccgacgcggaacgctggatcccgcgcagcagaaggcggccaaccagtcgccgtcgcccccggcccccaccccgcctgctgcagcaagcggcgtccgctaccgcatgccctcgtccccggacctcctcctccccgccgacgctaccaagatgcgccgctactccgcgctgcccaacggcggccgccaggagacgttggccgaccgcgtgcaccgctaccagggcgtcatgctcgtcatcctcgcctcgctcgcgctcgtctctctcgtcctcctcctcatgccacgctcacccgctggcaccatgggcggcgcccggggcagacaggtacgcactcccccgcccggtgacccgttgccggacttggagtcacgctgcctagactcgcccgctgggtggattcgtcgcgttggaggtcggattgtgaccacgccgtccagttaggatgtcgtcgtctccagatccaggggatggggttgctcggcatggcggccaagggcccctcgcccacgcgtcgcctcctatcgcagccgcacttggccatctcctcgctggtggcctccgtggctctgatccactgcttcctcaacacccggagatggttgacgtcgccttcgccgtctcctcgccagtggcctccaccagccccgcagtccaagacaaagccgcgacatgagtcaacccaagtccggtcgcacctacaccgatgaccgtacccaacgtattcaatctctctattcggcaacaccttaaaaagtggattgcaggcttagataatttttggaacacaacattgctccaaaaaagtttttctgaagaaaagaagaagttgagctttaagaggaacgtggtgtcattgtcatctgagctcaagggtgtgaggagcaagcttgcttcctaggagcagttgtttgtaagggaatctcaaactagaaagcttgcggagacaaaaacaaggagcatggaagaggaagtaatcaagctgcagaaatgcttataggacaaggatgaacaactgcattcattcacaagtagcacagaacagtaccatcatgagttggatgatcttagaacacatctgtcatttactcaagctacaggagaagcaggaacccaactgaaccttcaacttgcttgttctgggagatctgtgagcaagcgagttgtcctataacagttggctcctcacaatgggtattcgacatgagccccatccctgccacagacttgggaaaggcacagtgatttttatggtgacatgaagacattcctcttcaaattatatctttaagcaaccaattttcgccctactggtgcaaacaagaatttgcaatgggtatggtgcataaaaaagtaggaaccacaatgagattgtgatgctgcacatggcacatcaaggtgcgcaagatatgtaccatagaaattatcgtaaagtgcacacagctgtatgtatagatgtttagaagtgaccgaagttaggcttgctcaaccggggcaatgatttacttagcctgctgaaatgtactataggtagcattcaagtttgtgaccatcatgcaagtacatgtgggtttgttgaaattgtgtggtcatcggagatgtagcaaaatgttccctatcgagagctcgtgtactatatttgttttatgaacttaattttgttgatgtaggactattacaaagttctagagacaacttaatttttattacaacataatatgtggtcatacatatgttaatgtt

SEQ ID NO: 48632 - DNA, 2400 bp, Zea Mays
gccatcgcgcgctcgcctccctccccgcgcccgcagtccccgccgcaatccccgcgtccgcgcccgcagtccccgccgccgagcagtcccgccgcgccccctctccctgcaaaccccgccacgacgcagcaactgatccaccatcgacgcgcgcgccgcgcgccccgacgcggaacgctggatcccgcgcagcagaaggcggccaaccagtcgccgtcgcccccggcccccaccccgcctgctgcagcaagcggcgtccgctaccgcatgccctcgtccccggacctcctcctccccgccgacgctaccaagatgcgccgctactccgcgctgcccaacggcggccgccaggagacgttggccgaccgcgtgcaccgctaccagggcgtcatgctcgtcatcctcgcctcgctcgcgctcgtctctctcgtcctcctcctcatgccacgctcacccgctggcaccatgggcggcgcccggggcagacaggtacgcactcccccgcccggtgacccgttgccggacttggagtcacgctgcctagactcgcccgctgggtggattcgtcgcgttggaggtcggattgtgaccacgccgtccagttaggatgtcgtcgtctccagatccaggggatggggttgctcggcatggcggccaagggcccctcgcccacgcgtcgcctcctatcgcagccgcacttggccatctcctcgctggtggcctccgtggctctgatccactgcttcctcaacacccggagatggttgacgtcgccttcgccgtctcctcgccagtggcctccaccagccccgcagtccaagacaaagccgcgacatgagtcaacccaagtccggtcgcacctacaccgatgaccgtacccaacgtgagtcaagccaagtccattcccctcccttgcttcctcaacttgttgtcttgtggtctgaagtttgtctcggagaaggtgatgccatcatcatcagttgtgattatgaattatattctactgataggtattcaatctctctattcggcaacaccttaaaaagtggattgcaggcttagataatttttggaacacaacattgctccaaaaaagtttttctgaagaaaaggtatcaatctgcagtttggtaagtgagtctgaatctgcagcaccaaggacttcaataattagtttgaacctgcacttacagttctatgggtcttctcaattcttaataatattatatttttaatgaataattgaatatatattgagtctgtgtcatagattcagtcgccttaacaccctttgttgttttcccacttaagttagttaatgagatgaatggatggaaattacgtagtgaatgtatgataagtccaggctacatgttaaaagacacacttggctacttgagctctgtatttccatgaagaaatcttattgacgggtgctttcatctgctatttggatccgttgctgatggatcttacaaagaagaagttgagctttaagaggaacgtggtgtcattgtcatctgagctcaagggtgtgaggagcaagcttgcttcctaggagcagttgtttgtaagggaatctcaaactagaaagcttgcggagacaaaaacaaggagcatggaagaggaagtaatcaagctgcagaaatgcttataggacaaggatgaacaactgcattcattcacaagtagcacagaacagtaccatcatgagttggatgatcttagaacacatctgtcatttactcaagctacaggagaagcaggaacccaactgaaccttcaacttgcttgttctgggagatctgtgagcaagcgagttgtcctataacagttggctcctcacaatgggtattcgacatgagccccatccctgccacagacttgggaaaggcacagtgatttttatggtgacatgaagacattcctcttcaaattatatctttaagcaaccaattttcgccctactggtgcaaacaagaatttgcaatgggtatggtgcataaaaaagtaggaaccacaatgagattgtgatgctgcacatggcacatcaaggtgcgcaagatatgtaccatagaaattatcgtaaagtgcacacagctgtatgtatagatgtttagaagtgaccgaagttaggcttgctcaaccggggcaatgatttacttagcctgctgaaatgtactataggtagcattcaagtttgtgaccatcatgcaagtacatgtgggtttgttgaaattgtgtggtcatcggagatgtagcaaaatgttccctatcgagagctcgtgtactatatttgttttatgaacttaattttgttgatgtaggactattacaaagttctagagacaacttaatttttattacaacataatatgtggtcatacatatgttaatgtt

SEQ ID NO: 48633 - DNA, 3143 bp, Zea Mays
gccatcgcgcgctcgcctccctccccgcgcccgcagtccccgccgcaatccccgcgtccgcgcccgcagtccccgccgccgagcagtcccgccgcgccccctctccctgcaaaccccgccacgacgcagcaactgatccaccatcgacgcgcgcgccgcgcgccccgacgcggaacgctggatcccgcgcagcagaaggcggccaaccagtcgccgtcgcccccggcccccaccccgcctgctgcagcaagcggcgtccgctaccgcatgccctcgtccccggacctcctcctccccgccgacgctaccaagatgcgccgctactccgcgctgcccaacggcggccgccaggagacgttggccgaccgcgtgcaccgctaccagggcgtcatgctcgtcatcctcgcctcgctcgcgctcgtctctctcgtcctcctcctcatgccacgctcacccgctggcaccatgggcggcgcccggggcagacaggtacgcactcccccgcccggtgacccgttgccggacttggagtcacgctgcctagactcgcccgctgggtggattcgtcgcgttggaggtcggattgtgaccacgccgtccagttaggatgtcgtcgtctccagatccaggggatggggttgctcggcatggcggccaagggcccctcgcccacgcgtcgcctcctatcgcagccgcacttggccatctcctcgctggtggcctccgtggctctgatccactgcttcctcaacacccggagatggttgacgtcgccttcgccgtctcctcgccagtggcctccaccagccccgcagtccaagacaaagccgcgacatgagtcaacccaagtccggtcgcacctacaccgatgaccgtacccaacgtgagtcaagccaagtccattcccctcccttgcttcctcaacttgttgtcttgtggtctgaagtttgtctcggagaaggtgatgccatcatcatcagttgtgattatgaattatattctactgataggcttagataatttttggaacacaacattgctccaaaaaagtttttctgaagaaaaggtatcaatctgcagtttggtaagtgagtctgaatctgcagcaccaaggacttcaataattagtttgaacctgcacttacagttctatgggtcttctcaattcttaataatattatatttttaatgaataattgaatatatattgagtctgtgtcatagattcagtcgccttaacaccctttgttgttttcccacttaagttagttaatgagatgaatggatggaaattacgtagtgaatgtatgataagtccaggctacatgttaaaagacacacttggctacttgagctctgtatttccatgaagaaatcttattgacgggtgctttcatctgctatttggatccgttgctgatggatcttacaaagaagaagttgagctttaagaggaacgtggtgtcattgtcatctgagctcaagggtgtgaggagcaagcttgcttcctaggagcagttgtttgtaagggaatctcaaactagaaagcttgcggagacaaaaacaaggagcatggaagaggaagtaatcaagctgcagaaatgcttataggacaaggatgaacaactgcattcattcacaagtagcacagaacagtaccatcatgagttggatgatcttagaacacatctgtcatttactcaagctacaggagaagcaggaacccaactgaaccttcaacttgcttgttctgggagatctgtgagcaagcgagttgtcctataacagttggctcctcacaatgggtattcgacatgagccccatccctgccacagacttgggaaaggcacagtgatttttatggtgacatgaagacattcctcttcaaattatatctttaagcaaccaattttcgccctactggtgcaaacaagaatttgcaatggataggttactggctgcacttgtttgtgaatacttggagtgaccacaactaagtcacacaatgaaactttactttccagagtgtaacctgccggacttctaatagaatgaactgaaagacttctctaacaaaagtggagctgaggggagcaagagtgctaaaagtggtccaatgtttttagatgttctcgaatgttatctgaaatatgaggtttatctcttgcttgatcaacaatagaagcaaaaaatcatccttttgtttatttatgtttcccaatataaaggaaaaaggggaaatattttggtgcagtgtgcccaattcttttgtccctagaaaactgtgtagccgcctataacaggcgctatagtcagttttagctattttagacaccactactatttgtacacacatttctattatcctattttagcctgctatatccatgtatgagccttatgggaactctgcaactactatggatcctcttatacattatgttcgacatgcagacaaggtattatattgagttggaccaataatccttcatatttattgatgtgaattatgttgtactggtgtcctgtccttttgtttgtgctttataatttgtaattcctagctgctgatatggtatgatggatgggaggtggctgaaatcgttcggataagtgtcaatttgttgttttctatttttatgaatggttttctatttcagctgatgaaccttttatagttcttttattatatactgccactgattgctaatagggtgcatgtctcctatttctaggtatggtgcataaaaaagtaggaaccacaatgagattgtgatgctgcacatggcacatcaaggtgcgcaagatatgtaccatagaaattatcgtaaagtgcacacagctgtatgtatagatgtttagaagtgaccgaagttaggcttgctcaaccggggcaatgatttacttagcctgctgaaatgtactataggtagcattcaagtttgtgaccatcatgcaagtacatgtgggtttgttgaaattgtgtggtcatcggagatgtagcaaaatgttccctatcgagagctcgtgtactatatttgttttatgaacttaattttgttgatgtaggactattacaaagttctagagacaacttaatttttattacaacataatatgtggtcatacatatgttaatgtt

SEQ ID NO: 48634 - DNA, 2682 bp, Zea Mays
gccatcgcgcgctcgcctccctccccgcgcccgcagtccccgccgcaatccccgcgtccgcgcccgcagtccccgccgccgagcagtcccgccgcgccccctctccctgcaaaccccgccacgacgcagcaactgatccaccatcgacgcgcgcgccgcgcgccccgacgcggaacgctggatcccgcgcagcagaaggcggccaaccagtcgccgtcgcccccggcccccaccccgcctgctgcagcaagcggcgtccgctaccgcatgccctcgtccccggacctcctcctccccgccgacgctaccaagatgcgccgctactccgcgctgcccaacggcggccgccaggagacgttggccgaccgcgtgcaccgctaccagggcgtcatgctcgtcatcctcgcctcgctcgcgctcgtctctctcgtcctcctcctcatgccacgctcacccgctggcaccatgggcggcgcccggggcagacagcgagatcgagctcttcgtccaggtacgcactcccccgcccggtgacccgttgccggacttggagtcacgctgcctagactcgcccgctgggtggattcgtcgcgttggaggtcggattgtgaccacgccgtccagttaggatgtcgtcgtctccagatccaggggatggggttgctcggcatggcggccaagggcccctcgcccacgcgtcgcctcctatcgcagccgcacttggccatctcctcgctggtggcctccgtggctctgatccactgcttcctcaacacccggagatggttgacgtcgccttcgccgtctcctcgccagtggcctccaccagccccgcagtccaagacaaagccgcgacatgagtcaacccaagtccggtcgcacctacaccgatgaccgtacccaacgcttagataatttttggaacacaacattgctccaaaaaagtttttctgaagaaaaggtatcaatctgcagtttgttgagctttaagaggaacgtggtgtcattgtcatctgagctcaagggtgtgaggagcaagcttgcttcctaggagcagttgtttgtaagggaatctcaaactagaaagcttgcggagacaaaaacaaggagcatggaagaggaagtaatcaagctgcagaaatgcttataggacaaggatgaacaactgcattcattcacaagtagcacagaacagtaccatcatgagttggatgatcttagaacacatctgtcatttactcaagctacaggagaagcaggaacccaactgaaccttcaacttgcttgttctgggagatctgtgagcaagcgagttgtcctataacagttggctcctcacaatgggtattcgacatgagccccatccctgccacagacttgggaaaggcacagtgatttttatggtgacatgaagacattcctcttcaaattatatctttaagcaaccaattttcgccctactggtgcaaacaagaatttgcaatggataggttactggctgcacttgtttgtgaatacttggagtgaccacaactaagtcacacaatgaaactttactttccagagtgtaacctgccggacttctaatagaatgaactgaaagacttctctaacaaaagtggagctgaggggagcaagagtgctaaaagtggtccaatgtttttagatgttctcgaatgttatctgaaatatgaggtttatctcttgcttgatcaacaatagaagcaaaaaatcatccttttgtttatttatgtttcccaatataaaggaaaaaggggaaatattttggtgcagtgtgcccaattcttttgtccctagaaaactgtgtagccgcctataacaggcgctatagtcagttttagctattttagacaccactactatttgtacacacatttctattatcctattttagcctgctatatccatgtatgagccttatgggaactctgcaactactatggatcctcttatacattatgttcgacatgcagacaaggtattatattgagttggaccaataatccttcatatttattgatgtgaattatgttgtactggtgtcctgtccttttgtttgtgctttataatttgtaattcctagctgctgatatggtatgatggatgggaggtggctgaaatcgttcggataagtgtcaatttgttgttttctatttttatgaatggttttctatttcagctgatgaaccttttatagttcttttattatatactgccactgattgctaatagggtgcatgtctcctatttctaggtatggtgcataaaaaagtaggaaccacaatgagattgtgatgctgcacatggcacatcaaggtgcgcaagatatgtaccatagaaattatcgtaaagtgcacacagctgtatgtatagatgtttagaagtgaccgaagttaggcttgctcaaccggggcaatgatttacttagcctgctgaaatgtactataggtagcattcaagtttgtgaccatcatgcaagtacatgtgggtttgttgaaattgtgtggtcatcggagatgtagcaaaatgttccctatcgagagctcgtgtactatatttgttttatgaacttaattttgttgatgtaggactattacaaagttctagagacaacttaatttttattacaacataatatgtggtcatacatatgttaatgtt

SEQ ID NO: 48635 - DNA, 2563 bp, Zea Mays
gccatcgcgcgctcgcctccctccccgcgcccgcagtccccgccgcaatccccgcgtccgcgcccgcagtccccgccgccgagcagtcccgccgcgccccctctccctgcaaaccccgccacgacgcagcaactgatccaccatcgacgcgcgcgccgcgcgccccgacgcggaacgctggatcccgcgcagcagaaggcggccaaccagtcgccgtcgcccccggcccccaccccgcctgctgcagcaagcggcgtccgctaccgcatgccctcgtccccggacctcctcctccccgccgacgctaccaagatgcgccgctactccgcgctgcccaacggcggccgccaggagacgttggccgaccgcgtgcaccgctaccagggcgtcatgctcgtcatcctcgcctcgctcgcgctcgtctctctcgtcctcctcctcatgccacgctcacccgctggcaccatgggcggcgcccggggcagacagcgagatcgagctcttcgtccaggtacgcactcccccgcccggtgacccgttgccggacttggagtcacgctgcctagactcgcccgctgggtggattcgtcgcgttggaggtcggattgtgaccacgccgtccagttaggatgtcgtcgtctccagatccaggggatggggttgctcggcatggcggccaagggcccctcgcccacgcgtcgcctcctatcgcagccgcacttggccatctcctcgctggtggcctccgtggctctgatccactgcttcctcaacacccggagatggttgacgtcgccttcgccgtctcctcgccagtggcctccaccagccccgcagtccaagacaaagccgcgacatgagtcaacccaagtccggtcgcacctacaccgatgaccgtacccaacgtattcaatctctctattcggcaacaccttaaaaagtggattgcaggcttagataatttttggaacacaacattgctccaaaaaagtttttctgaagaaaagaagaagttgagctttaagaggaacgtggtgtcattgtcatctgagctcaagggtgtgaggagcaagcttgcttcctaggagcagttgtttgtaagggaatctcaaactagaaagcttgcggagacaaaaacaaggagcatggaagaggaagtaatcaagctgcagaaatgcttataggacaaggatgaacaactgcattcattcacaagtagcacagaacaggaacccaactgaaccttcaacttgcttgttctgggagatctgtgagcaagcgagttgtcctataacagttggctcctcacaatgggtattcgacatgagccccatccctgccacagacttgggaaaggcacagtgatttttatggtgacatgaagacattcctcttcaaattatatctttaagcaaccaattttcgccctactggtgcaaacaagaatttgcaatggccggacttctaatagaatgaactgaaagacttctctaacaaaagtggagctgaggggagcaagagtgctaaaagtggtccaatgtttttagatgttctcgaatgttatctgaaatatgaggtttatctcttgcttgatcaacaatagaagcaaaaaatcatccttttgtttatttatgtttcccaatataaaggaaaaaggggaaatattttggtgcagtgtgcccaattcttttgtccctagaaaactgtgtagccgcctataacaggcgctatagtcagttttagctattttagacaccactactatttgtacacacatttctattatcctattttagcctgctatatccatgtatgagccttatgggaactctgcaactactatggatcctcttatacattatgttcgacatgcagacaaggtattatattgagttggaccaataatccttcatatttattgatgtgaattatgttgtactggtgtcctgtccttttgtttgtgctttataatttgtaattcctagctgctgatatggtatgatggatgggaggtggctgaaatcgttcggataagtgtcaatttgttgttttctatttttatgaatggttttctatttcagctgatgaaccttttatagttcttttattatatactgccactgattgctaatagggtgcatgtctcctatttctaggtatggtgcataaaaaagtaggaaccacaatgagattgtgatgctgcacatggcacatcaaggtgcgcaagatatgtaccatagaaattatcgtaaagtgcacacagctgtatgtatagatgtttagaagtgaccgaagttaggcttgctcaaccggggcaatgatttacttagcctgctgaaatgtactataggtagcattcaagtttgtgaccatcatgcaagtacatgtgggtttgttgaaattgtgtggtcatcggagatgtagcaaaatgttccctatcgagagctcgtgtactatatttgttttatgaacttaattttgttgatgtaggactattacaaagttctagagacaacttaatttttattacaacataatatgtggtcatacatatgttaatgtt

SEQ ID NO: 48636 - DNA, 1942 bp, Zea Mays
gccatcgcgcgctcgcctccctccccgcgcccgcagtccccgccgcaatccccgcgtccgcgcccgcagtccccgccgccgagcagtcccgccgcgccccctctccctgcaaaccccgccacgacgcagcaactgatccaccatcgacgcgcgcgccgcgcgccccgacgcggaacgctggatcccgcgcagcagaaggcggccaaccagtcgccgtcgcccccggcccccaccccgcctgctgcagcaagcggcgtccgctaccgcatgccctcgtccccggacctcctcctccccgccgacgctaccaagatgcgccgctactccgcgctgcccaacggcggccgccaggagacgttggccgaccgcgtgcaccgctaccagggcgtcatgctcgtcatcctcgcctcgctcgcgctcgtctctctcgtcctcctcctcatgccacgctcacccgctggcaccatgggcggcgcccggggcagacagcgagatcgagctcttcgtccaggtacgcactcccccgcccggtgacccgttgccggacttggagtcacgctgcctagactcgcccgctgggtggattcgtcgcgttggaggtcggattgtgaccacgccgtccagttaggatgtcgtcgtctccagatccaggggatggggttgctcggcatggcggccaagggcccctcgcccacgcgtcgcctcctatcgcagccgcacttggccatctcctcgctggtggcctccgtggctctgatccactgcttcctcaacacccggagatggttgacgtcgccttcgccgtctcctcgccagtggcctccaccagccccgcagtccaagacaaagccgcgacatgagtcaacccaagtccggtcgcacctacaccgatgaccgtacccaacgtattcaatctctctattcggcaacaccttaaaaagtggattgcaggcttagataatttttggaacacaacattgctccaaaaaagtttttctgaagaaaaggtatcaatctgcagtttgaagttgagctttaagaggaacgtggtgtcattgtcatctgagctcaagggtgtgaggagcaagcttgcttcctaggagcagttgtttgtaagggaatctcaaactagaaagcttgcggagacaaaaacaaggagcatggaagaggaagtaatcaagctgcagaaatgcttataggacaaggatgaacaactgcattcattcacaagtagcacagaacagtaccatcatgagttggatgatcttagaacacatctgtcatttactcaagctacaggagaagcaggaacccaactgaaccttcaacttgcttgttctgggagatctgtgagcaagcgagttgtcctataacagttggctcctcacaatgggtattcgacatgagccccatccctgccacagacttgggaaaggcacagtgatttttatggtgacatgaagacattcctcttcaaattatatctttaagcaaccaattttcgccctactggtgcaaacaagaatttgcaatgggtatggtgcataaaaaagtaggaaccacaatgagattgtgatgctgcacatggcacatcaaggtgcgcaagatatgtaccatagaaattatcgtaaagtgcacacagctgtatgtatagatgtttagaagtgaccgaagttaggcttgctcaaccggggcaatgatttacttagcctgctgaaatgtactataggtagcattcaagtttgtgaccatcatgcaagtacatgtgggtttgttgaaattgtgtggtcatcggagatgtagcaaaatgttccctatcgagagctcgtgtactatatttgttttatgaacttaattttgttgatgtaggactattacaaagttctagagacaacttaatttttattacaacataatatgtggtcatacatatgttaatgtt

SEQ ID NO: 48637 - DNA, 3023 bp, Zea Mays
gccatcgcgcgctcgcctccctccccgcgcccgcagtccccgccgcaatccccgcgtccgcgcccgcagtccccgccgccgagcagtcccgccgcgccccctctccctgcaaaccccgccacgacgcagcaactgatccaccatcgacgcgcgcgccgcgcgccccgacgcggaacgctggatcccgcgcagcagaaggcggccaaccagtcgccgtcgcccccggcccccaccccgcctgctgcagcaagcggcgtccgctaccgcatgccctcgtccccggacctcctcctccccgccgacgctaccaagatgcgccgctactccgcgctgcccaacggcggccgccaggagacgttggccgaccgcgtgcaccgctaccagggcgtcatgctcgtcatcctcgcctcgctcgcgctcgtctctctcgtcctcctcctcatgccacgctcacccgctggcaccatgggcggcgcccggggcagacaggtacgcactcccccgcccggtgacccgttgccggacttggagtcacgctgcctagactcgcccgctgggtggattcgtcgcgttggaggtcggattgtgaccacgccgtccagttaggatgtcgtcgtctccagatccaggggatggggttgctcggcatggcggccaagggcccctcgcccacgcgtcgcctcctatcgcagccgcacttggccatctcctcgctggtggcctccgtggctctgatccactgcttcctcaacacccggagatggttgacgtcgccttcgccgtctcctcgccagtggcctccaccagccccgcagtccaagacaaagccgcgacatgagtcaacccaagtccggtcgcacctacaccgatgaccgtacccaacgcttagataatttttggaacacaacattgctccaaaaaagtttttctgaagaaaaggtatcaatctgcagtttggtaagtgagtctgaatctgcagcaccaaggacttcaataattagtttgaacctgcacttacagttctatgggtcttctcaattcttaataatattatatttttaatgaataattgaatatatattgagtctgtgtcatagattcagtcgccttaacaccctttgttgttttcccacttaagttagttaatgagatgaatggatggaaattacgtagtgaatgtatgataagtccaggctacatgttaaaagacacacttggctacttgagctctgtatttccatgaagaaatcttattgacgggtgctttcatctgctatttggatccgttgctgatggatcttacaaagaagaagttgagctttaagaggaacgtggtgtcattgtcatctgagctcaagggtgtgaggagcaagcttgcttcctaggagcagttgtttgtaagggaatctcaaactagaaagcttgcggagacaaaaacaaggagcatggaagaggaagtaatcaagctgcagaaatgcttataggacaaggatgaacaactgcattcattcacaagtagcacagaacagtaccatcatgagttggatgatcttagaacacatctgtcatttactcaagctacaggagaagcaggaacccaactgaaccttcaacttgcttgttctgggagatctgtgagcaagcgagttgtcctataacagttggctcctcacaatgggtattcgacatgagccccatccctgccacagacttgggaaaggcacagtgatttttatggtgacatgaagacattcctcttcaaattatatctttaagcaaccaattttcgccctactggtgcaaacaagaatttgcaatggataggttactggctgcacttgtttgtgaatacttggagtgaccacaactaagtcacacaatgaaactttactttccagagtgtaacctggtaactgccggacttctaatagaatgaactgaaagacttctctaacaaaagtggagctgaggggagcaagagtgctaaaagtggtccaatgtttttagatgttctcgaatgttatctgaaatatgaggtttatctcttgcttgatcaacaatagaagcaaaaaatcatccttttgtttatttatgtttcccaatataaaggaaaaaggggaaatattttggtgcagtgtgcccaattcttttgtccctagaaaactgtgtagccgcctataacaggcgctatagtcagttttagctattttagacaccactactatttgtacacacatttctattatcctattttagcctgctatatccatgtatgagccttatgggaactctgcaactactatggatcctcttatacattatgttcgacatgcagacaaggtattatattgagttggaccaataatccttcatatttattgatgtgaattatgttgtactggtgtcctgtccttttgtttgtgctttataatttgtaattcctagctgctgatatggtatgatggatgggaggtggctgaaatcgttcggataagtgtcaatttgttgttttctatttttatgaatggttttctatttcagctgatgaaccttttatagttcttttattatatactgccactgattgctaatagggtgcatgtctcctatttctaggtatggtgcataaaaaagtaggaaccacaatgagattgtgatgctgcacatggcacatcaaggtgcgcaagatatgtaccatagaaattatcgtaaagtgcacacagctgtatgtatagatgtttagaagtgaccgaagttaggcttgctcaaccggggcaatgatttacttagcctgctgaaatgtactataggtagcattcaagtttgtgaccatcatgcaagtacatgtgggtttgttgaaattgtgtggtcatcggagatgtagcaaaatgttccctatcgagagctcgtgtactatatttgttttatgaacttaattttgttgatgtaggactattacaaagttctagagacaacttaatttttattacaacataatatgtggtcatacatatgttaatgtt

SEQ ID NO: 48638 - DNA, 2231 bp, Zea Mays
gccatcgcgcgctcgcctccctccccgcgcccgcagtccccgccgcaatccccgcgtccgcgcccgcagtccccgccgccgagcagtcccgccgcgccccctctccctgcaaaccccgccacgacgcagcaactgatccaccatcgacgcgcgcgccgcgcgccccgacgcggaacgctggatcccgcgcagcagaaggcggccaaccagtcgccgtcgcccccggcccccaccccgcctgctgcagcaagcggcgtccgctaccgcatgccctcgtccccggacctcctcctccccgccgacgctaccaagatgcgccgctactccgcgctgcccaacggcggccgccaggagacgttggccgaccgcgtgcaccgctaccagggcgtcatgctcgtcatcctcgcctcgctcgcgctcgtctctctcgtcctcctcctcatgccacgctcacccgctggcaccatgggcggcgcccggggcagacagcgagatcgagctcttcgtccaggtacgcactcccccgcccggtgacccgttgccggacttggagtcacgctgcctagactcgcccgctgggtggattcgtcgcgttggaggtcggattgtgaccacgccgtccagttaggatgtcgtcgtctccagatccaggggatggggttgctcggcatggcggccaagggcccctcgcccacgcgtcgcctcctatcgcagccgcacttggccatctcctcgctggtggcctccgtggctctgatccactgcttcctcaacacccggagatggttgacgtcgccttcgccgtctcctcgccagtggcctccaccagccccgcagtccaagacaaagccgcgacatgagtcaacccaagtccggtcgcacctacaccgatgaccgtacccaacgtattcaatctctctattcggcaacaccttaaaaagtggattgcaggcttagataatttttggaacacaacattgctccaaaaaagtttttctgaagaaaaggtatcaatctgcagtttggtaagtgagtctgaatctgcagcaccaaggacttcaataattagtttgaacctgcacttacagttctatgggtcttctcaattcttaataatattatatttttaatgaataattgaatatatattgagtctgtgtcatagattcagtcgccttaacaccctttgttgttttcccacttaagttagttaatgagatgaatggatggaaattacgtagtgaatgtatgataagtccaggctacatgttaaaagacacacttggctacttgagctctgtatttccatgaagaaatcttattgacgggtgctttcatctgctatttggatccgttgctgatggatcttacaaagaagaagttgagctttaagaggaacgtggtgtcattgtcatctgagctcaagggtgtgaggagcaagcttgcttcctaggagcagttgtttgtaagggaatctcaaactagaaagcttgcggagacaaaaacaaggagcatggaagaggaagtaatcaagctgcagaaatgcttataggacaaggatgaacaactgcattcattcacaagtagcacagaacaggaacccaactgaaccttcaacttgcttgttctgggagatctgtgagcaagcgagttgtcctataacagttggctcctcacaatgggtattcgacatgagccccatccctgccacagacttgggaaaggcacagtgatttttatggtgacatgaagacattcctcttcaaattatatctttaagcaaccaattttcgccctactggtgcaaacaagaatttgcaatgggtatggtgcataaaaaagtaggaaccacaatgagattgtgatgctgcacatggcacatcaaggtgcgcaagatatgtaccatagaaattatcgtaaagtgcacacagctgtatgtatagatgtttagaagtgaccgaagttaggcttgctcaaccggggcaatgatttacttagcctgctgaaatgtactataggtagcattcaagtttgtgaccatcatgcaagtacatgtgggtttgttgaaattgtgtggtcatcggagatgtagcaaaatgttccctatcgagagctcgtgtactatatttgttttatgaacttaattttgttgatgtaggactattacaaagttctagagacaacttaatttttattacaacataatatgtggtcatacatatgttaatgtt

SEQ ID NO: 48639 - DNA, 3091 bp, Zea Mays
gccatcgcgcgctcgcctccctccccgcgcccgcagtccccgccgcaatccccgcgtccgcgcccgcagtccccgccgccgagcagtcccgccgcgccccctctccctgcaaaccccgccacgacgcagcaactgatccaccatcgacgcgcgcgccgcgcgccccgacgcggaacgctggatcccgcgcagcagaaggcggccaaccagtcgccgtcgcccccggcccccaccccgcctgctgcagcaagcggcgtccgctaccgcatgccctcgtccccggacctcctcctccccgccgacgctaccaagatgcgccgctactccgcgctgcccaacggcggccgccaggagacgttggccgaccgcgtgcaccgctaccagggcgtcatgctcgtcatcctcgcctcgctcgcgctcgtctctctcgtcctcctcctcatgccacgctcacccgctggcaccatgggcggcgcccggggcagacagcgagatcgagctcttcgtccaggtacgcactcccccgcccggtgacccgttgccggacttggagtcacgctgcctagactcgcccgctgggtggattcgtcgcgttggaggtcggattgtgaccacgccgtccagttaggatgtcgtcgtctccagatccaggggatggggttgctcggcatggcggccaagggcccctcgcccacgcgtcgcctcctatcgcagccgcacttggccatctcctcgctggtggcctccgtggctctgatccactgcttcctcaacacccggagatggttgacgtcgccttcgccgtctcctcgccagtggcctccaccagccccgcagtccaagacaaagccgcgacatgagtcaacccaagtccggtcgcacctacaccgatgaccgtacccaacgtattcaatctctctattcggcaacaccttaaaaagtggattgcaggcttagataatttttggaacacaacattgctccaaaaaagtttttctgaagaaaaggtatcaatctgcagtttggtaagtgagtctgaatctgcagcaccaaggacttcaataattagtttgaacctgcacttacagttctatgggtcttctcaattcttaataatattatatttttaatgaataattgaatatatattgagtctgtgtcatagattcagtcgccttaacaccctttgttgttttcccacttaagttagttaatgagatgaatggatggaaattacgtagtgaatgtatgataagtccaggctacatgttaaaagacacacttggctacttgagctctgtatttccatgaagaaatcttattgacgggtgctttcatctgctatttggatccgttgctgatggatcttacaaagaagaagttgagctttaagaggaacgtggtgtcattgtcatctgagctcaagggtgtgaggagcaagcttgcttcctaggagcagttgtttgtaagggaatctcaaactagaaagcttgcggagacaaaaacaaggagcatggaagaggaagtaatcaagctgcagaaatgcttataggacaaggatgaacaactgcattcattcacaagtagcacagaacagtaccatcatgagttggatgatcttagaacacatctgtcatttactcaagctacaggagaagcaggaacccaactgaaccttcaacttgcttgttctgggagatctgtgagcaagcgagttgtcctataacagttggctcctcacaatgggtattcgacatgagccccatccctgccacagacttgggaaaggcacagtgatttttatggtgacatgaagacattcctcttcaaattatatctttaagcaaccaattttcgccctactggtgcaaacaagaatttgcaatggataggttactggctgcacttgtttgtgaatacttggagtgaccacaactaagtcacacaatgaaactttactttccagagtgtaacctggtaactgccggacttctaatagaatgaactgaaagacttctctaacaaaagtggagctgaggggagcaagagtgctaaaagtggtccaatgtttttagatgttctcgaatgttatctgaaatatgaggtttatctcttgcttgatcaacaatagaagcaaaaaatcatccttttgtttatttatgtttcccaatataaaggaaaaaggggaaatattttggtgcagtgtgcccaattcttttgtccctagaaaactgtgtagccgcctataacaggcgctatagtcagttttagctattttagacaccactactatttgtacacacatttctattatcctattttagcctgctatatccatgtatgagccttatgggaactctgcaactactatggatcctcttatacattatgttcgacatgcagacaaggtattatattgagttggaccaataatccttcatatttattgatgtgaattatgttgtactggtgtcctgtccttttgtttgtgctttataatttgtaattcctagctgctgatatggtatgatggatgggaggtggctgaaatcgttcggataagtgtcaatttgttgttttctatttttatgaatggttttctatttcagctgatgaaccttttatagttcttttattatatactgccactgattgctaatagggtgcatgtctcctatttctaggtatggtgcataaaaaagtaggaaccacaatgagattgtgatgctgcacatggcacatcaaggtgcgcaagatatgtaccatagaaattatcgtaaagtgcacacagctgtatgtatagatgtttagaagtgaccgaagttaggcttgctcaaccggggcaatgatttacttagcctgctgaaatgtactataggtagcattcaagtttgtgaccatcatgcaagtacatgtgggtttgttgaaattgtgtggtcatcggagatgtagcaaaatgttccctatcgagagctcgtgtactatatttgttttatgaacttaattttgttgatgtaggactattacaaagttctagagacaacttaatttttattacaacataatatgtggtcatacatatgttaatgtt

SEQ ID NO: 48640 - DNA, 2787 bp, Zea Mays
gccatcgcgcgctcgcctccctccccgcgcccgcagtccccgccgcaatccccgcgtccgcgcccgcagtccccgccgccgagcagtcccgccgcgccccctctccctgcaaaccccgccacgacgcagcaactgatccaccatcgacgcgcgcgccgcgcgccccgacgcggaacgctggatcccgcgcagcagaaggcggccaaccagtcgccgtcgcccccggcccccaccccgcctgctgcagcaagcggcgtccgctaccgcatgccctcgtccccggacctcctcctccccgccgacgctaccaagatgcgccgctactccgcgctgcccaacggcggccgccaggagacgttggccgaccgcgtgcaccgctaccagggcgtcatgctcgtcatcctcgcctcgctcgcgctcgtctctctcgtcctcctcctcatgccacgctcacccgctggcaccatgggcggcgcccggggcagacaggtacgcactcccccgcccggtgacccgttgccggacttggagtcacgctgcctagactcgcccgctgggtggattcgtcgcgttggaggtcggattgtgaccacgccgtccagttaggatgtcgtcgtctccagatccaggggatggggttgctcggcatggcggccaagggcccctcgcccacgcgtcgcctcctatcgcagccgcacttggccatctcctcgctggtggcctccgtggctctgatccactgcttcctcaacacccggagatggttgacgtcgccttcgccgtctcctcgccagtggcctccaccagccccgcagtccaagacaaagccgcgacatgagtcaacccaagtccggtcgcacctacaccgatgaccgtacccaacgtgagtcaagccaagtccattcccctcccttgcttcctcaacttgttgtcttgtggtctgaagtttgtctcggagaaggtgatgccatcatcatcagttgtgattatgaattatattctactgataggcttagataatttttggaacacaacattgctccaaaaaagtttttctgaagaaaaggtatcaatctgcagtttgttgagctttaagaggaacgtggtgtcattgtcatctgagctcaagggtgtgaggagcaagcttgcttcctaggagcagttgtttgtaagggaatctcaaactagaaagcttgcggagacaaaaacaaggagcatggaagaggaagtaatcaagctgcagaaatgcttataggacaaggatgaacaactgcattcattcacaagtagcacagaacagtaccatcatgagttggatgatcttagaacacatctgtcatttactcaagctacaggagaagcaggaacccaactgaaccttcaacttgcttgttctgggagatctgtgagcaagcgagttgtcctataacagttggctcctcacaatgggtattcgacatgagccccatccctgccacagacttgggaaaggcacagtgatttttatggtgacatgaagacattcctcttcaaattatatctttaagcaaccaattttcgccctactggtgcaaacaagaatttgcaatggataggttactggctgcacttgtttgtgaatacttggagtgaccacaactaagtcacacaatgaaactttactttccagagtgtaacctgccggacttctaatagaatgaactgaaagacttctctaacaaaagtggagctgaggggagcaagagtgctaaaagtggtccaatgtttttagatgttctcgaatgttatctgaaatatgaggtttatctcttgcttgatcaacaatagaagcaaaaaatcatccttttgtttatttatgtttcccaatataaaggaaaaaggggaaatattttggtgcagtgtgcccaattcttttgtccctagaaaactgtgtagccgcctataacaggcgctatagtcagttttagctattttagacaccactactatttgtacacacatttctattatcctattttagcctgctatatccatgtatgagccttatgggaactctgcaactactatggatcctcttatacattatgttcgacatgcagacaaggtattatattgagttggaccaataatccttcatatttattgatgtgaattatgttgtactggtgtcctgtccttttgtttgtgctttataatttgtaattcctagctgctgatatggtatgatggatgggaggtggctgaaatcgttcggataagtgtcaatttgttgttttctatttttatgaatggttttctatttcagctgatgaaccttttatagttcttttattatatactgccactgattgctaatagggtgcatgtctcctatttctaggtatggtgcataaaaaagtaggaaccacaatgagattgtgatgctgcacatggcacatcaaggtgcgcaagatatgtaccatagaaattatcgtaaagtgcacacagctgtatgtatagatgtttagaagtgaccgaagttaggcttgctcaaccggggcaatgatttacttagcctgctgaaatgtactataggtagcattcaagtttgtgaccatcatgcaagtacatgtgggtttgttgaaattgtgtggtcatcggagatgtagcaaaatgttccctatcgagagctcgtgtactatatttgttttatgaacttaattttgttgatgtaggactattacaaagttctagagacaacttaatttttattacaacataatatgtggtcatacatatgttaatgtt

SEQ ID NO: 48641 - DNA, 2973 bp, Zea Mays
gccatcgcgcgctcgcctccctccccgcgcccgcagtccccgccgcaatccccgcgtccgcgcccgcagtccccgccgccgagcagtcccgccgcgccccctctccctgcaaaccccgccacgacgcagcaactgatccaccatcgacgcgcgcgccgcgcgccccgacgcggaacgctggatcccgcgcagcagaaggcggccaaccagtcgccgtcgcccccggcccccaccccgcctgctgcagcaagcggcgtccgctaccgcatgccctcgtccccggacctcctcctccccgccgacgctaccaagatgcgccgctactccgcgctgcccaacggcggccgccaggagacgttggccgaccgcgtgcaccgctaccagggcgtcatgctcgtcatcctcgcctcgctcgcgctcgtctctctcgtcctcctcctcatgccacgctcacccgctggcaccatgggcggcgcccggggcagacaggtacgcactcccccgcccggtgacccgttgccggacttggagtcacgctgcctagactcgcccgctgggtggattcgtcgcgttggaggtcggattgtgaccacgccgtccagttaggatgtcgtcgtctccagatccaggggatggggttgctcggcatggcggccaagggcccctcgcccacgcgtcgcctcctatcgcagccgcacttggccatctcctcgctggtggcctccgtggctctgatccactgcttcctcaacacccggagatggttgacgtcgccttcgccgtctcctcgccagtggcctccaccagccccgcagtccaagacaaagccgcgacatgagtcaacccaagtccggtcgcacctacaccgatgaccgtacccaacgtattcaatctctctattcggcaacaccttaaaaagtggattgcaggcttagataatttttggaacacaacattgctccaaaaaagtttttctgaagaaaaggtatcaatctgcagtttggtaagtgagtctgaatctgcagcaccaaggacttcaataattagtttgaacctgcacttacagttctatgggtcttctcaattcttaataatattatatttttaatgaataattgaatatatattgagtctgtgtcatagattcagtcgccttaacaccctttgttgttttcccacttaagttagttaatgagatgaatggatggaaattacgtagtgaatgtatgataagtccaggctacatgttaaaagacacacttggctacttgagctctgtatttccatgaagaaatcttattgacgggtgctttcatctgctatttggatccgttgctgatggatcttacaaagaagaagttgagctttaagaggaacgtggtgtcattgtcatctgagctcaagggtgtgaggagcaagcttgcttcctaggagcagttgtttgtaagggaatctcaaactagaaagcttgcggagacaaaaacaaggagcatggaagaggaagtaatcaagctgcagaaatgcttataggacaaggatgaacaactgcattcattcacaagtagcacagaacagtaccatcatgagttggatgatcttagaacacatctgtcatttactcaagctacaggagaagcaggaacccaactgaaccttcaacttgcttgttctgggagatctgtgagcaagcgagttgtcctataacagttggctcctcacaatgggtattcgacatgagccccatccctgccacagacttgggaaaggcacagtgatttttatggtgacatgaagacattcctcttcaaattatatctttaagcaaccaattttcgccctactggtgcaaacaagaatttgcaatggccggacttctaatagaatgaactgaaagacttctctaacaaaagtggagctgaggggagcaagagtgctaaaagtggtccaatgtttttagatgttctcgaatgttatctgaaatatgaggtttatctcttgcttgatcaacaatagaagcaaaaaatcatccttttgtttatttatgtttcccaatataaaggaaaaaggggaaatattttggtgcagtgtgcccaattcttttgtccctagaaaactgtgtagccgcctataacaggcgctatagtcagttttagctattttagacaccactactatttgtacacacatttctattatcctattttagcctgctatatccatgtatgagccttatgggaactctgcaactactatggatcctcttatacattatgttcgacatgcagacaaggtattatattgagttggaccaataatccttcatatttattgatgtgaattatgttgtactggtgtcctgtccttttgtttgtgctttataatttgtaattcctagctgctgatatggtatgatggatgggaggtggctgaaatcgttcggataagtgtcaatttgttgttttctatttttatgaatggttttctatttcagctgatgaaccttttatagttcttttattatatactgccactgattgctaatagggtgcatgtctcctatttctaggtatggtgcataaaaaagtaggaaccacaatgagattgtgatgctgcacatggcacatcaaggtgcgcaagatatgtaccatagaaattatcgtaaagtgcacacagctgtatgtatagatgtttagaagtgaccgaagttaggcttgctcaaccggggcaatgatttacttagcctgctgaaatgtactataggtagcattcaagtttgtgaccatcatgcaagtacatgtgggtttgttgaaattgtgtggtcatcggagatgtagcaaaatgttccctatcgagagctcgtgtactatatttgttttatgaacttaattttgttgatgtaggactattacaaagttctagagacaacttaatttttattacaacataatatgtggtcatacatatgttaatgtt

SEQ ID NO: 48642 - DNA, 2131 bp, Zea Mays
gccatcgcgcgctcgcctccctccccgcgcccgcagtccccgccgcaatccccgcgtccgcgcccgcagtccccgccgccgagcagtcccgccgcgccccctctccctgcaaaccccgccacgacgcagcaactgatccaccatcgacgcgcgcgccgcgcgccccgacgcggaacgctggatcccgcgcagcagaaggcggccaaccagtcgccgtcgcccccggcccccaccccgcctgctgcagcaagcggcgtccgctaccgcatgccctcgtccccggacctcctcctccccgccgacgctaccaagatgcgccgctactccgcgctgcccaacggcggccgccaggagacgttggccgaccgcgtgcaccgctaccagggcgtcatgctcgtcatcctcgcctcgctcgcgctcgtctctctcgtcctcctcctcatgccacgctcacccgctggcaccatgggcggcgcccggggcagacagcgagatcgagctcttcgtccaggtacgcactcccccgcccggtgacccgttgccggacttggagtcacgctgcctagactcgcccgctgggtggattcgtcgcgttggaggtcggattgtgaccacgccgtccagttaggatgtcgtcgtctccagatccaggggatggggttgctcggcatggcggccaagggcccctcgcccacgcgtcgcctcctatcgcagccgcacttggccatctcctcgctggtggcctccgtggctctgatccactgcttcctcaacacccggagatggttgacgtcgccttcgccgtctcctcgccagtggcctccaccagccccgcagtccaagacaaagccgcgacatgagtcaacccaagtccggtcgcacctacaccgatgaccgtacccaacgtgagtcaagccaagtccattcccctcccttgcttcctcaacttgttgtcttgtggtctgaagtttgtctcggagaaggtgatgccatcatcatcagttgtgattatgaattatattctactgataggtattcaatctctctattcggcaacaccttaaaaagtggattgcaggcttagataatttttggaacacaacattgctccaaaaaagtttttctgaagaaaaggtatcaatctgcagtttggtaagtgagtctgaatctgcagcaccaaggacttcaataattagtttgaacctgcacttacagttctatgggtcttctcaattcttaataatattatatttttaatgaataattgaatatatattgagtctgtgtcatagattcagtcgccttaacaccctttgttgttttcccacttaagttagttaatgagatgaatggatggaaattacgtagtgaatgtatgataagtccaggctacatgttaaaagacacacttggctacttgagctctgtatttccatgaagaaatcttattgacgggtgctttcatctgctatttggatccgttgctgatggatcttacaaagaagaagttgagctttaagaggaacgtggtgtcattgtcatctgagctcaagggtgtgaggagcaagcttgcttcctaggagcagttgtttgtaagggaatctcaaactagaaagcttgcggagacaaaaacaaggagcatggaagaggaagtaatcaagctgcagaaatgcttataggacaaggatgaacaactgcattcattcacaagtagcacagaacaggtatggtgcataaaaaagtaggaaccacaatgagattgtgatgctgcacatggcacatcaaggtgcgcaagatatgtaccatagaaattatcgtaaagtgcacacagctgtatgtatagatgtttagaagtgaccgaagttaggcttgctcaaccggggcaatgatttacttagcctgctgaaatgtactataggtagcattcaagtttgtgaccatcatgcaagtacatgtgggtttgttgaaattgtgtggtcatcggagatgtagcaaaatgttccctatcgagagctcgtgtactatatttgttttatgaacttaattttgttgatgtaggactattacaaagttctagagacaacttaatttttattacaacataatatgtggtcatacatatgttaatgtt

SEQ ID NO: 48643 - DNA, 3016 bp, Zea Mays
gccatcgcgcgctcgcctccctccccgcgcccgcagtccccgccgcaatccccgcgtccgcgcccgcagtccccgccgccgagcagtcccgccgcgccccctctccctgcaaaccccgccacgacgcagcaactgatccaccatcgacgcgcgcgccgcgcgccccgacgcggaacgctggatcccgcgcagcagaaggcggccaaccagtcgccgtcgcccccggcccccaccccgcctgctgcagcaagcggcgtccgctaccgcatgccctcgtccccggacctcctcctccccgccgacgctaccaagatgcgccgctactccgcgctgcccaacggcggccgccaggagacgttggccgaccgcgtgcaccgctaccagggcgtcatgctcgtcatcctcgcctcgctcgcgctcgtctctctcgtcctcctcctcatgccacgctcacccgctggcaccatgggcggcgcccggggcagacaggtacgcactcccccgcccggtgacccgttgccggacttggagtcacgctgcctagactcgcccgctgggtggattcgtcgcgttggaggtcggattgtgaccacgccgtccagttaggatgtcgtcgtctccagatccaggggatggggttgctcggcatggcggccaagggcccctcgcccacgcgtcgcctcctatcgcagccgcacttggccatctcctcgctggtggcctccgtggctctgatccactgcttcctcaacacccggagatggttgacgtcgccttcgccgtctcctcgccagtggcctccaccagccccgcagtccaagacaaagccgcgacatgagtcaacccaagtccggtcgcacctacaccgatgaccgtacccaacgcttagataatttttggaacacaacattgctccaaaaaagtttttctgaagaaaaggtatcaatctgcagtttggtaagtgagtctgaatctgcagcaccaaggacttcaataattagtttgaacctgcacttacagttctatgggtcttctcaattcttaataatattatatttttaatgaataattgaatatatattgagtctgtgtcatagattcagtcgccttaacaccctttgttgttttcccacttaagttagttaatgagatgaatggatggaaattacgtagtgaatgtatgataagtccaggctacatgttaaaagacacacttggctacttgagctctgtatttccatgaagaaatcttattgacgggtgctttcatctgctatttggatccgttgctgatggatcttacaaagaagaagttgagctttaagaggaacgtggtgtcattgtcatctgagctcaagggtgtgaggagcaagcttgcttcctaggagcagttgtttgtaagggaatctcaaactagaaagcttgcggagacaaaaacaaggagcatggaagaggaagtaatcaagctgcagaaatgcttataggacaaggatgaacaactgcattcattcacaagtagcacagaacagtaccatcatgagttggatgatcttagaacacatctgtcatttactcaagctacaggagaagcaggaacccaactgaaccttcaacttgcttgttctgggagatctgtgagcaagcgagttgtcctataacagttggctcctcacaatgggtattcgacatgagccccatccctgccacagacttgggaaaggcacagtgatttttatggtgacatgaagacattcctcttcaaattatatctttaagcaaccaattttcgccctactggtgcaaacaagaatttgcaatggataggttactggctgcacttgtttgtgaatacttggagtgaccacaactaagtcacacaatgaaactttactttccagagtgtaacctgccggacttctaatagaatgaactgaaagacttctctaacaaaagtggagctgaggggagcaagagtgctaaaagtggtccaatgtttttagatgttctcgaatgttatctgaaatatgaggtttatctcttgcttgatcaacaatagaagcaaaaaatcatccttttgtttatttatgtttcccaatataaaggaaaaaggggaaatattttggtgcagtgtgcccaattcttttgtccctagaaaactgtgtagccgcctataacaggcgctatagtcagttttagctattttagacaccactactatttgtacacacatttctattatcctattttagcctgctatatccatgtatgagccttatgggaactctgcaactactatggatcctcttatacattatgttcgacatgcagacaaggtattatattgagttggaccaataatccttcatatttattgatgtgaattatgttgtactggtgtcctgtccttttgtttgtgctttataatttgtaattcctagctgctgatatggtatgatggatgggaggtggctgaaatcgttcggataagtgtcaatttgttgttttctatttttatgaatggttttctatttcagctgatgaaccttttatagttcttttattatatactgccactgattgctaatagggtgcatgtctcctatttctaggtatggtgcataaaaaagtaggaaccacaatgagattgtgatgctgcacatggcacatcaaggtgcgcaagatatgtaccatagaaattatcgtaaagtgcacacagctgtatgtatagatgtttagaagtgaccgaagttaggcttgctcaaccggggcaatgatttacttagcctgctgaaatgtactataggtagcattcaagtttgtgaccatcatgcaagtacatgtgggtttgttgaaattgtgtggtcatcggagatgtagcaaaatgttccctatcgagagctcgtgtactatatttgttttatgaacttaattttgttgatgtaggactattacaaagttctagagacaacttaatttttattacaacataatatgtggtcatacatatgttaatgtt

SEQ ID NO: 48644 - DNA, 2525 bp, Zea Mays
gccatcgcgcgctcgcctccctccccgcgcccgcagtccccgccgcaatccccgcgtccgcgcccgcagtccccgccgccgagcagtcccgccgcgccccctctccctgcaaaccccgccacgacgcagcaactgatccaccatcgacgcgcgcgccgcgcgccccgacgcggaacgctggatcccgcgcagcagaaggcggccaaccagtcgccgtcgcccccggcccccaccccgcctgctgcagcaagcggcgtccgctaccgcatgccctcgtccccggacctcctcctccccgccgacgctaccaagatgcgccgctactccgcgctgcccaacggcggccgccaggagacgttggccgaccgcgtgcaccgctaccagggcgtcatgctcgtcatcctcgcctcgctcgcgctcgtctctctcgtcctcctcctcatgccacgctcacccgctggcaccatgggcggcgcccggggcagacagcgagatcgagctcttcgtccaggtacgcactcccccgcccggtgacccgttgccggacttggagtcacgctgcctagactcgcccgctgggtggattcgtcgcgttggaggtcggattgtgaccacgccgtccagttaggatgtcgtcgtctccagatccaggggatggggttgctcggcatggcggccaagggcccctcgcccacgcgtcgcctcctatcgcagccgcacttggccatctcctcgctggtggcctccgtggctctgatccactgcttcctcaacacccggagatggttgacgtcgccttcgccgtctcctcgccagtggcctccaccagccccgcagtccaagacaaagccgcgacatgagtcaacccaagtccggtcgcacctacaccgatgaccgtacccaacaagaagttgagctttaagaggaacgtggtgtcattgtcatctgagctcaagggtgtgaggagcaagcttgcttcctaggagcagttgtttgtaagggaatctcaaactagaaagcttgcggagacaaaaacaaggagcatggaagaggaagtaatcaagctgcagaaatgcttataggacaaggatgaacaactgcattcattcacaagtagcacagaacagtaccatcatgagttggatgatcttagaacacatctgtcatttactcaagctacaggagaagcaggaacccaactgaaccttcaacttgcttgttctgggagatctgtgagcaagcgagttgtcctataacagttggctcctcacaatgggtattcgacatgagccccatccctgccacagacttgggaaaggcacagtgatttttatggtgacatgaagacattcctcttcaaattatatctttaagcaaccaattttcgccctactggtgcaaacaagaatttgcaatggccggacttctaatagaatgaactgaaagacttctctaacaaaagtggagctgaggggagcaagagtgctaaaagtggtccaatgtttttagatgttctcgaatgttatctgaaatatgaggtttatctcttgcttgatcaacaatagaagcaaaaaatcatccttttgtttatttatgtttcccaatataaaggaaaaaggggaaatattttggtgcagtgtgcccaattcttttgtccctagaaaactgtgtagccgcctataacaggcgctatagtcagttttagctattttagacaccactactatttgtacacacatttctattatcctattttagcctgctatatccatgtatgagccttatgggaactctgcaactactatggatcctcttatacattatgttcgacatgcagacaaggtattatattgagttggaccaataatccttcatatttattgatgtgaattatgttgtactggtgtcctgtccttttgtttgtgctttataatttgtaattcctagctgctgatatggtatgatggatgggaggtggctgaaatcgttcggataagtgtcaatttgttgttttctatttttatgaatggttttctatttcagctgatgaaccttttatagttcttttattatatactgccactgattgctaatagggtgcatgtctcctatttctaggtatggtgcataaaaaagtaggaaccacaatgagattgtgatgctgcacatggcacatcaaggtgcgcaagatatgtaccatagaaattatcgtaaagtgcacacagctgtatgtatagatgtttagaagtgaccgaagttaggcttgctcaaccggggcaatgatttacttagcctgctgaaatgtactataggtagcattcaagtttgtgaccatcatgcaagtacatgtgggtttgttgaaattgtgtggtcatcggagatgtagcaaaatgttccctatcgagagctcgtgtactatatttgttttatgaacttaattttgttgatgtaggactattacaaagttctagagacaacttaatttttattacaacataatatgtggtcatacatatgttaatgtt

SEQ ID NO: 48645 - DNA, 2949 bp, Zea Mays
gccatcgcgcgctcgcctccctccccgcgcccgcagtccccgccgcaatccccgcgtccgcgcccgcagtccccgccgccgagcagtcccgccgcgccccctctccctgcaaaccccgccacgacgcagcaactgatccaccatcgacgcgcgcgccgcgcgccccgacgcggaacgctggatcccgcgcagcagaaggcggccaaccagtcgccgtcgcccccggcccccaccccgcctgctgcagcaagcggcgtccgctaccgcatgccctcgtccccggacctcctcctccccgccgacgctaccaagatgcgccgctactccgcgctgcccaacggcggccgccaggagacgttggccgaccgcgtgcaccgctaccagggcgtcatgctcgtcatcctcgcctcgctcgcgctcgtctctctcgtcctcctcctcatgccacgctcacccgctggcaccatgggcggcgcccggggcagacagcgagatcgagctcttcgtccaggtacgcactcccccgcccggtgacccgttgccggacttggagtcacgctgcctagactcgcccgctgggtggattcgtcgcgttggaggtcggattgtgaccacgccgtccagttaggatgtcgtcgtctccagatccaggggatggggttgctcggcatggcggccaagggcccctcgcccacgcgtcgcctcctatcgcagccgcacttggccatctcctcgctggtggcctccgtggctctgatccactgcttcctcaacacccggagatggttgacgtcgccttcgccgtctcctcgccagtggcctccaccagccccgcagtccaagacaaagccgcgacatgagtcaacccaagtccggtcgcacctacaccgatgaccgtacccaacgcttagataatttttggaacacaacattgctccaaaaaagtttttctgaagaaaaggtatcaatctgcagtttggtaagtgagtctgaatctgcagcaccaaggacttcaataattagtttgaacctgcacttacagttctatgggtcttctcaattcttaataatattatatttttaatgaataattgaatatatattgagtctgtgtcatagattcagtcgccttaacaccctttgttgttttcccacttaagttagttaatgagatgaatggatggaaattacgtagtgaatgtatgataagtccaggctacatgttaaaagacacacttggctacttgagctctgtatttccatgaagaaatcttattgacgggtgctttcatctgctatttggatccgttgctgatggatcttacaaagaagaagttgagctttaagaggaacgtggtgtcattgtcatctgagctcaagggtgtgaggagcaagcttgcttcctaggagcagttgtttgtaagggaatctcaaactagaaagcttgcggagacaaaaacaaggagcatggaagaggaagtaatcaagctgcagaaatgcttataggacaaggatgaacaactgcattcattcacaagtagcacagaacagtaccatcatgagttggatgatcttagaacacatctgtcatttactcaagctacaggagaagcaggaacccaactgaaccttcaacttgcttgttctgggagatctgtgagcaagcgagttgtcctataacagttggctcctcacaatgggtattcgacatgagccccatccctgccacagacttgggaaaggcacagtgatttttatggtgacatgaagacattcctcttcaaattatatctttaagcaaccaattttcgccctactggtgcaaacaagaatttgcaatggccggacttctaatagaatgaactgaaagacttctctaacaaaagtggagctgaggggagcaagagtgctaaaagtggtccaatgtttttagatgttctcgaatgttatctgaaatatgaggtttatctcttgcttgatcaacaatagaagcaaaaaatcatccttttgtttatttatgtttcccaatataaaggaaaaaggggaaatattttggtgcagtgtgcccaattcttttgtccctagaaaactgtgtagccgcctataacaggcgctatagtcagttttagctattttagacaccactactatttgtacacacatttctattatcctattttagcctgctatatccatgtatgagccttatgggaactctgcaactactatggatcctcttatacattatgttcgacatgcagacaaggtattatattgagttggaccaataatccttcatatttattgatgtgaattatgttgtactggtgtcctgtccttttgtttgtgctttataatttgtaattcctagctgctgatatggtatgatggatgggaggtggctgaaatcgttcggataagtgtcaatttgttgttttctatttttatgaatggttttctatttcagctgatgaaccttttatagttcttttattatatactgccactgattgctaatagggtgcatgtctcctatttctaggtatggtgcataaaaaagtaggaaccacaatgagattgtgatgctgcacatggcacatcaaggtgcgcaagatatgtaccatagaaattatcgtaaagtgcacacagctgtatgtatagatgtttagaagtgaccgaagttaggcttgctcaaccggggcaatgatttacttagcctgctgaaatgtactataggtagcattcaagtttgtgaccatcatgcaagtacatgtgggtttgttgaaattgtgtggtcatcggagatgtagcaaaatgttccctatcgagagctcgtgtactatatttgttttatgaacttaattttgttgatgtaggactattacaaagttctagagacaacttaatttttattacaacataatatgtggtcatacatatgttaatgtt

SEQ ID NO: 48646 - DNA, 3285 bp, Zea Mays
gccatcgcgcgctcgcctccctccccgcgcccgcagtccccgccgcaatccccgcgtccgcgcccgcagtccccgccgccgagcagtcccgccgcgccccctctccctgcaaaccccgccacgacgcagcaactgatccaccatcgacgcgcgcgccgcgcgccccgacgcggaacgctggatcccgcgcagcagaaggcggccaaccagtcgccgtcgcccccggcccccaccccgcctgctgcagcaagcggcgtccgctaccgcatgccctcgtccccggacctcctcctccccgccgacgctaccaagatgcgccgctactccgcgctgcccaacggcggccgccaggagacgttggccgaccgcgtgcaccgctaccagggcgtcatgctcgtcatcctcgcctcgctcgcgctcgtctctctcgtcctcctcctcatgccacgctcacccgctggcaccatgggcggcgcccggggcagacaggtacgcactcccccgcccggtgacccgttgccggacttggagtcacgctgcctagactcgcccgctgggtggattcgtcgcgttggaggtcggattgtgaccacgccgtccagttaggatgtcgtcgtctccagatccaggggatggggttgctcggcatggcggccaagggcccctcgcccacgcgtcgcctcctatcgcagccgcacttggccatctcctcgctggtggcctccgtggctctgatccactgcttcctcaacacccggagatggttgacgtcgccttcgccgtctcctcgccagtggcctccaccagccccgcagtccaagacaaagccgcgacatgagtcaacccaagtccggtcgcacctacaccgatgaccgtacccaacgcttagataatttttggaacacaacattgctccaaaaaagtttttctgaagaaaaggtatcaatctgcagtttggtaagtgagtctgaatctgcagcaccaaggacttcaataattagtttgaacctgcacttacagttctatgggtcttctcaattcttaataatattatatttttaatgaataattgaatatatattgagtctgtgtcatagattcagtcgccttaacaccctttgttgttttcccacttaagttagttaatgagatgaatggatggaaattacgtagtgaatgtatgataagtccaggctacatgttaaaagacacacttggctacttgagctctgtatttccatgaagaaatcttattgacgggtgctttcatctgctatttggatccgttgctgatggatcttacaaagaagaagttgagctttaagaggaacgtggtgtcattgtcatctgagctcaagggtgtgaggagcaagcttgcttcctaggagcagttgtttgtaagggaatctcaaactagaaagcttgcggagacaaaaacaaggagcatggaagaggaagtaatcaagctgcagaaatgcttataggacaaggatgaacaactgcattcattcacaagtagcacagaacagtaccatcatgagttggatgatcttagaacacatctgtcatttactcaagctacaggagaagcaggaacccaactgaaccttcaacttgcttgttctgggagatctgtgagcaagcgagttgtcctataacagttggctcctcacaatgggtattcgacatgagccccatccctgccacagacttgggaaaggcacagtgatttttatggtgacatgaagacattcctcttcaaattatatctttaagcaaccaattttcgccctactggtgcaaacaagaatttgcaatggccggacttctaatagaatgaactgaaagacttctctaacaaaagtggagctgaggggagcaagagtgctaaaagtggtccaatgtttttagatgttctcgaatgttatctgaaatatgaggtttatctcttgcttgatcaacaatagaagcaaaaaatcatccttttgtttatttatgtttcccaatataaaggaaaaaggggaaatattttggtgcagtgtgcccaattcttttgtccctagaaaactgtgtagccgcctataacaggcgctatagtcagttttagctattttagacaccactactatttgtacacacatttctattatcctattttagcctgctatatccatgtatgagccttatgggaactctgcaactactatggatcctcttatacattatgttcgacatgcagacaaggtattatattgagttggaccaataatccttcatatttattgatgtgaattatgttgtactggtgtcctgtccttttgtttgtgctttataatttgtaattcctagctgctgatatggtatgatggatgggaggtggctgaaatcgttcggataagtgtcaatttgttgttttctatttttatgaatggttttctatttcagctgatgaaccttttatagttcttttattatatactgccactgattgctaatagggtgcatgtctcctatttctaggtatggtgcataaaaaagtaggaaccacaatgagattgtgatgctgcacatggcacatcaaggtgcgcaagatatgtaccatagaaattatcgtaaagtgcacacagctgtatgtatagatgtttagaagtgaccgaagttaggcttgctcaaccggggcaatgatttacttagcctgctgaaatgtactataggtagcattcaagtttgtgaccatcatgcaagtacatgtgggtttgttgaaattgtgtggtcatcggagatgtagcaaaatgttccctatcgagagctcgtgtactatatttgttttatgaacttaattttgttgatgtaggactattacaaagttctagagacaacttaatttttattacaacataatatgtggtcatacatatgttaatgttgcaatattttttccgttgcaacgcacgggtatttacctagtacttgtcatatgtatttatttttgacagagatgatgtcatgttcatccatccaatgcagtcacccgtgaaatctgctaatgccgctagctgcatccttcacatgtgtttgtcccaactcaggttccctgccccctgacaaattgttctgctgtctccaaagattcagtcttggtccccatgccgtgcagaaggctgcccaaaaatgtttcctgtttcctagttcaaagcttgtccagattgactacaaaatactagttaggtttcgagtgtttaaacagcacagctgcagtactgccagccagccgaacaggaaagc

SEQ ID NO: 48647 - DNA, 762 bp, Zea Mays
cttgagttgctaaagcaccaggcaagagttggagaactaggagtcttcggctgtcgctacggccttcggattgctcctgtattcttcaatggacaatccttgacacggtcacataagcacaacaagaggagaaccccgaccacagttcccagtccaagggcgacgatggcggatttgcttttattgctgaacaatgggaaccctctgtgggtgaccgcttgctcgagccattatttgaattcaagctcctcatctgtgtgaagctgacagcacattgaggcttcccaagctctgtagccacgggggaattacgccgatgagcagacagtttgttaggatgagcacctgcattgtctcaccgccgcggaaattcctggtcagcaccaagcttgtcaggttgggcaggtgttgcaagacctgcaatgtctatgccaggttgtgaaactattcctggtcagcgagaggtacgacagggatctcaactccttgaagctctccggtatccccccccacgagcttgttccttgtaagattcagtgtcctcaacttggtgcacacactgatgccaggagctatagcgccactcagatagttggttccaacatcaaaagtattaagcttcggcagcaagctggagtcgatagcaatctcactagagagcgagttgttcctcaagctgattaccctcagcagtggagaactttacagggaagcgggcaactcaccatccagcctattggtggccaggtttacgaactctag

SEQ ID NO: 48648 - DNA, 1987 bp, Zea Mays
atatataacaggttatgcataaaccggggcttgcctttagtttaacacttagatagtgtttgctgggggaggtactcgcttggcgagcacccactggttaagtccaccatccttcagtacgtccaccaactgcatcttgtggttggcaccacatcacttgcacggtcatcatctctcggtcctatatgagtggtctataaagaggaggtttgaacttgctggtttactatcatctatactaagagctcatttagaagcttatgaccctgttctttcgctgacgctaagatacttaataagcattcacaaggcattttgcacgcgccaaggaattcaatcacctatatctgatctcactgaacgactgttatttgaggatcgtgacccccctgtggttcctccggaatgctcactcgaagcaccatcatttgatgaggttgatgttcaagccctagcgcatgctgttgagttgacaagacaaggtgctgtggatagcttgaagtttgcaaaaggacatttataccaagcttttcagaacgaattgtgccggatgaagctggacctgacacttctggataaacttgtacatgagtattgtgtatacaggggaatagttgaaggcagttcacatgttctttctggaactgctgacttgaaatgtaatcaaaataatgatgttaataatgaaacacagctttattgtgaaatgaccaacaatcagaatggacattgtagcaccagcggtatcaatcttgacgattcttggtccaggaggttgcatagggatagacatattatgcctgggcagcaaagacgaaagagatggagaggacggttagatgatcttgattatgcttgtgatgcgttgttggatcccagtaagcatgatagtttgtctcctactcttgatatggacgaagatactatggtagaaaaacaggacttggtggaaaattttaatttatctgataaacacatggaagatcagaaatatgaaattattttggagatgcgggacctcacacgaaaagggatggcttccaaagttgttgaggaaataagcagtatagatcctgatttctttcaacagaaccctattctcctgtttcagctgaaacaggttgaatttcttaagctggtagctgccggtgatcatgtatctgctctcaaggttgcatcaacttatctgggaccacttgctgccaataacgaagctctactgaagcccttgaaggaaacattggtgacactaattcaacccaatgaagatgtagtcatgaatgcattgtcattgccagtacttgccagttctgtccaggttgcaatgagcagaaggcttggtattgaagagcctcagttaatgaagatagtcagaacaacaatccatacacacactgaatggtttaagcttcagatgtgcaaggaccgttttgagcacttattgaagattgattctctaaaagaggttgatccatcattggggagtcaccgtaagtccaaggtccttacagatgaatgtgcaaatggatcatctcaaatgacaacatgttcaagtggcaaggtgccagatgaaggtagtagccctcaagtctcatcagaagttgcctgtgatgaaaatgctatactgaaggttatggaattccttgcgttgccaagggcggacgccatccaactcctcatgcagtacaatggaaatgcagaagcagtcatccaacagatcttccaatagtgcttactgtaaataacaaagtattttgcttgctttcaaacgtaattatttgttgatacttttcttgccctgtacagaagattctgttagaactaggagtctgtgtttgatgatccacagtacttctatggacttacacagagtaggaatcggtgggattcagcacaggctaaactcaacgataaatgcaaagatattgatttatactggttcagaccattgaacagcgtgcgtaatatatattatgtctagttagtt

SEQ ID NO: 48649 - DNA, 1753 bp, Zea Mays
aaaccctttgctctacagtggtctataaagaggaggtttgaacttgctggtttactatcatctatactaagagctcatttagaagcttatgaccctgttctttcgctgacgctaagatacttaataagcattcacaaggcattttgcacgcgccaaggaattcaatcacctatatctgatctcactgaacgactgttatttgaggatcgtgacccccctgtggttcctccggaatgctcactcgaagcaccatcatttgatgaggttgatgttcaagccctagcgcatgctgttgagttgacaagacaaggtgctgtggatagcttgaagtttgcaaaaggacatttataccaagcttttcagaacgaattgtgccggatgaagctggacctgacacttctggataaacttgtacatgagtattgtgtatacaggggaatagttgaaggcagttcacatgttctttctggaactgctgacttgaaatgtaatcaaaataatgatgttaataatgaaacacagctttattgtgaaatgaccaacaatcagaatggacattgtagcaccagcggtatcaatcttgacgattcttggtccaggaggttgcatagggatagacatattatgcctgggcagcaaagacgaaagagatggagaggacggttagatgatcttgattatgcttgtgatgcgttgttggatcccagtaagcatgatagtttgtctcctactcttgatatggacgaagatactatggtagaaaaacaggacttggtggaaaattttaatttatctgataaacacatggaagatcagaaatatgaaattattttggagatgcgggacctcacacgaaaagggatggcttccaaagttgttgaggaaataagcagtatagatcctgatttctttcaacagaaccctattctcctgtttcagctgaaacaggttgaatttcttaagctggtagctgccggtgatcatgtatctgctctcaaggttgcatcaacttatctgggaccacttgctgccaataacgaagctctactgaagcccttgaaggaaacattggtgacactaattcaacccaatgaagatgtagtcatgaatgcattgtcattgccagtacttgccagttctgtccaggttgcaatgagcagaaggcttggtattgaagagcctcagttaatgaagatagtcagaacaacaatccatacacacactgaatggtttaagcttcagatgtgcaaggaccgttttgagcacttattgaagattgattctctaaaagaggttgatccatcattggggagtcaccgtaagtccaaggtccttacagatgaatgtgcaaatggatcatctcaaatgacaacatgttcaagtggcaaggtgccagatgaaggaattccttgcgttgccaagggcggacgccatccaactcctcatgcagtacaatggaaatgcagaagcagtcatccaacagatcttccaatagtgcttactgtaaataacaaagtattttgcttgctttcaaacgtaattatttgttgatacttttcttgccctgtacagaagattctgttagaactaggagtctgtgtttgatgatccacagtacttctatggacttacacagagtaggaatcggtgggattcagcacaggctaaactcaacgataaatgcaaagatattgatttatactggttcagaccattgaacagcgtgcgtaatatatattatgtctagttagtt

SEQ ID NO: 48650 - DNA, 1801 bp, Zea Mays
aaaccctttgctctacagtggtctataaagaggaggtttgaacttgctggtttactatcatctatactaagagctcatttagaagcttatgaccctgttctttcgctgacgctaagatacttaataagcattcacaaggcattttgcacgcgccaaggaattcaatcacctatatctgatctcactgaacgactgttatttgaggatcgtgacccccctgtggttcctccggaatgctcactcgaagcaccatcatttgatgaggttgatgttcaagccctagcgcatgctgttgagttgacaagacaaggtgctgtggatagcttgaagtttgcaaaaggacatttataccaagcttttcagaacgaattgtgccggatgaagctggacctgacacttctggataaacttgtacatgagtattgtgtatacaggggaatagttgaaggcagttcacatgttctttctggaactgctgacttgaaatgtaatcaaaataatgatgttaataatgaaacacagctttattgtgaaatgaccaacaatcagaatggacattgtagcaccagcggtatcaatcttgacgattcttggtccaggaggttgcatagggatagacatattatgcctgggcagcaaagacgaaagagatggagaggacggttagatgatcttgattatgcttgtgatgcgttgttggatcccagtaagcatgatagtttgtctcctactcttgatatggacgaagatactatggtagaaaaacaggacttggtggaaaattttaatttatctgataaacacatggaagatcagaaatatgaaattattttggagatgcgggacctcacacgaaaagggatggcttccaaagttgttgaggaaataagcagtatagatcctgatttctttcaacagaaccctattctcctgtttcagctgaaacaggttgaatttcttaagctggtagctgccggtgatcatgtatctgctctcaaggttgcatcaacttatctgggaccacttgctgccaataacgaagctctactgaagcccttgaaggaaacattggtgacactaattcaacccaatgaagatgtagtcatgaatgcattgtcattgccagtacttgccagttctgtccagaaggcttggtattgaagagcctcagttaatgaagatagtcagaacaacaatccatacacacactgaatggtttaagcttcagatgtgcaaggaccgttttgagcacttattgaagattgattctctaaaagaggttgatccatcattggggagtcaccgtaagtccaaggtccttacagatgaatgtgcaaatggatcatctcaaatgacaacatgttcaagtggcaaggtgccagatgaaggtagtagccctcaagtctcatcagaagttgcctgtgatgaaaatgctatactgaaggttatggaattccttgcgttgccaagggcggacgccatccaactcctcatgcagtacaatggaaatgcagaagcagtcatccaacagatcttccaatagtgcttactgtaaataacaaagtattttgcttgctttcaaacgtaattatttgttgatacttttcttgccctgtacagaagattctgttagaactaggagtctgtgtttgatgatccacagtacttctatggacttacacagagtaggaatcggtgggattcagcacaggctaaactcaacgataaatgcaaagatattgatttatactggttcagaccattgaacagcgtgcgtaatatatattatgtctagttagtt

SEQ ID NO: 48651 - DNA, 1802 bp, Zea Mays
aaaccctttgctctacagtggtctataaagaggaggtttgaacttgctggtttactatcatctatactaagagctcatttagaagcttatgaccctgttctttcgctgacgctaagatacttaataagcattcacaaggcattttgcacgcgccaaggaattcaatcacctatatctgatctcactgaacgactgttatttgaggatcgtgacccccctgtggttcctccggaatgctcactcgaagcaccatcatttgatgagccctagcgcatgctgttgagttgacaagacaaggtgctgtggatagcttgaagtttgcaaaaggacatttataccaagcttttcagaacgaattgtgccggatgaagctggacctgacacttctggataaacttgtacatgagtattgtgtatacaggggaatagttgaaggcagttcacatgttctttctggaactgctgacttgaaatgtaatcaaaataatgatgttaataatgaaacacagctttattgtgaaatgaccaacaatcagaatggacattgtagcaccagcggtatcaatcttgacgattcttggtccaggaggttgcatagggatagacatattatgcctgggcagcaaagacgaaagagatggagaggacggttagatgatcttgattatgcttgtgatgcgttgttggatcccagtaagcatgatagtttgtctcctactcttgatatggacgaagatactatggtagaaaaacaggacttggtggaaaattttaatttatctgataaacacatggaagatcagaaatatgaaattattttggagatgcgggacctcacacgaaaagggatggcttccaaagttgttgaggaaataagcagtatagatcctgatttctttcaacagaaccctattctcctgtttcagctgaaacaggttgaatttcttaagctggtagctgccggtgatcatgtatctgctctcaaggttgcatcaacttatctgggaccacttgctgccaataacgaagctctactgaagcccttgaaggaaacattggtgacactaattcaacccaatgaagatgtagtcatgaatgcattgtcattgccagtacttgccagttctgtccaggttgcaatgagcagaaggcttggtattgaagagcctcagttaatgaagatagtcagaacaacaatccatacacacactgaatggtttaagcttcagatgtgcaaggaccgttttgagcacttattgaagattgattctctaaaagaggttgatccatcattggggagtcaccgtaagtccaaggtccttacagatgaatgtgcaaatggatcatctcaaatgacaacatgttcaagtggcaaggtgccagatgaaggtagtagccctcaagtctcatcagaagttgcctgtgatgaaaatgctatactgaaggttatggaattccttgcgttgccaagggcggacgccatccaactcctcatgcagtacaatggaaatgcagaagcagtcatccaacagatcttccaatagtgcttactgtaaataacaaagtattttgcttgctttcaaacgtaattatttgttgatacttttcttgccctgtacagaagattctgttagaactaggagtctgtgtttgatgatccacagtacttctatggacttacacagagtaggaatcggtgggattcagcacaggctaaactcaacgataaatgcaaagatattgatttatactggttcagaccattgaacagcgtgcgtaatatatattatgtctagttagtt

SEQ ID NO: 48652 - DNA, 1288 bp, Zea Mays
aagaaaaaaaactgcccgaggaaagaaggcggaagccgacgtgcaaccagcccagcttaaaaaaaactgcccgagcaaagaaggcggatgccgacagacgagtcgtccgtcccaggctcccagccccggcgccccgtctcaaatcaaaaaaattcgtctcaaatctcaaacccataaaaaatactgtattttccaaccaagccactcgcccgaccttcatccgcattccacgcgcactccgctgcctcactccgagactccgccgctgcttccaacttccgttgcgcacgagcgaaacatccggagctagcaagggaggaggaggaggaggcgatggcggggggcggggataaggtggactacgtcttcaaggtggtgctcatcggcgactccgctgtcggcaagtcgcagatccttgcgcgcttcgcccgcaacgagtttagcctcgactcgaaggccaccattggggtcgagttccagactcggacgctcgtcatcgaacacaagtccgtcaaggcgcagatctgggacaccgccgggcaggagaggtatagagctgtcacaagtgcctactacagaggtgctttgggagctctgctagtctatgatatcacaaaacgccagagcttcgaccacatacctcgctggctggaagagcttcggggccatgctgacaaaaacattgtgatcatgctggttggcaacaagagcgacctcgaagacgagcgtgccgtaagcaccgaggacgccaaggagtttgccgagaaggagaacctcttcttccttgagacctccgcgctgcaggcgaccaatgtagaaaatgccttccagaccgtcttgacagagatctttaagatccacagcaagaagaacatggcagcggacccaagggccaatggggccgcaccatcgctggcagggaagaaggtcatcgtcccaggcccagctcaggagatccctaagagcaagtgctgcagttccatgtgacatgttgcctgaattttatttgggtttgttcgtgtccgagggaccgatatcgtagtttagatttgtcacccgtcttcaagatgacgaggatagggagcgagaagaaaacatatgtttgcatagactttgttggattttacaaaaatagcagtgtaagcacattattttttccccgatgccttgaaacccttgtgtacagtagagatggatcctaaacatcttaattacaggataaatttaatatttgaaatagatatgtataaaatatgatgttaatatttagttatgctgttaaacatat

SEQ ID NO: 48653 - DNA, 1645 bp, Zea Mays
caaattggcccatactctgtttctaagtttatttgaatgaagtatacgaggagggaatgtgtattgtctattatgttgacaaacaaaacatagttgaaatccagaaaaaagaaaaaagttaacctacggcaggggcatccacgtgttgatgccctactggtcgcctcacatccctcacgataacgaagcgaatcctattgcgacgcagccaccagccaccatcggccatcgctctagccagcccgcccgccagcgagaggtcaaaaaccactacgagccaaaaactggagcccagggaaagcgacgagcaaaccaaacatggcggcgatcctcgcgcgcgccggcgtcatcgccaccgccggcaaaggtttctcgggccgccgccggggcaatggtatcgtcgtcgcggcggtcactaaaacgggggctgctgtgccacaggagggggcgctggaacggccggcgtggtccggcgagaccacgctgtcgcgtctggttggcgcgctcatcgcgttcaagccgctctacgcggtattgaagctcgcctcccgcgaggtcatcatcaggacggcggagaagtcgaacatcccgtggagggagatgacgaaggaggtgctggagtcggacgtgtacgaggtgttcgagagaatccaagacccaaacctcgtgtaccctgactactatctcaacccgtttcatgcctacgacgaagggaatctatcatggctggctgcagcagaggcggagcctgcaacaatgtcgatcgcaaagagggcaatacctgaggctacatcaatcgaagaggccaaccaaattgtccgcggcaactggctgaatgtgattgaggagcatcatctgaagtactcggggaactgtcaggggctcgacctatcaccgtactttcttgctgtggcggcacaaaaggaagaaaaactgtcacggccaaagcctattcgctgggttcatgccaatggtgaagcgaccgggctgtcttcagattcatttgaccttgtctcccttgcttatgtgtgccatgagtgcccagcacgagcaatcacgggattagtgaaggaagcattcagggtccttcgcccgggaggaacaatcgccttaactgacaattcgcctaaatccaaagtgcttcaggaactatccccagttttgttcactctgatgaagagtaccgagcctttcctggacgagtactacatgctggatttggaggagacgatgagaaaagtgggctttgttaacgtttgctccgtcctgacagaccccaggcacagaacagtcactgcaaccgtgccttactaattgggtcagaccatcaaatcccaagcccggccggtgtacaacaattgactatttgaaattttgtatccttactggtatggttgcacctgtataaagtagagcaatctgagtgaaacaacaaatcgaagtacaccaatttaccttccacgcatggacattatgaagtccaacactaggactgttatggtcagatgattcagggaaccaatctaaaaaaaaactcatgtgatattgtagccaggaatcactttcatgaaccttaattaactctgaaatatttatcagctggtacccaaccaatcagcattgctgtataaatcgaaaataaaac

SEQ ID NO: 48654 - DNA, 2206 bp, Zea Mays
atcggcaaaatccccatacgtcgaattttaggacggcctgcggtaactcctcacggcacgtcgagcccactcagcagtcagcagcgacccgcaccttccggaggtaagccatggcagagttgcctttggcagcggggctgatggaccttcgcaactgcaagctctctccgaagccagcgccgcccttgccactccccgcgctccgccgcatgcacacaagcgccacggctacgacggccccgtccccgcgccatgcggtccccgaactccactccactaccgagctggcggacgggagcatcgtcttccgtttcggccatcctaagtccaaggcgctggagccggagccggcgagcgtaaagaccagcccttactccagagttgcccctgcctcgggcgctgtgcccggcagccagatggagccggagattgactctgaacatggattagacggcgtgcgaataggcaccacggctggggttgagaagccgagcccgaatgccgcagccgaggcctggccgacacctccacctcctgacgccggcgcggtaaccggtgccacttccgctgcgctagaggaggcgccggagcaggaggcgggttccaatgctgccgttgaggaggtggacaccaggccatcatccgcagagtctcttgtcccgtcgagatcagaggatgggccaaagggcgacggcgtcgctgttgaggctggcatgccgaccagtggtgctgccatggatacgattgagactgctttggaggggcgcggggcaagcgaggatgactcagcagttgatgtgagtggtggcttggatgaggcggcgacttccggtttggaggactccgaagccgcatcggaaggctccactgcacaggatttctacaccgacgttgaaacggagtccagcggctccagcagcgacgagcagagagctgagttcggcttttccttaccaccaccggaacaagttagcaacaaggcggattggaaaaatgacacttcagaggtgaagagttctgataggatgattccaatagctcaacggacacgtgtgttatcgtcaggtgctgcaatattgcctcatccgtcaaaggtagcaacaggtggagaagatgcatatttcattgcagccaatggctggtttggtgtagcagatggagttggccagtggtcatttgaaggaatcaacgcagggctttatgcaagagaactaatggatggctgcaaaaagttcgttaccgagaatcaaggggatccagatcttagaccagagcagatcctttccaaagcagtagatgaagcatgttcacctggttcttgcactgtattagttgctcattttgatggccaggcccttcaagcatcaaatattggggactctgggtttatagtgataagaaatggagaagtgttcaaaaagtctaaacctacgctttatggtttcaatttcccactacaaattcagaagggagatgacccctcaaagtttgtacagaattatgctattgatctagaggacggcgatgcaattgtgacagcaaccgatggcctttttgataatgtatacgagcatgaaatagctggaattgtctccaaatcgttacaggcagatctagaaccagcggagattgcggaacacttggctgtgaaggcccaggaagtagggaggtctggggctgggagaagcccattttcagatgctgctctctcggctgggtaccttggctacagtgggggcaaactggatgacatagccgtcgttgtatcaattgtccggactgaaattcaagaggataggctaagatgactatgcagaaaagaagctcatgttttgtggaagctcaacaccaagcgaccacgcgggttgccctatcagtattctgtactgctagaactgcagctatgtggcgatttctggaaagttaagggcgtatgcatcagcatcatacaccgtgctcgatcatcaataggcgggccaataaccattttgatttttggtttcgctataaaaatataaggcatttagatgttgcccttgccattaaaccaatgtcatgtactccttctgtcataaattaaaattcgttttggtttctaatggattcatataatacttataaaaagcaaaacaaagtttagtttgggacagagggagtatttactttagtcgttgcagtcttaccagattaaagaaaagactacaag

SEQ ID NO: 48655 - DNA, 1187 bp, Zea Mays
ctccacccttacatggcggacatgatgcccatgtgtgttggggccgggccttaagccgtgctttggtgtggagtcagatgagttttttacctaagcaacgtgaatcaacgcagggctttatgcaagagaactaatggatggctgcaaaaagttcgttaccgagaatcaaggggatccagatcttagaccagagcagatcctttccaaagcagtagatgaagcatgttcacctggttcttgcactgtattagttgctcattttgatggccaggcccttcaagcatcaaatattggggactctgggtttatagtgataagaaatggagaagtgttcaaaaagtctaaacctacgctttatggtttcaatttcccactacaaattcagaagggagatgacccctcaaagtttgtacagaattatgctattgatctagaggacggcgatgcaattgtgacagcaaccgatggcctttttgataatgtatacgagcatgaaatagctggaattgtctccaaatcgttacaggcagatctagaaccagcggagattgcggaacacttggctgtgaaggcccaggaagtagggaggtctggggctgggagaagcccattttcagatgctgctctctcggctgggtaccttggctacagtgggggcaaactggatgacatagccgtcgttgtatcaattgtccggactgaaattcaagaggataggctaagatgactatgcagaaaagaagctcatgttttgtggaagctcaacaccaagcgaccacgcgggttgccctatcagtattctgtactgctagaactgcagctatgtggcgatttctggaaagttaagggcgtatgcatcagcatcatacaccgtgctcgatcatcaataggcgggccaataaccattggacatcagcattgtagcgaagccccttcctgttgcccttgccagtgcaccggcgccacattttgatttttggtttcgctataaaaatataaggcatttagatgttgcccttgccattaaaccaatgtcatgtactccttctgtcataaattaaaattcgttttggtttctaatggattcatataatacttataaaaagcaaaacaaagtttagtttgggacagagggagtatttactttagtcgttgcagtcttaccagattaaagaaaagactacaag

SEQ ID NO: 48656 - DNA, 1107 bp, Zea Mays
agctcctccagcagcagagcggaatcaacgcagggctttatgcaagagaactaatggatggctgcaaaaagttcgttaccgagaatcaaggggatccagatcttagaccagagcagatcctttccaaagcagtagatgaagcatgttcacctggttcttgcactgtattagttgctcattttgatggccaggcccttcaagcatcaaatattggggactctgggtttatagtgataagaaatggagaagtgttcaaaaagtctaaacctacgctttatggtttcaatttcccactacaaattcagaagggagatgacccctcaaagtttgtacagaattatgctattgatctagaggacggcgatgcaattgtgacagcaaccgatggcctttttgataatgtatacgagcatgaaatagctggaattgtctccaaatcgttacaggcagatctagaaccagcggagattgcggaacacttggctgtgaaggcccaggaagtagggaggtctggggctgggagaagcccattttcagatgctgctctctcggctgggtaccttggctacagtgggggcaaactggatgacatagccgtcgttgtatcaattgtccggactgaaattcaagaggataggctaagatgactatgcagaaaagaagctcatgttttgtggaagctcaacaccaagcgaccacgcgggttgccctatcagtattctgtactgctagaactgcagctatgtggcgatttctggaaagttaagggcgtatgcatcagcatcatacaccgtgctcgatcatcaataggcgggccaataaccattggacatcagcattgtagcgaagccccttcctgttgcccttgccagtgcaccggcgccacattttgatttttggtttcgctataaaaatataaggcatttagatgttgcccttgccattaaaccaatgtcatgtactccttctgtcataaattaaaattcgttttggtttctaatggattcatataatacttataaaaagcaaaacaaagtttagtttgggacagagggagtatttactttagtcgttgcagtcttaccagattaaagaaaagactacaag

SEQ ID NO: 48657 - DNA, 1269 bp, Zea Mays
ttcagcctaagaatttagaattggtattcataatgtagttttttggaaggttaataattcagaactggaatcccaacacacacctagccctgacaaaccgcccaggcgcccacgatgcgctgcccaaggcgcctccacctctgatgtgccgcccttgatgcacctccctgcctcttccccatggaatcaacgcagggctttatgcaagagaactaatggatggctgcaaaaagttcgttaccgagaatcaaggggatccagatcttagaccagagcagatcctttccaaagcagtagatgaagcatgttcacctggttcttgcactgtattagttgctcattttgatggccaggcccttcaagcatcaaatattggggactctgggtttatagtgataagaaatggagaagtgttcaaaaagtctaaacctacgctttatggtttcaatttcccactacaaattcagaagggagatgacccctcaaagtttgtacagaattatgctattgatctagaggacggcgatgcaattgtgacagcaaccgatggcctttttgataatgtatacgagcatgaaatagctggaattgtctccaaatcgttacaggcagatctagaaccagcggagattgcggaacacttggctgtgaaggcccaggaagtagggaggtctggggctgggagaagcccattttcagatgctgctctctcggctgggtaccttggctacagtgggggcaaactggatgacatagccgtcgttgtatcaattgtccggactgaaattcaagaggataggctaagatgactatgcagaaaagaagctcatgttttgtggaagctcaacaccaagcgaccacgcgggttgccctatcagtattctgtactgctagaactgcagctatgtggcgatttctggaaagttaagggcgtatgcatcagcatcatacaccgtgctcgatcatcaataggcgggccaataaccattggacatcagcattgtagcgaagccccttcctgttgcccttgccagtgcaccggcgccacattttgatttttggtttcgctataaaaatataaggcatttagatgttgcccttgccattaaaccaatgtcatgtactccttctgtcataaattaaaattcgttttggtttctaatggattcatataatacttataaaaagcaaaacaaagtttagtttgggacagagggagtatttactttagtcgttgcagtcttaccagattaaagaaaagactacaag

SEQ ID NO: 48658 - DNA, 5045 bp, Zea Mays
ccaagatagctagaggcctagagctacagcctctagtacttgccacagcaatagcacagcagcttttctgagtaataaacaacaccattgctcttctctcttctcgtttctctcctgtatccagttgtggctcaccactgctattctctctaccagcaagcagctcctgccttttgtttttcagctcctgctgcagcctttcccctcccaccacccaccacacccccaaacccgtgcaagaaaccaggagcagcaaagcaaccggcgctgcaacttgctccggtggcttaaagttggacagagtgggctcttggatcaccgttcaccggtccccgacccaccggcgtgccactgttcttggacagagggggcaatcattcgcgccgcggcagtagccaacctcctccgttcttggattggctcacagcgtgcgaccgtgcgggcccctcgaaccgagcaacaagccaagcaagaacacccactcccctctctccggactccgcatgcgattgctggctcggtgacgcgctgctggcctatctcaaatcctcaacttacttgcctcctcggttctttcttgtgcttcatgtggctcctgcaactcgctgcagcaccacttgcgctgtgtcgccacgcgctgtttcttgagcctctttggtagctttagtggttgaagcgaggtctgctcacccgatggttccgaacggagcaggggaatgcggcggcggctgccggcgagggaaagcagcgcacgccggtgtcggcgctgtggctggtttcttcttatgtctcttgatggtctgggcagttggtgggtctgaaagatcaggttgtggccgggtggctgagcaccacggggtggtacgggtggggcagttcaacctcagcaggagccagctgcaggcgttggtgttcctcctctcatcgacacataaagaatgtatggtaaattctggaatggtccatgatgggaatcaagtcaatggtgcgtcttttatcccagatattcgttgcattcgagataggatatatgatggaaaacagaattggttgaaggatgcaattcttcaagaatcttgcacagcacaagataaatatggcctaaatagtcatgcacctgcagtattggaagataagttattgcaaaatgttatacaagaagacattaattctaccacgcagtgcaatccggacgaatgtgacttatgtgctggaatcagtggcgtgaatgtggtccagaatattgggtcaagttctaatcgcacaataatattatgtctatctgcttttttggggagcattgtgatatcaatagttaaaactacgcacaaaagagggattcaaacccacaagctttatgcagatgagaaagttctccaggcaccaagtactaaaataagtcgaaagtggtcaaagagagccctgcttattggtgtcttatttgggctctgtagctctgtatgcatattttcatgcatgtatgccgatgttgttgctcggagaattgagaatcttgctaatatgtgtgatgagagagcaaggatgttacaggatcagtttaatgtaagcatgaaccatgtgcatgcgttggctatactggtctcatcatttcaccatgggaaggatccttctgctattgatcagaaaacatttgaggacttcacagcaaggacaacatttgaaaggccattgatgagtggtgtcgcctatgcattgaaggtattacacaatgaaagacaacagtttgaggaacaacatggatggaagattaagaagatggaagatggagatcagtcccttgttcatgactacaaccttgaaaagcttgaaccatcaccagttcaagatgagtatgcgcctgttattttctctcaggaaactgtgaagcacattatatctgtagatatgatgtctgggaaggaagatcatgacaatatattacgttcctggtcaacaggtaaaggggccctaacatccccttttaagcttctgaagtccaaccatctcggtgtggtgcttacattcactgtatataaatatgatctgcctccaaatgcaacaccacaggagcgtattcatgctacattgggctatcttggtgcctcatttgatgtcccttctctggttgataaactcctagaacaactcgctagcaaacgaaagatagtagttaatttatatgacaccacaaatcatacctctcctattgaaatgtatggttctgattttactccatctggtgatctgcatattagtagcattgattttggagacccaacacgcaaacatgagatgcattgcagatttaaacatgaaccttcactgccatggtctgcaataataatatcaacagctgtagctataattgttttgcttgttggacatattatttatgcaactctgaactcccttgaaaaggctgaacatgattatagagtaatgagagaacttaaaggacaagctgaagctgcagatatagcaaaatctcagtttctagcaactgtttcccatgagattcggactccaatgaatggtgttttaggtatgctgcagatgctaatggacactgaacttgatacaactcagcaggattttgtagtcaccgctcaagaaagtggaaaggtattaataaacttaataaatgaagtccttgatctggctaagatagagtcaggaaggattgagctggaagcagtgccttttgatgtccgtgatattcttgacaatgtgatatctcttttctacgataaatcacaagctaaaggcatagagttggccgtgcttgtatctgaccaagttcctgatgtcctaattggggatccatggcggttccggcagatcattacgaaccttgtggggaattctatgaagtttactgaacagggccacatctttgttcaagtccatttggtcaaggaactaaacaggaaaggaaacaatttttgtgatgtttctgctcataacagagaaattctgtatgattctgacaactcgatgctatggaacacactaagcggacttgaagtagcagatagctggaggtccttggagaattttacgatgttcaagaattcaaatggtgaaacagatacaattaggttagctgtcagagttgaagacaccggcataggaataacaaaagatgctcaaatgcgtatttttacacctttcatgcaagctgacagttccacctcacgaacatatggtggaactggaattggcttgagtattacaaaacgtttagttgaattgatgggtggagaaatagggtttactagtaaatcaggagttggtagtacattttcttttactgccattttcaaggagaacagaggatgtcctggagatatgaaaagatactattctgaacctactccgttggattttcaaggaatgagggctcttattattgatggaaggagtgcacgtgcagaggttactatgtaccatcttcgtagacttggaatacagtgcagtcttgttgccacatctgaatctgaatctgcatcttcagctttgatgaaagcctgcacctcaagcaaaaacaatccggacatggtccttgttgatacagaagcttggggtaaaggttcaggtttggcattctatcatcgttttgtagattgtcaactaaagggcgcacacaagttttctcagcccatgccaaagactattcttttgggaagctcaataagccctgttgaatctgattatttaagattgacaggatttggtgattgcataaggaaacccctccgtcttagtactattgttgcctgtcttcgcaaaaccttaggggttggggttacaaggcagcagagtagagaccaatctttggttcttcaaagtgtactaactggaaaacagattctggttgtggatgataatgcagtcaaccgtaaagttgcagctggttctttgaagaaatatggatctaaagttacatgtgttgatagtgggagtgatgcaattgatatgctcaagccacctcacacatttgatgcttgcttcatggatgttcagatgcccgagatggacgggtttgaagctacaagattaatccggtccatagagaaaaaaataaacgatatgatcatgatgggtgaaatatccgctaataattatggaaataaggcccattggcatgtaccaatattagctatgacggcagatgtaatccaagcgacttttgaaaaatgtatgcagtgtggaatggatggatatgtgtcaaagccatttgaagaacagcagctctactttgctgttgctcatttcttagagactgatgaaacagaataacaaatccaacttcgtaggagattgatttgccgcaacactgtttcaacatctgccaaaagaccatctgttcaacaggttctgaaaaacagcgatcggcagcatatttgcaatggaattgaggtcccagttcttatatatagaacttgctccaggaaacaaaatacattggactcccactgaccagaagaaagaagataagatagtagggggtacaaaatgtttggtctggtttccgcagcaattttttttctggccgtgttttctggaaccaatacaacatgaccttgcaacagtggtgtcagttgcttctgtaatgccttatgacaccacgatatttccaaatgctgtgttgtaagtgctttacagacaaaccgaggtccagctttctaaaacattgagttcaatgacatcacttcatccattatttaagaaagcgagggtcttcaaatcaggaggatacaattgtatcaccaagtcaggcacacagtttcaaggtgactttgttctgatctgattgttaatgcaatctgtaaagaggcaactatgagttagggattgtttgatgccttgaatgtcgtatattcatattccatcatttttgtgggcacttgtatatacattgatgattaattgtattgttagataattgtgcattttaagattaaatgaattcctaaagcaaatcgttacataaacaatgtataaagcacacataacaaataaaggcatgtcttagtagattaaac

SEQ ID NO: 48659 - DNA, 4842 bp, Zea Mays
ccaagatagctagaggcctagagctacagcctctagtacttgccacagcaatagcacagcagcttttctgagtaataaacaacaccattgctcttctctcttctcgtttctctcctgtatccagttgtggctcaccactgctattctctctaccagcaagcagctcctgccttttgtttttcagctcctgctgcagcctttcccctcccaccacccaccacacccccaaacccgtgcaagaaaccaggagcagcaaagcaaccggcgctgcaacttgctccggtggcttaaagttggacagagtgggctcttggatcaccgttcaccggtccccgacccaccggcgtgccactgttcttggacagagggggcaatcattcgcgccgcggcagtagccaacctcctccgttcttggattggctcacagcgtgcgaccgtgcgggcccctcgaaccgagcaacaagccaagcaagaacacccactcccctctctccggactccgcatgcgattgctggctcggtgacgcgctgctggcctatctcaaatcctcaacttacttgcctcctcggttctttcttgtgcttcatgtggctcctgcaactcgctgcagcaccacttgcgctgtgtcgccacgcgctgtttcttgagcctctttggtagctttagtggttgaagcgaggtctgctcacccgatggttccgaacggagcaggggaatgcggcggcggctgccggcgagggaaagcagcgcacgccggtgtcggcgctgtggctggtttcttcttatgtctcttgatggtctgggcagttggtgggtctgaaagatcaggttgtggccgggtggctgagcaccacggggtggtacgggtggggcagttcaacctcagcaggagccagctgcaggcgttggtgttcctcctctcatcgacacataaagaatgtatggtaaattctggaatggtccatgatgggaatcaagtcaatggtgcgtcttttatcccagatattcgttgcattcgagataggatatatgatggaaaacagaattggttgaaggatgcaattcttcaagaatcttgcacagcacaagataaatatggcctaaatagtcatgcacctgcagtattggaagataagttattgcaaaatgttatacaagaagacattaattctaccacgcagtgcaataaaacatttgaggacttcacagcaaggacaacatttgaaaggccattgatgagtggtgtcgcctatgcattgaaggtattacacaatgaaagacaacagtttgaggaacaacatggatggaagattaagaagatggaagatggagatcagtcccttgttcatgactacaaccttgaaaagcttgaaccatcaccagttcaagatgagtatgcgcctgttattttctctcaggaaactgtgaagcacattatatctgtagatatgatgtctgggaaggtaaaggggccctaacatccccttttaagcttctgaagtccaaccatctcggtgtggtgcttacattcactgtatataaatatgatctgcctccaaatgcaacaccacaggagcgtattcatgctacattgggctatcttggtgcctcatttgatgtcccttctctggttgataaactcctagaacaactcgctagcaaacgaaagatagtagttaatttatatgacaccacaaatcatacctctcctattgaaatgtatggttctgattttactccatctggtgatctgcatattagtagcattgattttggagacccaacacgcaaacatgagatgcattgcagatttaaacatgaaccttcactgccatggtctgcaataataatatcaacagctgtagctataattgttttgcttgttggacatattatttatgcaactctgaactcccttgaaaaggctgaacatgattatagagtaatgagagaacttaaaggacaagctgaagctgcagatatagcaaaatctcagtttctagcaactgtttcccatgagattcggactccaatgaatggtgttttaggtatgctgcagatgctaatggacactgaacttgatacaactcagcaggattttgtagtcaccgctcaagaaagtggaaaggtattaataaacttaataaatgaagtccttgatctggctaagatagagtcaggaaggattgagctggaagcagtgccttttgatgtccgtgatattcttgacaatgtgatatctcttttctacgataaatcacaagctaaaggcatagagttggccgtgcttgtatctgaccaagttcctgatgtcctaattggggatccatggcggttccggcagatcattacgaaccttgtggggaattctatgaagggccacatctttgttcaagtccatttggtcaaggaactaaacaggaaaggaaacaatttttgtgatgtttctgctcataacagagaaattctgtatgattctgacaactcgatgctatggaacacactaagcggacttgaagtagcagatagctggaggtccttggagaattttacgatgttcaagaattcaaatggtgaaacagatacaattaggttagctgtcagagttgaagacaccggcataggaataacaaaagatgctcaaatgcgtatttttacacctttcatgcaagctgacagttccacctcacgaacatatggtggaactggaattggcttgagtattacaaaacgtttagttgaattgatgggtggagaaatagggtttactagtaaatcaggagttggtagtacattttcttttactgccattttcaaggagaacagaggatgtcctggagatatgaaaagatactattctgaacctactccgttggattttcaaggaatgagggctcttattattgatggaaggagtgcacgtgcagaggttactatgtaccatcttcgtagacttggaatacagtgcagtcttgttgccacatctgaatctgaatctgcatcttcagctttgatgaaagcctgcacctcaagcaaaaacaatccggacatggtccttgttgatacagaagcttggggtaaaggttcaggtttggcattctatcatcgttttgtagattgtcaactaaagggcgcacacaagttttctcagcccatgccaaagactattcttttgggaagctcaataagccctgttgaatctgattatttaagattgacaggatttggtgattgcataaggaaacccctccgtcttagtactattgttgcctgtcttcgcaaaaccttaggggttggggttacaaggcagcagagtagagaccaatctttggttcttcaaagtgtactaactggaaaacagattctggttgtggatgataatgcagtcaaccgtaaagttgcagctggttctttgaagaaatatggatctaaagttacatgtgttgatagtgggagtgatgcaattgatatgctcaagccacctcacacatttgatgcttgcttcatggatgttcagatgcccgagatggacgggtttgaagctacaagattaatccggtccatagagaaaaaaataaacgatatgatcatgatgggtgaaatatccgctaataattatggaaataaggcccattggcatgtaccaatattagctatgacggcagatgtaatccaagcgacttttgaaaaatgtatgcagtgtggaatggatggatatgtgtcaaagccatttgaagaacagcagctctactttgctgttgctcatttcttagagactgatgaaacagaataacaaatccaacttcgtaggagattgatttgccgcaacactgtttcaacatctgccaaaagaccatctgttcaacaggttctgaaaaacagcgatcggcagcatatttggtgatttcctctacatgctttttaagagcaagctaatgcaattaaatatttccccatgcagttctacaagcttatgcatttacattctttgtggagcgataaaactttgcttgtatacttgtctgccaaatatctactataacatcttgttatcaagaaagaaacctattgtaacattgacttgcctagctctgaatgcagatgaagcatcaatatttttgaaacaaaaatactaatttgctcattactcattgaatcattgtagaaattgctgatttggtaattttatctttgttttggagcaatggaattgaggtcccagttcttatatatagaacttgctccaggaaacaaaatacattggactcccactgaccagaagaaagaagataagatagtagggggtacaaaatgtttggtctggtttccgcagcaattttttttctggccgtgttttctggaaccaatacaacatgaccttgcaacagtggtgtcagttgcttctgtaatgccttatgacaccacgatatttccaaatgctgtgttgtaagtgctttacagacaaaccgaggtccagctttctaaaacattgagttcaatgacatcacttcatccattatttaagaaagcgagggtcttcaaatcaggaggatacaattgtatcaccaagtcaggcacacagtttcaaggtgactttgttctgatctgattgttaatgcaatctgtaaagaggcaactatgagttagggattgtttgatgccttgaatgtcgtatattcatattccatcatttttgtgggcacttgtatatacattgatgattaattgtattgttagataattgtgcattttaagattaaatgaattcctaaagcaaatcgttacataaacaatgtataaagcacacataacaaataaaggcatgtcttagtagattaaac

SEQ ID NO: 48660 - DNA, 5211 bp, Zea Mays
ccaagatagctagaggcctagagctacagcctctagtacttgccacagcaatagcacagcagcttttctgagtaataaacaacaccattgctcttctctcttctcgtttctctcctgtatccagttgtggctcaccactgctattctctctaccagcaagcagctcctgccttttgtttttcagctcctgctgcagcctttcccctcccaccacccaccacacccccaaacccgtgcaagaaaccaggagcagcaaagcaaccggcgctgcaacttgctccggtggcttaaagttggacagagtgggctcttggatcaccgttcaccggtccccgacccaccggcgtgccactgttcttggacagagggggcaatcattcgcgccgcggcagtagccaacctcctccgttcttggattggctcacagcgtgcgaccgtgcgggcccctcgaaccgagcaacaagccaagcaagaacacccactcccctctctccggactccgcatgcgattgctggctcggtgacgcgctgctggcctatctcaaatcctcaacttacttgcctcctcggttctttcttgtgcttcatgtggctcctgcaactcgctgcagcaccacttgcgctgtgtcgccacgcgctgtttcttgagcctctttggtagctttagtggttgaagcgaggtctgctcacccgatggttccgaacggagcaggggaatgcggcggcggctgccggcgagggaaagcagcgcacgccggtgtcggcgctgtggctggtttcttcttatgtctcttgatggtctgggcagttggtgggtctgaaagatcaggttgtggccgggtggctgagcaccacggggtggtacgggtggggcagttcaacctcagcaggagccagctgcaggcgttggtgttcctcctctcatcgacacataaagaatgtatggtaaattctggaatggtccatgatgggaatcaagtcaatggtgcgtcttttatcccagatattcgttgcattcgagataggatatatgatggaaaacagaattggttgaaggatgcaattcttcaagaatcttgcacagcacaagataaatatggcctaaatagtcatgcacctgcagtattggaagataagttattgcaaaatgttatacaagaagacattaattctaccacgcagtgcaatccggacgaatgtgacttatgtgctggaatcagtggcgtgaatgtggtccagaatattgggtcaagttctaatcgcacaataatattatgtctatctgcttttttggggagcattgtgatatcaatagttaaaactacgcacaaaagagggattcaaacccacaagctttatgcagatgagaaagttctccaggcaccaagtactaaaataagtcgaaagtggtcaaagagagccctgcttattggtgtcttatttgggctctgtagctctgtatgcatattttcatgcatgtatgccgatgttgttgctcggagaattgagaatcttgctaatatgtgtgatgagagagcaaggatgttacaggatcagtttaatgtaagcatgaaccatgtgcatgcgttggctatactggtctcatcatttcaccatgggaaggatccttctgctattgatcagaaaacatttgaggacttcacagcaaggacaacatttgaaaggccattgatgagtggtgtcgcctatgcattgaaggtattacacaatgaaagacaacagtttgaggaacaacatggatggaagattaagaagatggaagatggagatcagtcccttgttcatgactacaaccttgaaaagcttgaaccatcaccagttcaagatgagtatgcgcctgttattttctctcaggaaactgtgaagcacattatatctgtagatatgatgtctgggaaggtaaaggggccctaacatccccttttaagcttctgaagtccaaccatctcggtgtggtgcttacattcactgtatataaatatgatctgcctccaaatgcaacaccacaggagcgtattcatgctacattgggctatcttggtgcctcatttgatgtcccttctctggttgataaactcctagaacaactcgctagcaaacgaaagatagtagttaatttatatgacaccacaaatcatacctctcctattgaaatgtatggttctgattttactccatctggtgatctgcatattagtagcattgattttggagacccaacacgcaaacatgagatgcattgcagatttaaacatgaaccttcactgccatggtctgcaataataatatcaacagctgtagctataattgttttgcttgttggacatattatttatgcaactctgaactcccttgaaaaggctgaacatgattatagagtaatgagagaacttaaaggacaagctgaagctgcagatatagcaaaatctcagtttctagcaactgtttcccatgagattcggactccaatgaatggtgttttaggtatgctgcagatgctaatggacactgaacttgatacaactcagcaggattttgtagtcaccgctcaagaaagtggaaaggtattaataaacttaataaatgaagtccttgatctggctaagatagagtcaggaaggattgagctggaagcagtgccttttgatgtccgtgatattcttgacaatgtgatatctcttttctacgataaatcacaagctaaaggcatagagtttactgaacagggccacatctttgttcaagtccatttggtcaaggaactaaacaggaaaggaaacaatttttgtgatgtttctgctcataacagagaaattctgtatgattctgacaactcgatgctatggaacacactaagcggacttgaagtagcagatagctggaggtccttggagaattttacgatgttcaagaattcaaatggtgaaacagatacaattaggttagctgtcagagttgaagacaccggcataggaataacaaaagatgctcaaatgcgtatttttacacctttcatgcaagctgacagttccacctcacgaacatatggtggaactggaattggcttgagtattacaaaacgtttagttgaattgatgggtggagaaatagggtttactagtaaatcaggagttggtagtacattttcttttactgccattttcaaggagaacagaggatgtcctggagatatgaaaagatactattctgaacctactccgttggattttcaaggaatgagggctcttattattgatggaaggagtgcacgtgcagaggttactatgtaccatcttcgtagacttggaatacagtgcagtcttgttgccacatctgaatctgaatctgcatcttcagctttgatgaaagcctgcacctcaagcaaaaacaatccggacatggtccttgttgatacagaagcttggggtaaaggttcaggtttggcattctatcatcgttttgtagattgtcaactaaagggcgcacacaagttttctcagcccatgccaaagactattcttttgggaagctcaataagccctgttgaatctgattatttaagattgacaggatttggtgattgcataaggaaacccctccgtcttagtactattgttgcctgtcttcgcaaaaccttaggggttggggttacaaggcagcagagtagagaccaatctttggttcttcaaagtgtactaactggaaaacagattctggttgtggatgataatgcagtcaaccgtaaagttgcagctggttctttgaagaaatatggatctaaagttacatgtgttgatagtgggagtgatgcaattgatatgctcaagccacctcacacatttgatgcttgcttcatggatgttcagatgcccgagatggacgggtttgaagctacaagattaatccggtccatagagaaaaaaataaacgatatgatcatgatgggtgaaatatccgctaataattatggaaataaggcccattggcatgtaccaatattagctatgacggcagatgtaatccaagcgacttttgaaaaatgtatgcagtgtggaatggatggatatgtgtcaaagccatttgaagaacagcagctctactttgctgttgctcatttcttagagactgatgaaacagaataacaaatccaacttcgtaggagattgatttgccgcaacactgtttcaacatctgccaaaagaccatctgttcaacaggttctgaaaaacagcgatcggcagcatatttggtgatttcctctacatgctttttaagagcaagctaatgcaattaaatatttccccatgcagttctacaagcttatgcatttacattctttgtggagcgataaaactttgcttgtatacttgtctgccaaatatctactataacatcttgttatcaagaaagaaacctattgtaacattgacttgcctagctctgaatgcagatgaagcatcaatatttttgaaacaaaaatactaatttgctcattactcattgaatcattgtagaaattgctgatttggtaattttatctttgttttggagcaatggaattgaggtcccagttcttatatatagaacttgctccaggaaacaaaatacattggactcccactgaccagaagaaagaagataagatagtagggggtacaaaatgtttggtctggtttccgcagcaattttttttctggccgtgttttctggaaccaatacaacatgaccttgcaacagtggtgtcagttgcttctgtaatgccttatgacaccacgatatttccaaatgctgtgttgtaagtgctttacagacaaaccgaggtccagctttctaaaacattgagttcaatgacatcacttcatccattatttaagaaagcgagggtcttcaaatcaggaggatacaattgtatcaccaagtcaggcacacagtttcaaggtgactttgttctgatctgattgttaatgcaatctgtaaagaggcaactatgagttagggattgtttgatgccttgaatgtcgtatattcatattccatcatttttgtgggcacttgtatatacattgatgattaattgtattgttagataattgtgcattttaagattaaatgaattcctaaagcaaatcgttacataaacaatgtataaagcacacataacaaataaaggcatgtcttagtagattaaac

SEQ ID NO: 48661 - DNA, 4963 bp, Zea Mays
ccaagatagctagaggcctagagctacagcctctagtacttgccacagcaatagcacagcagcttttctgagtaataaacaacaccattgctcttctctcttctcgtttctctcctgtatccagttgtggctcaccactgctattctctctaccagcaagcagctcctgccttttgtttttcagctcctgctgcagcctttcccctcccaccacccaccacacccccaaacccgtgcaagaaaccaggagcagcaaagcaaccggcgctgcaacttgctccggtggcttaaagttggacagagtgggctcttggatcaccgttcaccggtccccgacccaccggcgtgccactgttcttggacagagggggcaatcattcgcgccgcggcagtagccaacctcctccgttcttggattggctcacagcgtgcgaccgtgcgggcccctcgaaccgagcaacaagccaagcaagaacacccactcccctctctccggactccgcatgcgattgctggctcggtgacgcgctgctggcctatctcaaatcctcaacttacttgcctcctcggttctttcttgtgcttcatgtggctcctgcaactcgctgcagcaccacttgcgctgtgtcgccacgcgctgtttcttgagcctctttggtagctttagtggttgaagcgaggtctgctcacccgatggttccgaacggagcaggggaatgcggcggcggctgccggcgagggaaagcagcgcacgccggtgtcggcgctgtggctggtttcttcttatgtctcttgatggtctgggcagttggtgggtctgaaagatcaggttgtggccgggtggctgagcaccacggggtggtacgggtggggcagttcaacctcagcaggagccagctgcaggcgttggtgttcctcctctcatcgacacataaagaatgtatggtaaattctggaatggtccatgatgggaatcaagtcaatggtgcgtcttttatcccagatattcgttgcattcgagataggatatatgatggaaaacagaattggttgaaggatgcaattcttcaagaatcttgcacagcacaagataaatatggcctaaatagtcatgcacctgcagtattggaagataagttattgcaaaatgttatacaagaagacattaattctaccacgcagtgcaatccggacgaatgtgacttatgtgctggaatcagtggcgtgaatgtggtccagaatattgggtcaagttctaatcgcacaataatattatgtctatctgcttttttggggagcattgtgatatcaatagttaaaactacgcacaaaagagggattcaaacccacaagctttatgcagatgagaaagttctccaggcaccaagtactaaaataagtcgaaagtggtcaaagagagccctgcttattggtgtcttatttgggctctgtagctctgtatgcatattttcatgcatgtatgccgatgttgttgctcggagaattgagaatcttgctaatatgtgtgatgagagagcaaggatgttacaggatcagtttaatgtaagcatgaaccatgtgcatgcgttggctatactggtctcatcatttcaccatgggaaggatccttctgctattgatcagaaaacatttgaggacttcacagcaaggacaacatttgaaaggccattgatgagtggtgtcgcctatgcattgaaggtattacacaatgaaagacaacagtttgaggaacaacatggatggaagattaagaagatggaagatggagatcagtcccttgttcatgactacaaccttgaaaagcttgaaccatcaccagttcaagatgagtatgcgcctgttattttctctcaggaaactgtgaagcacattatatctgtagatatgatgtctgggaaggtaaaggggccctaacatccccttttaagcttctgaagtccaaccatctcggtgtggtgcttacattcactgtatataaatatgatctgcctccaaatgcaacaccacaggagcgtattcatgctacattgggctatcttggtgcctcatttgatgtcccttctctggttgataaactcctagaacaactcgctagcaaacgaaagatagtagttaatttatatgacaccacaaatcatacctctcctattgaaatgtatggttctgattttactccatctggtgatctgcatattagtagcattgattttggagacccaacacgcaaacatgagatgcattgcagatttaaacatgaaccttcactgccatggtctgcaataataatatcaacagctgtagctataattgttttgcttgttggacatattatttatgcaactctgaactcccttgaaaaggctgaacatgattatagagtaatgagagaacttaaaggacaagctgaagctgcagatatagcaaaatctcagtttctagcaactgtttcccatgagattcggactccaatgaatggtgttttaggtatgctgcagatgctaatggacactgaacttgatacaactcagcaggattttgtagtcaccgctcaagaaagtggaaaggtattaataaacttaataaatgaagtccttgatctggctaagatagagtcaggaaggattgagctggaagcagtgccttttgatgtccgtgatattcttgacaatgtgatatctcttttctacgataaatcacaagctaaaggcatagagttggccgtgcttgtatctgaccaagttcctgatgtcctaattggggatccatggcggttccggcagatcattacgaaccttgtggggaattctatgaagtttactgaacagggccacatctttgttcaagtccatttggtcaaggaactaaacaggaaaggaaacaatttttgtgatgtttctgctcataacagagaaattctgtatgattctgacaactcgatgctatggaacacactaagcggacttgaagtagcagatagctggaggtccttggagaattttacgatgttcaagaattcaaatggtgaaacagatacaattaggttagctgtcagagttgaagacaccggcataggaataacaaaagatgctcaaatgcgtatttttacacctttcatgcaagctgacagttccacctcacgaacatatggtggaactggaattggcttgagtattacaaaacgtttagttgaattgatgggtggagaaatagggtttactagtaaatcaggagttggtagtacattttcttttactgccattttcaaggagaacagaggatgtcctggagatatgaaaagatactattctgaacctactccgttggattttcaaggaatgagggctcttattattgatggaaggagtgcacgtgcagaggttactatgtaccatcttcgtagacttggaatacagtgcagtcttgttgccacatctgaatctgaatctgcatcttcagctttgatgaaagcctgcacctcaagcaaaaacaatccggacatggtccttgttgatacagaagcttggggtaaaggttcaggtttggcattctatcatcgttttgtagattgtcaactaaagggcgcacacaagttttctcagcccatgccaaagactattcttttgggaagctcaataagccctgttgaatctgattatttaagattgacaggatttggtgattgcataaggaaacccctccgtcttagtactattgttgcctgtcttcgcaaaaccttaggggttggggttacaaggcagcagagtagagaccaatctttggttcttcaaagtgtactaactggaaaacagattctggttgtggatgataatgcagtcaaccgtaaagttgcagctggttctttgaagaaatatggatctaaagttacatgtgttgatagtgggagtgatgcaattgatatgctcaagccacctcacacatttgatgcttgcttcatggatgttcagatgcccgagatggacgggtttgaagctacaagattaatccggtccatagagaaaaaaataaacgatatgatcatgatgggtgaaatatccgctaataattatggaaataaggcccattggcatgtaccaatattagctatgacggcagatgtaatccaagcgacttttgaaaaatgtatgcagtgtggaatggatggatatgtgtcaaagccatttgaagaacagcagctctactttgctgttgctcatttcttagagactgatgaaacagaataacaaatccaacttcgtaggagattgatttgccgcaacactgtttcaacatctgccaaaagaccatctgttcaacaggttctgaaaaacagcgatcggcagcatatttggaaacaaaatacattggactcccactgaccagaagaaagaagataagatagtagggggtacaaaatgtttggtctggtttccgcagcaattttttttctggccgtgttttctggaaccaatacaacatgaccttgcaacagtggtgtcagttgcttctgtaatgccttatgacaccacgatatttccaaatgctgtgttgtaagtgctttacagacaaaccgaggtccagctttctaaaacattgagttcaatgacatcacttcatccattatttaagaaagcgagggtcttcaaatcaggaggatacaattgtatcaccaagtcaggcacacagtttcaaggtgactttgttctgatctgattgttaatgcaatctgtaaagaggcaactatgagttagggattgtttgatgccttgaatgtcgtatattcatattccatcatttttgtgggcacttgtatatacattgatgattaattgtattgttagataattgtgcattttaagattaaatgaattcctaaagcaaatcgttacataaacaatgtataaagcacacataacaaataaaggcatgtcttagtagattaaac

SEQ ID NO: 48662 - DNA, 4956 bp, Zea Mays
ccaagatagctagaggcctagagctacagcctctagtacttgccacagcaatagcacagcagcttttctgagtaataaacaacaccattgctcttctctcttctcgtttctctcctgtatccagttgtggctcaccactgctattctctctaccagcaagcagctcctgccttttgtttttcagctcctgctgcagcctttcccctcccaccacccaccacacccccaaacccgtgcaagaaaccaggagcagcaaagcaaccggcgctgcaacttgctccggtggcttaaagttggacagagtgggctcttggatcaccgttcaccggtccccgacccaccggcgtgccactgttcttggacagagggggcaatcattcgcgccgcggcagtagccaacctcctccgttcttggattggctcacagcgtgcgaccgtgcgggcccctcgaaccgagcaacaagccaagcaagaacacccactcccctctctccggactccgcatgcgattgctggctcggtgacgcgctgctggcctatctcaaatcctcaacttacttgcctcctcggttctttcttgtgcttcatgtggctcctgcaactcgctgcagcaccacttgcgctgtgtcgccacgcgctgtttcttgagcctctttggtagctttagtggttgaagcgaggtctgctcacccgatggttccgaacggagcaggggaatgcggcggcggctgccggcgagggaaagcagcgcacgccggtgtcggcgctgtggctggtttcttcttatgtctcttgatggtctgggcagttggtgggtctgaaagatcaggttgtggccgggtggctgagcaccacggggtggtacgggtggggcagttcaacctcagcaggagccagctgcaggcgttggtgttcctcctctcatcgacacataaagaatgtatggtaaattctggaatggtccatgatgggaatcaagtcaatggtgcgtcttttatcccagatattcgttgcattcgagataggatatatgatggaaaacagaattggttgaaggatgcaattcttcaagaatcttgcacagcacaagataaatatggcctaaatagtcatgcacctgcagtattggaagataagttattgcaaaatgttatacaagaagacattaattctaccacgcagtgcaatccggacgaatgtgacttatgtgctggaatcagtggcgtgaatgtggtccagaatattgggtcaagttctaatcgcacaataatattatgtctatctgcttttttggggagcattgtgatatcaatagttaaaactacgcacaaaagagggattcaaacccacaagctttatgcagatgagaaagttctccaggcaccaagtactaaaataagtcgaaagtggtcaaagagagccctgcttattggtgtcttatttgggctctgtagctctgtatgcatattttcatgcatgtatgccgatgttgttgctcggagaattgagaatcttgctaatatgtgtgatgagagagcaaggatgttacaggatcagtttaatgtaagcatgaaccatgtgcatgcgttggctatactggtctcatcatttcaccatgggaaggatccttctgctattgatcagaaaacatttgaggacttcacagcaaggacaacatttgaaaggccattgatgagtggtgtcgcctatgcattgaaggtattacacaatgaaagacaacagtttgaggaacaacatggatggaagattaagaagatggaagatggagatcagtcccttgttcatgactacaaccttgaaaagcttgaaccatcaccagttcaagatgagtatgcgcctgttattttctctcaggaaactgtgaagcacattatatctgtagatatgatgtctgggaaggaagatcatgacaatatattacgttcctggtcaacaggtaaaggggccctaacatccccttttaagcttctgaagtccaaccatctcggtgtggtgcttacattcactgtatataaatatgatctgcctccaaatgcaacaccacaggagcgtattcatgctacattgggctatcttggtgcctcatttgatgtcccttctctggttgataaactcctagaacaactcgctagcaaacgaaagatagtagttaatttatatgacaccacaaatcatacctctcctattgaaatgtatggttctgattttactccatctggtgatctgcatattagtagcattgattttggagacccaacacgcaaacatgagatgcattgcagatttaaacatgaaccttcactgccatggtctgcaataataatatcaacagctgtagctataattgttttgcttgttggacatattatttatgcaactctgaactcccttgaaaaggctgaacatgattatagagtaatgagagaacttaaaggacaagctgaagctgcagatatagcaaaatctcagtttctagcaactgtttcccatgagattcggactccaatgaatggtgttttagcaggattttgtagtcaccgctcaagaaagtggaaaggtattaataaacttaataaatgaagtccttgatctggctaagatagagtcaggaaggattgagctggaagcagtgccttttgatgtccgtgatattcttgacaatgtgatatctcttttctacgataaatcacaagctaaaggcatagagttggccgtgcttgtatctgaccaagttcctgatgtcctaattggggatccatggcggttccggcagatcattacgaaccttgtggggaattctatgaagtttactgaacagggccacatctttgttcaagtccatttggtcaaggaactaaacaggaaaggaaacaatttttgtgatgtttctgctcataacagagaaattctgtatgattctgacaactcgatgctatggaacacactaagcggacttgaagtagcagatagctggaggtccttggagaattttacgatgttcaagaattcaaatggtgaaacagatacaattaggttagctgtcagagttgaagacaccggcataggaataacaaaagatgctcaaatgcgtatttttacacctttcatgcaagctgacagttccacctcacgaacatatggtggaactggaattggcttgagtattacaaaacgtttagttgaattgatgggtggagaaatagggtttactagtaaatcaggagttggtagtacattttcttttactgccattttcaaggagaacagaggatgtcctggagatatgaaaagatactattctgaacctactccgttggattttcaaggaatgagggctcttattattgatggaaggagtgcacgtgcagaggttactatgtaccatcttcgtagacttggaatacagtgcagtcttgttgccacatctgaatctgaatctgcatcttcagctttgatgaaagcctgcacctcaagcaaaaacaatccggacatggtccttgttgatacagaagcttggggtaaaggttcaggtttggcattctatcatcgttttgtagattgtcaactaaagggcgcacacaagttttctcagcccatgccaaagactattcttttgggaagctcaataagccctgttgaatctgattatttaagattgacaggatttggtgattgcataaggaaacccctccgtcttagtactattgttgcctgtcttcgcaaaaccttaggggttggggttacaaggcagcagagtagagaccaatctttggttcttcaaagtgtactaactggaaaacagattctggttgtggatgataatgcagtcaaccgtaaagttgcagctggttctttgaagaaatatggatctaaagttacatgtgttgatagtgggagtgatgcaattgatatgctcaagccacctcacacatttgatgcttgcttcatggatgttcagatgcccgagatggacgggtttgaagctacaagattaatccggtccatagagaaaaaaataaacgatatgatcatgatgggtgaaatatccgctaataattatggaaataaggcccattggcatgtaccaatattagctatgacggcagatgtaatccaagcgacttttgaaaaatgtatgcagtgtggaatggatggatatgtgtcaaagccatttgaagaacagcagctctactttgctgttgctcatttcttagagactgatgaaacagaataacaaatccaacttcgtaggagattgatttgccgcaacactgtttcaacatctgccaaaagaccatctgttcaacaggttctgaaaaacagcgatcggcagcatatttggaaacaaaatacattggactcccactgaccagaagaaagaagataagatagtagggggtacaaaatgtttggtctggtttccgcagcaattttttttctggccgtgttttctggaaccaatacaacatgaccttgcaacagtggtgtcagttgcttctgtaatgccttatgacaccacgatatttccaaatgctgtgttgtaagtgctttacagacaaaccgaggtccagctttctaaaacattgagttcaatgacatcacttcatccattatttaagaaagcgagggtcttcaaatcaggaggatacaattgtatcaccaagtcaggcacacagtttcaaggtgactttgttctgatctgattgttaatgcaatctgtaaagaggcaactatgagttagggattgtttgatgccttgaatgtcgtatattcatattccatcatttttgtgggcacttgtatatacattgatgattaattgtattgttagataattgtgcattttaagattaaatgaattcctaaagcaaatcgttacataaacaatgtataaagcacacataacaaataaaggcatgtcttagtagattaaac

SEQ ID NO: 48663 - DNA, 4988 bp, Zea Mays
ccaagatagctagaggcctagagctacagcctctagtacttgccacagcaatagcacagcagcttttctgagtaataaacaacaccattgctcttctctcttctcgtttctctcctgtatccagttgtggctcaccactgctattctctctaccagcaagcagctcctgccttttgtttttcagctcctgctgcagcctttcccctcccaccacccaccacacccccaaacccgtgcaagaaaccaggagcagcaaagcaaccggcgctgcaacttgctccggtggcttaaagttggacagagtgggctcttggatcaccgttcaccggtccccgacccaccggcgtgccactgttcttggacagagggggcaatcattcgcgccgcggcagtagccaacctcctccgttcttggattggctcacagcgtgcgaccgtgcgggcccctcgaaccgagcaacaagccaagcaagaacacccactcccctctctccggactccgcatgcgattgctggctcggtgacgcgctgctggcctatctcaaatcctcaacttacttgcctcctcggttctttcttgtgcttcatgtggctcctgcaactcgctgcagcaccacttgcgctgtgtcgccacgcgctgtttcttgagcctctttggtagctttagtggttgaagcgaggtctgctcacccgatggttccgaacggagcaggggaatgcggcggcggctgccggcgagggaaagcagcgcacgccggtgtcggcgctgtggctggtttcttcttatgtctcttgatggtctgggcagttggtgggtctgaaagatcaggttgtggccgggtggctgagcaccacggggtggtacgggtggggcagttcaacctcagcaggagccagctgcaggcgttggtgttcctcctctcatcgacacataaagaatgtatggtaaattctggaatggtccatgatgggaatcaagtcaatggtgcgtcttttatcccagatattcgttgcattcgagataggatatatgatggaaaacagaattggttgaaggatgcaattcttcaagaatcttgcacagcacaagataaatatggcctaaatagtcatgcacctgcagtattggaagataagttattgcaaaatgttatacaagaagacattaattctaccacgcagtgcaatccggacgaatgtgacttatgtgctggaatcagtggcgtgaatgtggtccagaatattgggtcaagttctaatcgcacaataatattatgtctatctgcttttttggggagcattgtgatatcaatagttaaaactacgcacaaaagagggattcaaacccacaagctttatgcagatgagaaagttctccaggcaccaagtactaaaataagtcgaaagtggtcaaagagagccctgcttattggtgtcttatttgggctctgtagctctgtatgcatattttcatgcatgtatgccgatgttgttgctcggagaattgagaatcttgctaatatgtgtgatgagagagcaaggatgttacaggatcagtttaatgtaagcatgaaccatgtgcatgcgttggctatactggtctcatcatttcaccatgggaaggatccttctgctattgatcagaaaacatttgaggacttcacagcaaggacaacatttgaaaggccattgatgagtggtgtcgcctatgcattgaaggtattacacaatgaaagacaacagtttgaggaacaacatggatggaagattaagaagatggaagatggagatcagtcccttgttcatgactacaaccttgaaaagcttgaaccatcaccagttcaagatgagtatgcgcctgttattttctctcaggaaactgtgaagcacattatatctgtagatatgatgtctgggaaggaagatcatgacaatatattacgttcctggtcaacaggtaaaggggccctaacatccccttttaagcttctgaagtccaaccatctcggtgtggtgcttacattcactgtatataaatatgatctgcctccaaatgcaacaccacaggagcgtattcatgctacattgggctatcttggtgcctcatttgatgtcccttctctggttgataaactcctagaacaactcgctagcaaacgaaagatagtagttaatttatatgacaccacaaatcatacctctcctattgaaatgtatggttctgattttactccatctggtgatctgcatattagtagcattgattttggagacccaacacgcaaacatgagatgcattgcagatttaaacatgaaccttcactgccatggtctgcaataataatatcaacagctgtagctataattgttttgcttgttggacatattatttatgcaactctgaactcccttgaaaaggctgaacatgattatagagtaatgagagaacttaaaggacaagctgaagctgcagatatagcaaaatctcagtttctagcaactgtttcccatgagattcggactccaatgaatggtgttttaggtatgctgcagatgctaatggacactgaacttgatacaactcagcaggattttgtagtcaccgctcaagaaagtggaaaggtattaataaacttaataaatgaagtccttgatctggctaagatagagtcaggaaggattgagctggaagcagtgccttttgatgtccgtgatattcttgacaatgtgatatctcttttctacgataaatcacaagctaaaggcatagagttggccgtgcttgtatctgaccaagttcctgatgtcctaattggggatccatggcggttccggcagatcattacgaaccttgtggggaattctatgaagggccacatctttgttcaagtccatttggtcaaggaactaaacaggaaaggaaacaatttttgtgatgtttctgctcataacagagaaattctgtatgattctgacaactcgatgctatggaacacactaagcggacttgaagtagcagatagctggaggtccttggagaattttacgatgttcaagaattcaaatggtgaaacagatacaattaggttagctgtcagagttgaagacaccggcataggaataacaaaagatgctcaaatgcgtatttttacacctttcatgcaagctgacagttccacctcacgaacatatggtggaactggaattggcttgagtattacaaaacgtttagttgaattgatgggtggagaaatagggtttactagtaaatcaggagttggtagtacattttcttttactgccattttcaaggagaacagaggatgtcctggagatatgaaaagatactattctgaacctactccgttggattttcaaggaatgagggctcttattattgatggaaggagtgcacgtgcagaggttactatgtaccatcttcgtagacttggaatacagtgcagtcttgttgccacatctgaatctgaatctgcatcttcagctttgatgaaagcctgcacctcaagcaaaaacaatccggacatggtccttgttgatacagaagcttggggtaaaggttcaggtttggcattctatcatcgttttgtagattgtcaactaaagggcgcacacaagttttctcagcccatgccaaagactattcttttgggaagctcaataagccctgttgaatctgattatttaagattgacaggatttggtgattgcataaggaaacccctccgtcttagtactattgttgcctgtcttcgcaaaaccttaggggttggggttacaaggcagcagagtagagaccaatctttggttcttcaaagtgtactaactggaaaacagattctggttgtggatgataatgcagtcaaccgtaaagttgcagctggttctttgaagaaatatggatctaaagttacatgtgttgatagtgggagtgatgcaattgatatgctcaagccacctcacacatttgatgcttgcttcatggatgttcagatgcccgagatggacgggtttgaagctacaagattaatccggtccatagagaaaaaaataaacgatatgatcatgatgggtgaaatatccgctaataattatggaaataaggcccattggcatgtaccaatattagctatgacggcagatgtaatccaagcgacttttgaaaaatgtatgcagtgtggaatggatggatatgtgtcaaagccatttgaagaacagcagctctactttgctgttgctcatttcttagagactgatgaaacagaataacaaatccaacttcgtaggagattgatttgccgcaacactgtttcaacatctgccaaaagaccatctgttcaacaggttctgaaaaacagcgatcggcagcatatttggaaacaaaatacattggactcccactgaccagaagaaagaagataagatagtagggggtacaaaatgtttggtctggtttccgcagcaattttttttctggccgtgttttctggaaccaatacaacatgaccttgcaacagtggtgtcagttgcttctgtaatgccttatgacaccacgatatttccaaatgctgtgttgtaagtgctttacagacaaaccgaggtccagctttctaaaacattgagttcaatgacatcacttcatccattatttaagaaagcgagggtcttcaaatcaggaggatacaattgtatcaccaagtcaggcacacagtttcaaggtgactttgttctgatctgattgttaatgcaatctgtaaagaggcaactatgagttagggattgtttgatgccttgaatgtcgtatattcatattccatcatttttgtgggcacttgtatatacattgatgattaattgtattgttagataattgtgcattttaagattaaatgaattcctaaagcaaatcgttacataaacaatgtataaagcacacataacaaataaaggcatgtcttagtagattaaac

SEQ ID NO: 48664 - DNA, 5153 bp, Zea Mays
ccaagatagctagaggcctagagctacagcctctagtacttgccacagcaatagcacagcagcttttctgagtaataaacaacaccattgctcttctctcttctcgtttctctcctgtatccagttgtggctcaccactgctattctctctaccagcaagcagctcctgccttttgtttttcagctcctgctgcagcctttcccctcccaccacccaccacacccccaaacccgtgcaagaaaccaggagcagcaaagcaaccggcgctgcaacttgctccggtggcttaaagttggacagagtgggctcttggatcaccgttcaccggtccccgacccaccggcgtgccactgttcttggacagagggggcaatcattcgcgccgcggcagtagccaacctcctccgttcttggattggctcacagcgtgcgaccgtgcgggcccctcgaaccgagcaacaagccaagcaagaacacccactcccctctctccggactccgcatgcgattgctggctcggtgacgcgctgctggcctatctcaaatcctcaacttacttgcctcctcggttctttcttgtgcttcatgtggctcctgcaactcgctgcagcaccacttgcgctgtgtcgccacgcgctgtttcttgagcctctttggtagctttagtggttgaagcgaggtctgctcacccgatggttccgaacggagcaggggaatgcggcggcggctgccggcgagggaaagcagcgcacgccggtgtcggcgctgtggctggtttcttcttatgtctcttgatggtctgggcagttggtgggtctgaaagatcaggttgtggccgggtggctgagcaccacggggtggtacgggtggggcagttcaacctcagcaggagccagctgcaggcgttggtgttcctcctctcatcgacacataaagaatgtatggtaaattctggaatggtccatgatgggaatcaagtcaatgaatcttgcacagcacaagataaatatggcctaaatagtcatgcacctgcagtattggaagataagttattgcaaaatgttatacaagaagacattaattctaccacgcagtgcaatccggacgaatgtgacttatgtgctggaatcagtggcgtgaatgtggtccagaatattgggtcaagttctaatcgcacaataatattatgtctatctgcttttttggggagcattgtgatatcaatagttaaaactacgcacaaaagagggattcaaacccacaagctttatgcagatgagaaagttctccaggcaccaagtactaaaataagtcgaaagtggtcaaagagagccctgcttattggtgtcttatttgggctctgtagctctgtatgcatattttcatgcatgtatgccgatgttgttgctcggagaattgagaatcttgctaatatgtgtgatgagagagcaaggatgttacaggatcagtttaatgtaagcatgaaccatgtgcatgcgttggctatactggtctcatcatttcaccatgggaaggatccttctgctattgatcagaaaacatttgaggacttcacagcaaggacaacatttgaaaggccattgatgagtggtgtcgcctatgcattgaaggtattacacaatgaaagacaacagtttgaggaacaacatggatggaagattaagaagatggaagatggagatcagtcccttgttcatgactacaaccttgaaaagcttgaaccatcaccagttcaagatgagtaaaggggccctaacatccccttttaagcttctgaagtccaaccatctcggtgtggtgcttacattcactgtatataaatatgatctgcctccaaatgcaacaccacaggagcgtattcatgctacattgggctatcttggtgcctcatttgatgtcccttctctggttgataaactcctagaacaactcgctagcaaacgaaagatagtagttaatttatatgacaccacaaatcatacctctcctattgaaatgtatggttctgattttactccatctggtgatctgcatattagtagcattgattttggagacccaacacgcaaacatgagatgcattgcagatttaaacatgaaccttcactgccatggtctgcaataataatatcaacagctgtagctataattgttttgcttgttggacatattatttatgcaactctgaactcccttgaaaaggctgaacatgattatagagtaatgagagaacttaaaggacaagctgaagctgcagatatagcaaaatctcagtttctagcaactgtttcccatgagattcggactccaatgaatggtgttttaggtatgctgcagatgctaatggacactgaacttgatacaactcagcaggattttgtagtcaccgctcaagaaagtggaaaggtattaataaacttaataaatgaagtccttgatctggctaagatagagtcaggaaggattgagctggaagcagtgccttttgatgtccgtgatattcttgacaatgtgatatctcttttctacgataaatcacaagctaaaggcatagagttggccgtgcttgtatctgaccaagttcctgatgtcctaattggggatccatggcggttccggcagatcattacgaaccttgtggggaattctatgaagtttactgaacagggccacatctttgttcaagtccatttggtcaaggaactaaacaggaaaggaaacaatttttgtgatgtttctgctcataacagagaaattctgtatgattctgacaactcgatgctatggaacacactaagcggacttgaagtagcagatagctggaggtccttggagaattttacgatgttcaagaattcaaatggtgaaacagatacaattaggttagctgtcagagttgaagacaccggcataggaataacaaaagatgctcaaatgcgtatttttacacctttcatgcaagctgacagttccacctcacgaacatatggtggaactggaattggcttgagtattacaaaacgtttagttgaattgatgggtggagaaatagggtttactagtaaatcaggagttggtagtacattttcttttactgccattttcaaggagaacagaggatgtcctggagatatgaaaagatactattctgaacctactccgttggattttcaaggaatgagggctcttattattgatggaaggagtgcacgtgcagaggttactatgtaccatcttcgtagacttggaatacagtgcagtcttgttgccacatctgaatctgaatctgcatcttcagctttgatgaaagcctgcacctcaagcaaaaacaatccggacatggtccttgttgatacagaagcttggggtaaaggttcaggtttggcattctatcatcgttttgtagattgtcaactaaagggcgcacacaagttttctcagcccatgccaaagactattcttttgggaagctcaataagccctgttgaatctgattatttaagattgacaggatttggtgattgcataaggaaacccctccgtcttagtactattgttgcctgtcttcgcaaaaccttaggggttggggttacaaggcagcagagtagagaccaatctttggttcttcaaagtgtactaactggaaaacagattctggttgtggatgataatgcagtcaaccgtaaagttgcagctggttctttgaagaaatatggatctaaagttacatgtgttgatagtgggagtgatgcaattgatatgctcaagccacctcacacatttgatgcttgcttcatggatgttcagatgcccgagatggacgggtttgaagctacaagattaatccggtccatagagaaaaaaataaacgatatgatcatgatgggtgaaatatccgctaataattatggaaataaggcccattggcatgtaccaatattagctatgacggcagatgtaatccaagcgacttttgaaaaatgtatgcagtgtggaatggatggatatgtgtcaaagccatttgaagaacagcagctctactttgctgttgctcatttcttagagactgatgaaacagaataacaaatccaacttcgtaggagattgatttgccgcaacactgtttcaacatctgccaaaagaccatctgttcaacaggttctgaaaaacagcgatcggcagcatatttggtgatttcctctacatgctttttaagagcaagctaatgcaattaaatatttccccatgcagttctacaagcttatgcatttacattctttgtggagcgataaaactttgcttgtatacttgtctgccaaatatctactataacatcttgttatcaagaaagaaacctattgtaacattgacttgcctagctctgaatgcagatgaagcatcaatatttttgaaacaaaaatactaatttgctcattactcattgaatcattgtagaaattgctgatttggtaattttatctttgttttggagcaatggaattgaggtcccagttcttatatatagaacttgctccaggaaacaaaatacattggactcccactgaccagaagaaagaagataagatagtagggggtacaaaatgtttggtctggtttccgcagcaattttttttctggccgtgttttctggaaccaatacaacatgaccttgcaacagtggtgtcagttgcttctgtaatgccttatgacaccacgatatttccaaatgctgtgttgtaagtgctttacagacaaaccgaggtccagctttctaaaacattgagttcaatgacatcacttcatccattatttaagaaagcgagggtcttcaaatcaggaggatacaattgtatcaccaagtcaggcacacagtttcaaggtgactttgttctgatctgattgttaatgcaatctgtaaagaggcaactatgagttagggattgtttgatgccttgaatgtcgtatattcatattccatcatttttgtgggcacttgtatatacattgatgattaattgtattgttagataattgtgcattttaagattaaatgaattcctaaagcaaatcgttacataaacaatgtataaagcacacataacaaataaaggcatgtcttagtagattaaac

SEQ ID NO: 48665 - DNA, 5277 bp, Zea Mays
ccaagatagctagaggcctagagctacagcctctagtacttgccacagcaatagcacagcagcttttctgagtaataaacaacaccattgctcttctctcttctcgtttctctcctgtatccagttgtggctcaccactgctattctctctaccagcaagcagctcctgccttttgtttttcagctcctgctgcagcctttcccctcccaccacccaccacacccccaaacccgtgcaagaaaccaggagcagcaaagcaaccggcgctgcaacttgctccggtggcttaaagttggacagagtgggctcttggatcaccgttcaccggtccccgacccaccggcgtgccactgttcttggacagagggggcaatcattcgcgccgcggcagtagccaacctcctccgttcttggattggctcacagcgtgcgaccgtgcgggcccctcgaaccgagcaacaagccaagcaagaacacccactcccctctctccggactccgcatgcgattgctggctcggtgacgcgctgctggcctatctcaaatcctcaacttacttgcctcctcggttctttcttgtgcttcatgtggctcctgcaactcgctgcagcaccacttgcgctgtgtcgccacgcgctgtttcttgagcctctttggtagctttagtggttgaagcgaggtctgctcacccgatggttccgaacggagcaggggaatgcggcggcggctgccggcgagggaaagcagcgcacgccggtgtcggcgctgtggctggtttcttcttatgtctcttgatggtctgggcagttggtgggtctgaaagatcaggttgtggccgggtggctgagcaccacggggtggtacgggtggggcagttcaacctcagcaggagccagctgcaggcgttggtgttcctcctctcatcgacacataaagaatgtatggtaaattctggaatggtccatgatgggaatcaagtcaatggtgcgtcttttatcccagatattcgttgcattcgagataggatatatgatggaaaacagaattggttgaaggatgcaattcttcaagaatcttgcacagcacaagataaatatggcctaaatagtcatgcacctgcagtattggaagataagttattgcaaaatgttatacaagaagacattaattctaccacgcagtgcaatccggacgaatgtgacttatgtgctggaatcagtggcgtgaatgtggtccagaatattgggtcaagttctaatcgcacaataatattatgtctatctgcttttttggggagcattgtgatatcaatagttaaaactacgcacaaaagagggattcaaacccacaagctttatgcagatgagaaagttctccaggcaccaagtactaaaataagtcgaaagtggtcaaagagagccctgcttattggtgtcttatttgggctctgtagctctgtatgcatattttcatgcatgtatgccgatgttgttgctcggagaattgagaatcttgctaatatgtgtgatgagagagcaaggatgttacaggatcagtttaatgtaagcatgaaccatgtgcatgcgttggctatactggtctcatcatttcaccatgggaaggatccttctgctattgatcagaaaacatttgaggacttcacagcaaggacaacatttgaaaggccattgatgagtggtgtcgcctatgcattgaaggtattacacaatgaaagacaacagtttgaggaacaacatggatggaagattaagaagatggaagatggagatcagtcccttgttcatgactacaaccttgaaaagcttgaaccatcaccagttcaagatgagaagatcatgacaatatattacgttcctggtcaacaggtaaaggggccctaacatccccttttaagcttctgaagtccaaccatctcggtgtggtgcttacattcactgtatataaatatgatctgcctccaaatgcaacaccacaggagcgtattcatgctacattgggctatcttggtgcctcatttgatgtcccttctctggttgataaactcctagaacaactcgctagcaaacgaaagatagtagttaatttatatgacaccacaaatcatacctctcctattgaaatgtatggttctgattttactccatctggtgatctgcatattagtagcattgattttggagacccaacacgcaaacatgagatgcattgcagatttaaacatgaaccttcactgccatggtctgcaataataatatcaacagctgtagctataattgttttgcttgttggacatattatttatgcaactctgaactcccttgaaaaggctgaacatgattatagagtaatgagagaacttaaaggacaagctgaagctgcagatatagcaaaatctcagtttctagcaactgtttcccatgagattcggactccaatgaatggtgttttaggtatgctgcagatgctaatggacactgaacttgatacaactcagcaggattttgtagtcaccgctcaagaaagtggaaaggtattaataaacttaataaatgaagtccttgatctggctaagatagagtcaggaaggattgagctggaagcagtgccttttgatgtccgtgatattcttgacaatgtgatatctcttttctacgataaatcacaagctaaaggcatagagttggccgtgcttgtatctgaccaagttcctgatgtcctaattggggatccatggcggttccggcagatcattacgaaccttgtggggaattctatgaagtttactgaacagggccacatctttgttcaagtccatttggtcaaggaactaaacaggaaaggaaacaatttttgtgatgtttctgctcataacagagaaattctgtatgattctgacaactcgatgctatggaacacactaagcggacttgaagtagcagatagctggaggtccttggagaattttacgatgttcaagaattcaaatggtgaaacagatacaattaggttagctgtcagagttgaagacaccggcataggaataacaaaagatgctcaaatgcgtatttttacacctttcatgcaagctgacagttccacctcacgaacatatggtggaactggaattggcttgagtattacaaaacgtttagttgaattgatgggtggagaaatagggtttactagtaaatcaggagttggtagtacattttcttttactgccattttcaaggagaacagaggatgtcctggagatatgaaaagatactattctgaacctactccgttggattttcaaggaatgagggctcttattattgatggaaggagtgcacgtgcagaggttactatgtaccatcttcgtagacttggaatacagtgcagtcttgttgccacatctgaatctgaatctgcatcttcagctttgatgaaagcctgcacctcaagcaaaaacaatccggacatggtccttgttgatacagaagcttggggtaaaggttcaggtttggcattctatcatcgttttgtagattgtcaactaaagggcgcacacaagttttctcagcccatgccaaagactattcttttgggaagctcaataagccctgttgaatctgattatttaagattgacaggatttggtgattgcataaggaaacccctccgtcttagtactattgttgcctgtcttcgcaaaaccttaggggttggggttacaaggcagcagagtagagaccaatctttggttcttcaaagtgtactaactggaaaacagattctggttgtggatgataatgcagtcaaccgtaaagttgcagctggttctttgaagaaatatggatctaaagttacatgtgttgatagtgggagtgatgcaattgatatgctcaagccacctcacacatttgatgcttgcttcatggatgttcagatgcccgagatggacgggtttgaagctacaagattaatccggtccatagagaaaaaaataaacgatatgatcatgatgggtgaaatatccgctaataattatggaaataaggcccattggcatgtaccaatattagctatgacggcagatgtaatccaagcgacttttgaaaaatgtatgcagtgtggaatggatggatatgtgtcaaagccatttgaagaacagcagctctactttgctgttgctcatttcttagagactgatgaaacagaataacaaatccaacttcgtaggagattgatttgccgcaacactgtttcaacatctgccaaaagaccatctgttcaacaggttctgaaaaacagcgatcggcagcatatttggtgatttcctctacatgctttttaagagcaagctaatgcaattaaatatttccccatgcagttctacaagcttatgcatttacattctttgtggagcgataaaactttgcttgtatacttgtctgccaaatatctactataacatcttgttatcaagaaagaaacctattgtaacattgacttgcctagctctgaatgcagatgaagcatcaatatttttgaaacaaaaatactaatttgctcattactcattgaatcattgtagaaattgctgatttggtaattttatctttgttttggagcaatggaattgaggtcccagttcttatatatagaacttgctccaggaaacaaaatacattggactcccactgaccagaagaaagaagataagatagtagggggtacaaaatgtttggtctggtttccgcagcaattttttttctggccgtgttttctggaaccaatacaacatgaccttgcaacagtggtgtcagttgcttctgtaatgccttatgacaccacgatatttccaaatgctgtgttgtaagtgctttacagacaaaccgaggtccagctttctaaaacattgagttcaatgacatcacttcatccattatttaagaaagcgagggtcttcaaatcaggaggatacaattgtatcaccaagtcaggcacacagtttcaaggtgactttgttctgatctgattgttaatgcaatctgtaaagaggcaactatgagttagggattgtttgatgccttgaatgtcgtatattcatattccatcatttttgtgggcacttgtatatacattgatgattaattgtattgttagataattgtgcattttaagattaaatgaattcctaaagcaaatcgttacataaacaatgtataaagcacacataacaaataaaggcatgtcttagtagattaaac

SEQ ID NO: 48666 - DNA, 4589 bp, Zea Mays
ccaagatagctagaggcctagagctacagcctctagtacttgccacagcaatagcacagcagcttttctgagtaataaacaacaccattgctcttctctcttctcgtttctctcctgtatccagttgtggctcaccactgctattctctctaccagcaagcagctcctgccttttgtttttcagctcctgctgcagcctttcccctcccaccacccaccacacccccaaacccgtgcaagaaaccaggagcagcaaagcaaccggcgctgcaacttgctccggtggcttaaagttggacagagtgggctcttggatcaccgttcaccggtccccgacccaccggcgtgccactgttcttggacagagggggcaatcattcgcgccgcggcagtagccaacctcctccgttcttggattggctcacagcgtgcgaccgtgcgggcccctcgaaccgagcaacaagccaagcaagaacacccactcccctctctccggactccgcatgcgattgctggctcggtgacgcgctgctggcctatctcaaatcctcaacttacttgcctcctcggttctttcttgtgcttcatgtggctcctgcaactcgctgcagcaccacttgcgctgtgtcgccacgcgctgtttcttgagcctctttggtagctttagtggttgaagcgaggtctgctcacccgatggttccgaacggagcaggggaatgcggcggcggctgccggcgagggaaagcagcgcacgccggtgtcggcgctgtggctggtttcttcttatgtctcttgatggtctgggcagttggtgggtctgaaagatcaggttgtggccgggtggctgagcaccacggggtggtacgggtggggcagttcaacctcagcaggagccagctgcaggcgttggtgttcctcctctcatcgacacataaagaatgtatggtaaattctggaatggtccatgatgggaatcaagtcaatggtgcgtcttttatcccagatattcgttgcattcgagataggatatatgatggaaaacagaattggttgaaggatgcaattcttcaagaatcttgcacagcacaagataaatatggcctaaatagtcatgcacctgcagtattggaagataagttattgcaaaatgttatacaagaagacattaattctaccacgcagtgcaataaaacatttgaggacttcacagcaaggacaacatttgaaaggccattgatgagtggtgtcgcctatgcattgaaggtattacacaatgaaagacaacagtttgaggaacaacatggatggaagattaagaagatggaagatggagatcagtcccttgttcatgactacaaccttgaaaagcttgaaccatcaccagttcaagatgagtatgcgcctgttattttctctcaggaaactgtgaagcacattatatctgtagatatgatgtctgggaaggaagatcatgacaatatattacgttcctggtcaacaggtaaaggggccctaacatccccttttaagcttctgaagtccaaccatctcggtgtggtgcttacattcactgtatataaatatgatctgcctccaaatgcaacaccacaggagcgtattcatgctacattgggctatcttggtgcctcatttgatgtcccttctctggttgataaactcctagaacaactcgctagcaaacgaaagatagtagttaatttatatgacaccacaaatcatacctctcctattgaaatgtatggttctgattttactccatctggtgatctgcatattagtagcattgattttggagacccaacacgcaaacatgagatgcattgcagatttaaacatgaaccttcactgccatggtctgcaataataatatcaacagctgtagctataattgttttgcttgttggacatattatttatgcaactctgaactcccttgaaaaggctgaacatgattatagagtaatgagagaacttaaaggacaagctgaagctgcagatatagcaaaatctcagtttctagcaactgtttcccatgagattcggactccaatgaatggtgttttaggtatgctgcagatgctaatggacactgaacttgatacaactcagcaggattttgtagtcaccgctcaagaaagtggaaaggtattaataaacttaataaatgaagtccttgatctggctaagatagagtcaggaaggattgagctggaagcagtgccttttgatgtccgtgatattcttgacaatgtgatatctcttttctacgataaatcacaagctaaaggcatagagttggccgtgcttgtatctgaccaagttcctgatgtcctaattggggatccatggcggttccggcagatcattacgaaccttgtggggaattctatgaagtttactgaacagggccacatctttgttcaagtccatttggtcaaggaactaaacaggaaaggaaacaatttttgtgatgtttctgctcataacagagaaattctgtatgattctgacaactcgatgctatggaacacactaagcggacttgaagtagcagatagctggaggtccttggagaattttacgatgttcaagaattcaaatggtgaaacagatacaattaggttagctgtcagagttgaagacaccggcataggaataacaaaagatgctcaaatgcgtatttttacacctttcatgcaagctgacagttccacctcacgaacatatggtggaactggaattggcttgagtattacaaaacgtttagttgaattgatgggtggagaaatagggtttactagtaaatcaggagttggtagtacattttcttttactgccattttcaaggagaacagaggatgtcctggagatatgaaaagatactattctgaacctactccgttggattttcaaggaatgagggctcttattattgatggaaggagtgcacgtgcagaggttactatgtaccatcttcgtagacttggaatacagtgcagtcttgttgccacatctgaatctgaatctgcatcttcagctttgatgaaagcctgcacctcaagcaaaaacaatccggacatggtccttgttgatacagaagcttggggtaaaggttcaggtttggcattctatcatcgttttgtagattgtcaactaaagggcgcacacaagttttctcagcccatgccaaagactattcttttgggaagctcaataagccctgttgaatctgattatttaagattgacaggatttggtgattgcataaggaaacccctccgtcttagtactattgttgcctgtcttcgcaaaaccttaggggttggggttacaaggcagcagagtagagaccaatctttggttcttcaaagtgtactaactggaaaacagattctggttgtggatgataatgcagtcaaccgtaaagttgcagctggttctttgaagaaatatggatctaaagttacatgtgttgatagtgggagtgatgcaattgatatgctcaagccacctcacacatttgatgcttgcttcatggatgttcagatgcccgagatggacgggtttgaagctacaagattaatccggtccatagagaaaaaaataaacgatatgatcatgatgggtgaaatatccgctaataattatggaaataaggcccattggcatgtaccaatattagctatgacggcagatgtaatccaagcgacttttgaaaaatgtatgcagtgtggaatggatggatatgtgtcaaagccatttgaagaacagcagctctactttgctgttgctcatttcttagagactgatgaaacagaataacaaatccaacttcgtaggagattgatttgccgcaacactgtttcaacatctgccaaaagaccatctgttcaacaggttctgaaaaacagcgatcggcagcatatttgcaatggaattgaggtcccagttcttatatatagaacttgctccaggaaacaaaatacattggactcccactgaccagaagaaagaagataagatagtagggggtacaaaatgtttggtctggtttccgcagcaattttttttctggccgtgttttctggaaccaatacaacatgaccttgcaacagtggtgtcagttgcttctgtaatgccttatgacaccacgatatttccaaatgctgtgttgtaagtgctttacagacaaaccgaggtccagctttctaaaacattgagttcaatgacatcacttcatccattatttaagaaagcgagggtcttcaaatcaggaggatacaattgtatcaccaagtcaggcacacagtttcaaggtgactttgttctgatctgattgttaatgcaatctgtaaagaggcaactatgagttagggattgtttgatgccttgaatgtcgtatattcatattccatcatttttgtgggcacttgtatatacattgatgattaattgtattgttagataattgtgcattttaagattaaatgaattcctaaagcaaatcgttacataaacaatgtataaagcacacataacaaataaaggcatgtcttagtagattaaac

SEQ ID NO: 48667 - DNA, 4952 bp, Zea Mays
ccaagatagctagaggcctagagctacagcctctagtacttgccacagcaatagcacagcagcttttctgagtaataaacaacaccattgctcttctctcttctcgtttctctcctgtatccagttgtggctcaccactgctattctctctaccagcaagcagctcctgccttttgtttttcagctcctgctgcagcctttcccctcccaccacccaccacacccccaaacccgtgcaagaaaccaggagcagcaaagcaaccggcgctgcaacttgctccggtggcttaaagttggacagagtgggctcttggatcaccgttcaccggtccccgacccaccggcgtgccactgttcttggacagagggggcaatcattcgcgccgcggcagtagccaacctcctccgttcttggattggctcacagcgtgcgaccgtgcgggcccctcgaaccgagcaacaagccaagcaagaacacccactcccctctctccggactccgcatgcgattgctggctcggtgacgcgctgctggcctatctcaaatcctcaacttacttgcctcctcggttctttcttgtgcttcatgtggctcctgcaactcgctgcagcaccacttgcgctgtgtcgccacgcgctgtttcttgagcctctttggtagctttagtggttgaagcgaggtctgctcacccgatggttccgaacggagcaggggaatgcggcggcggctgccggcgagggaaagcagcgcacgccggtgtcggcgctgtggctggtttcttcttatgtctcttgatggtctgggcagttggtgggtctgaaagatcaggttgtggccgggtggctgagcaccacggggtggtacgggtggggcagttcaacctcagcaggagccagctgcaggcgttggtgttcctcctctcatcgacacataaagaatgtatggtaaattctggaatggtccatgatgggaatcaagtcaatggtgcgtcttttatcccagatattcgttgcattcgagataggatatatgatggaaaacagaattggttgaaggatgcaattcttcaagaatcttgcacagcacaagataaatatggcctaaatagtcatgcacctgcagtattggaagataagttattgcaaaatgttatacaagaagacattaattctaccacgcagtgcaatccggacgaatgtgacttatgtgctggaatcagtggcgtgaatgtggtccagaatattgggtcaagttctaatcgcacaataatattatgtctatctgcttttttggggagcattgtgatatcaatagttaaaactacgcacaaaagagggattcaaacccacaagctttatgcagatgagaaagttctccaggcaccaagtactaaaataagtcgaaagtggtcaaagagagccctgcttattggtgtcttatttgggctctgtagctctgtatgcatattttcatgcatgtatgccgatgttgttgctcggagaattgagaatcttgctaatatgtgtgatgagagagcaaggatgttacaggatcagtttaatgtaagcatgaaccatgtgcatgcgttggctatactggtctcatcatttcaccatgggaaggatccttctgctattgatcagaaaacatttgaggacttcacagcaaggacaacatttgaaaggccattgatgagtggtgtcgcctatgcattgaaggtattacacaatgaaagacaacagtttgaggaacaacatggatggaagattaagaagatggaagatggagatcagtcccttgttcatgactacaaccttgaaaagcttgaaccatcaccagttcaagatgagtatgcgcctgttattttctctcaggaaactgtgaagcacattatatctgtagatatgatgtctgggaaggtaaaggggccctaacatccccttttaagcttctgaagtccaaccatctcggtgtggtgcttacattcactgtatataaatatgatctgcctccaaatgcaacaccacaggagcgtattcatgctacattgggctatcttggtgcctcatttgatgtcccttctctggttgataaactcctagaacaactcgctagcaaacgaaagatagtagttaatttatatgacaccacaaatcatacctctcctattgaaatgtatggttctgattttactccatctggtgatctgcatattagtagcattgattttggagacccaacacgcaaacatgagatgcattgcagatttaaacatgaaccttcactgccatggtctgcaataataatatcaacagctgtagctataattgttttgcttgttggacatattatttatgcaactctgaactcccttgaaaaggctgaacatgattatagagtaatgagagaacttaaaggacaagctgaagctgcagatatagcaaaatctcagtttctagcaactgtttcccatgagattcggactccaatgaatggtgttttagatgctaatggacactgaacttgatacaactcagcaggattttgtagtcaccgctcaagaaagtggaaaggtattaataaacttaataaatgaagtccttgatctggctaagatagagtcaggaaggattgagctggaagcagtgccttttgatgtccgtgatattcttgacaatgtgatatctcttttctacgataaatcacaagctaaaggcatagagttggccgtgcttgtatctgaccaagttcctgatgtcctaattggggatccatggcggttccggcagatcattacgaaccttgtggggaattctatgaagtttactgaacagggccacatctttgttcaagtccatttggtcaaggaactaaacaggaaaggaaacaatttttgtgatgtttctgctcataacagagaaattctgtatgattctgacaactcgatgctatggaacacactaagcggacttgaagtagcagatagctggaggtccttggagaattttacgatgttcaagaattcaaatggtgaaacagatacaattaggttagctgtcagagttgaagacaccggcataggaataacaaaagatgctcaaatgcgtatttttacacctttcatgcaagctgacagttccacctcacgaacatatggtggaactggaattggcttgagtattacaaaacgtttagttgaattgatgggtggagaaatagggtttactagtaaatcaggagttggtagtacattttcttttactgccattttcaaggagaacagaggatgtcctggagatatgaaaagatactattctgaacctactccgttggattttcaaggaatgagggctcttattattgatggaaggagtgcacgtgcagaggttactatgtaccatcttcgtagacttggaatacagtgcagtcttgttgccacatctgaatctgaatctgcatcttcagctttgatgaaagcctgcacctcaagcaaaaacaatccggacatggtccttgttgatacagaagcttggggtaaaggttcaggtttggcattctatcatcgttttgtagattgtcaactaaagggcgcacacaagttttctcagcccatgccaaagactattcttttgggaagctcaataagccctgttgaatctgattatttaagattgacaggatttggtgattgcataaggaaacccctccgtcttagtactattgttgcctgtcttcgcaaaaccttaggggttggggttacaaggcagcagagtagagaccaatctttggttcttcaaagtgtactaactggaaaacagattctggttgtggatgataatgcagtcaaccgtaaagttgcagctggttctttgaagaaatatggatctaaagttacatgtgttgatagtgggagtgatgcaattgatatgctcaagccacctcacacatttgatgcttgcttcatggatgttcagatgcccgagatggacgggtttgaagctacaagattaatccggtccatagagaaaaaaataaacgatatgatcatgatgggtgaaatatccgctaataattatggaaataaggcccattggcatgtaccaatattagctatgacggcagatgtaatccaagcgacttttgaaaaatgtatgcagtgtggaatggatggatatgtgtcaaagccatttgaagaacagcagctctactttgctgttgctcatttcttagagactgatgaaacagaataacaaatccaacttcgtaggagattgatttgccgcaacactgtttcaacatctgccaaaagaccatctgttcaacaggttctgaaaaacagcgatcggcagcatatttggaaacaaaatacattggactcccactgaccagaagaaagaagataagatagtagggggtacaaaatgtttggtctggtttccgcagcaattttttttctggccgtgttttctggaaccaatacaacatgaccttgcaacagtggtgtcagttgcttctgtaatgccttatgacaccacgatatttccaaatgctgtgttgtaagtgctttacagacaaaccgaggtccagctttctaaaacattgagttcaatgacatcacttcatccattatttaagaaagcgagggtcttcaaatcaggaggatacaattgtatcaccaagtcaggcacacagtttcaaggtgactttgttctgatctgattgttaatgcaatctgtaaagaggcaactatgagttagggattgtttgatgccttgaatgtcgtatattcatattccatcatttttgtgggcacttgtatatacattgatgattaattgtattgttagataattgtgcattttaagattaaatgaattcctaaagcaaatcgttacataaacaatgtataaagcacacataacaaataaaggcatgtcttagtagattaaac

SEQ ID NO: 48668 - DNA, 4544 bp, Zea Mays
ccaagatagctagaggcctagagctacagcctctagtacttgccacagcaatagcacagcagcttttctgagtaataaacaacaccattgctcttctctcttctcgtttctctcctgtatccagttgtggctcaccactgctattctctctaccagcaagcagctcctgccttttgtttttcagctcctgctgcagcctttcccctcccaccacccaccacacccccaaacccgtgcaagaaaccaggagcagcaaagcaaccggcgctgcaacttgctccggtggcttaaagttggacagagtgggctcttggatcaccgttcaccggtccccgacccaccggcgtgccactgttcttggacagagggggcaatcattcgcgccgcggcagtagccaacctcctccgttcttggattggctcacagcgtgcgaccgtgcgggcccctcgaaccgagcaacaagccaagcaagaacacccactcccctctctccggactccgcatgcgattgctggctcggtgacgcgctgctggcctatctcaaatcctcaacttacttgcctcctcggttctttcttgtgcttcatgtggctcctgcaactcgctgcagcaccacttgcgctgtgtcgccacgcgctgtttcttgagcctctttggtagctttagtggttgaagcgaggtctgctcacccgatggttccgaacggagcaggggaatgcggcggcggctgccggcgagggaaagcagcgcacgccggtgtcggcgctgtggctggtttcttcttatgtctcttgatggtctgggcagttggtgggtctgaaagatcaggttgtggccgggtggctgagcaccacggggtggtacgggtggggcagttcaacctcagcaggagccagctgcaggcgttggtgttcctcctctcatcgacacataaagaatgtatggtaaattctggaatggtccatgatgggaatcaagtcaatggtgcgtcttttatcccagatattcgttgcattcgagataggatatatgatggaaaacagaattggttgaaggatgcaattcttcaagaatcttgcacagcacaagataaatatggcctaaatagtcatgcacctgcagtattggaagataagttattgcaaaatgttatacaagaagacattaattctaccacgcagtgcaataaaacatttgaggacttcacagcaaggacaacatttgaaaggccattgatgagtggtgtcgcctatgcattgaaggtattacacaatgaaagacaacagtttgaggaacaacatggatggaagattaagaagatggaagatggagatcagtcccttgttcatgactacaaccttgaaaagcttgaaccatcaccagttcaagatgagtatgcgcctgttattttctctcaggaaactgtgaagcacattatatctgtagatatgatgtctgggaaggaagatcatgacaatatattacgttcctggtcaacaggtaaaggggccctaacatccccttttaagcttctgaagtccaaccatctcggtgtggtgcttacattcactgtatataaatatgatctgcctccaaatgcaacaccacaggagcgtattcatgctacattgggctatcttggtgcctcatttgatgtcccttctctggttgataaactcctagaacaactcgctagcaaacgaaagatagtagttaatttatatgacaccacaaatcatacctctcctattgaaatgtatggttctgattttactccatctggtgatctgcatattagtagcattgattttggagacccaacacgcaaacatgagatgcattgcagatttaaacatgaaccttcactgccatggtctgcaataataatatcaacagctgtagctataattgttttgcttgttggacatattatttatgcaactctgaactcccttgaaaaggctgaacatgattatagagtaatgagagaacttaaaggacaagctgaagctgcagatatagcaaaatctcagtttctagcaactgtttcccatgagattcggactccaatgaatggtgttttaggtatgctgcagatgctaatggacactgaacttgatacaactcagcaggattttgtagtcaccgctcaagaaagtggaaaggtattaataaacttaataaatgaagtccttgatctggctaagatagagtcaggaaggattgagctggaagcagtgccttttgatgtccgtgatattcttgacaatgtgatatctcttttctacgataaatcacaagctaaaggcatagagttggccgtgcttgtatctgaccaagttcctgatgtcctaattggggatccatggcggttccggcagatcattacgaaccttgtggggaattctatgaagtttactgaacagggccacatctttgttcaagtccatttggtcaaggaactaaacaggaaaggaaacaatttttgtgatgtttctgctcataacagagaaattctgtatgattctgacaactcgatgctatggaacacactaagcggacttgaagtagcagatagctggaggtccttggagaattttacgatgttcaagaattcaaatggtgaaacagatacaattaggttagctgtcagagttgaagacaccggcataggaataacaaaagatgctcaaatgcgtatttttacacctttcatgcaagctgacagttccacctcacgaacatatggtggaactggaattggcttgagtattacaaaacgtttagttgaattgatgggtggagaaatagggtttactagtaaatcaggagttggtagtacattttcttttactgccattttcaaggagaacagaggatgtcctggagatatgaaaagatactattctgaacctactccgttggattttcaaggaatgagggctcttattattgatggaaggagtgcacgtgcagaggttactatgtaccatcttcgtagacttggaatacagtgcagtcttgttgccacatctgaatctgaatctgcatcttcagctttgatgaaagcctgcacctcaagcaaaaacaatccggacatggtccttgttgatacagaagcttggggtaaaggttcaggtttggcattctatcatcgttttgtagattgtcaactaaagggcgcacacaagttttctcagcccatgccaaagactattcttttgggaagctcaataagccctgttgaatctgattatttaagattgacaggatttggtgattgcataaggaaacccctccgtcttagtactattgttgcctgtcttcgcaaaaccttaggggttggggttacaaggcagcagagtagagaccaatctttggttcttcaaagtgtactaactggaaaacagattctggttgtggatgataatgcagtcaaccgtaaagttgcagctggttctttgaagaaatatggatctaaagttacatgtgttgatagtgggagtgatgcaattgatatgctcaagccacctcacacatttgatgcttgcttcatggatgttcagatgcccgagatggacgggtttgaagctacaagattaatccggtccatagagaaaaaaataaacgatatgatcatgatgggtgaaatatccgctaataattatggaaataaggcccattggcatgtaccaatattagctatgacggcagatgtaatccaagcgacttttgaaaaatgtatgcagtgtggaatggatggatatgtgtcaaagccatttgaagaacagcagctctactttgctgttgctcatttcttagagactgatgaaacagaataacaaatccaacttcgtaggagattgatttgccgcaacactgtttcaacatctgccaaaagaccatctgttcaacaggttctgaaaaacagcgatcggcagcatatttggaaacaaaatacattggactcccactgaccagaagaaagaagataagatagtagggggtacaaaatgtttggtctggtttccgcagcaattttttttctggccgtgttttctggaaccaatacaacatgaccttgcaacagtggtgtcagttgcttctgtaatgccttatgacaccacgatatttccaaatgctgtgttgtaagtgctttacagacaaaccgaggtccagctttctaaaacattgagttcaatgacatcacttcatccattatttaagaaagcgagggtcttcaaatcaggaggatacaattgtatcaccaagtcaggcacacagtttcaaggtgactttgttctgatctgattgttaatgcaatctgtaaagaggcaactatgagttagggattgtttgatgccttgaatgtcgtatattcatattccatcatttttgtgggcacttgtatatacattgatgattaattgtattgttagataattgtgcattttaagattaaatgaattcctaaagcaaatcgttacataaacaatgtataaagcacacataacaaataaaggcatgtcttagtagattaaac

SEQ ID NO: 48669 - DNA, 5025 bp, Zea Mays
ccaagatagctagaggcctagagctacagcctctagtacttgccacagcaatagcacagcagcttttctgagtaataaacaacaccattgctcttctctcttctcgtttctctcctgtatccagttgtggctcaccactgctattctctctaccagcaagcagctcctgccttttgtttttcagctcctgctgcagcctttcccctcccaccacccaccacacccccaaacccgtgcaagaaaccaggagcagcaaagcaaccggcgctgcaacttgctccggtggcttaaagttggacagagtgggctcttggatcaccgttcaccggtccccgacccaccggcgtgccactgttcttggacagagggggcaatcattcgcgccgcggcagtagccaacctcctccgttcttggattggctcacagcgtgcgaccgtgcgggcccctcgaaccgagcaacaagccaagcaagaacacccactcccctctctccggactccgcatgcgattgctggctcggtgacgcgctgctggcctatctcaaatcctcaacttacttgcctcctcggttctttcttgtgcttcatgtggctcctgcaactcgctgcagcaccacttgcgctgtgtcgccacgcgctgtttcttgagcctctttggtagctttagtggttgaagcgaggtctgctcacccgatggttccgaacggagcaggggaatgcggcggcggctgccggcgagggaaagcagcgcacgccggtgtcggcgctgtggctggtttcttcttatgtctcttgatggtctgggcagttggtgggtctgaaagatcaggttgtggccgggtggctgagcaccacggggtggtacgggtggggcagttcaacctcagcaggagccagctgcaggcgttggtgttcctcctctcatcgacacataaagaatgtatggtaaattctggaatggtccatgatgggaatcaagtcaatggtgcgtcttttatcccagatattcgttgcattcgagataggatatatgatggaaaacagaattggttgaaggatgcaattcttcaagaatcttgcacagcacaagataaatatggcctaaatagtcatgcacctgcagtattggaagataagttattgcaaaatgttatacaagaagacattaattctaccacgcagtgcaatccggacgaatgtgacttatgtgctggaatcagtggcgtgaatgtggtccagaatattgggtcaagttctaatcgcacaataatattatgtctatctgcttttttggggagcattgtgatatcaatagttaaaactacgcacaaaagagggattcaaacccacaagctttatgcagatgagaaagttctccaggcaccaagtactaaaataagtcgaaagtggtcaaagagagccctgcttattggtgtcttatttgggctctgtagctctgtatgcatattttcatgcatgtatgccgatgttgttgctcggagaattgagaatcttgctaatatgtgtgatgagagagcaaggatgttacaggatcagtttaatgtaagcatgaaccatgtgcatgcgttggctatactggtctcatcatttcaccatgggaaggatccttctgctattgatcagaaaacatttgaggacttcacagcaaggacaacatttgaaaggccattgatgagtggtgtcgcctatgcattgaaggtattacacaatgaaagacaacagtttgaggaacaacatggatggaagattaagaagatggaagatggagatcagtcccttgttcatgactacaaccttgaaaagcttgaaccatcaccagttcaagatgagtatgcgcctgttattttctctcaggaaactgtgaagcacattatatctgtagatatgatgtctgggaaggaagatcatgacaatatattacgttcctggtcaacaggtaaaggggccctaacatccccttttaagcttctgaagtccaaccatctcggtgtggtgcttacattcactgtatataaatatgatctgcctccaaatgcaacaccacaggagcgtattcatgctacattgggctatcttggtgcctcatttgatgtcccttctctggttgataaactcctagaacaactcgctagcaaacgaaagatagtagttaatttatatgacaccacaaatcatacctctcctattgaaatgtatggttctgattttactccatctggtgatctgcatattagtagcattgattttggagacccaacacgcaaacatgagatgcattgcagatttaaacatgaaccttcactgccatggtctgcaataataatatcaacagctgtagctataattgttttgcttgttggacatattatttatgcaactctgaactcccttgaaaaggctgaacatgattatagagtaatgagagaacttaaaggacaagctgaagctgcagatatagcaaaatctcagtttctagcaactgtttcccatgagattcggactccaatgaatggtgttttaggtatgctgcagatgctaatggacactgaacttgatacaactcagcaggattttgtagtcaccgctcaagaaagtggaaaggtattaataaacttaataaatgaagtccttgatctggctaagatagagtcaggaaggattgagctggaagcagtgccttttgatgtccgtgatattcttgacaatgtgatatctcttttctacgataaatcacaagctaaaggcatagagttggccgtgcttgtatctgaccaagttcctgatgtcctaattggggatccatggcggttccggcagatcattacgaaccttgtggggaattctatgaagtttactgaacagggccacatctttgttcaagtccatttggtcaaggaactaaacaggaaaggaaacaatttttgtgatgtttctgctcataacagagaaattctgtatgattctgacaactcgatgctatggaacacactaagcggacttgaagtagcagatagctggaggtccttggagaattttacgatgttcaagaattcaaatggtgaaacagatacaattaggttagctgtcagagttgaagacaccggcataggaataacaaaagatgctcaaatgcgtatttttacacctttcatgcaagctgacagttccacctcacgaacatatggtggaactggaattggcttgagtattacaaaacgtttagttgaattgatgggtggagaaatagggtttactagtaaatcaggagttggtagtacattttcttttactgccattttcaaggagaacagaggatgtcctggagatatgaaaagatactattctgaacctactccgttggattttcaaggaatgagggctcttattattgatggaaggagtgcacgtgcagaggttactatgtaccatcttcgtagacttggaatacagtgcagtcttgttgccacatctgaatctgaatctgcatcttcagctttgatgaaagcctgcacctcaagcaaaaacaatccggacatggtccttgttgatacagaagcttggggtaaaggttcaggtttggcattctatcatcgttttgtagattgtcaactaaagggcgcacacaagttttctcagcccatgccaaagactattcttttgggaagctcaataagccctgttgaatctgattatttaagattgacaggatttggtgattgcataaggaaacccctccgtcttagtactattgttgcctgtcttcgcaaaaccttaggggttggggttacaaggcagcagagtagagaccaatctttggttcttcaaagtgtactaactggaaaacagattctggttgtggatgataatgcagtcaaccgtaaagttgcagctggttctttgaagaaatatggatctaaagttacatgtgttgatagtgggagtgatgcaattgatatgctcaagccacctcacacatttgatgcttgcttcatggatgttcagatgcccgagatggacgggtttgaagctacaagattaatccggtccatagagaaaaaaataaacgatatgatcatgatgggtgaaatatccgctaataattatggaaataaggcccattggcatgtaccaatattagctatgacggcagatgtaatccaagcgacttttgaaaaatgtatgcagtgtggaatggatggatatgtgtcaaagccatttgaagaacagcagctctactttgctgttgctcatttcttagagactgatgaaacagaataacaaatccaacttcgtaggagattgatttgccgcaacactgtttcaacatctgccaaaagaccatctgttcaacaggttctgaaaaacagcgatcggcagcatatttgttcttatatatagaacttgctccaggaaacaaaatacattggactcccactgaccagaagaaagaagataagatagtagggggtacaaaatgtttggtctggtttccgcagcaattttttttctggccgtgttttctggaaccaatacaacatgaccttgcaacagtggtgtcagttgcttctgtaatgccttatgacaccacgatatttccaaatgctgtgttgtaagtgctttacagacaaaccgaggtccagctttctaaaacattgagttcaatgacatcacttcatccattatttaagaaagcgagggtcttcaaatcaggaggatacaattgtatcaccaagtcaggcacacagtttcaaggtgactttgttctgatctgattgttaatgcaatctgtaaagaggcaactatgagttagggattgtttgatgccttgaatgtcgtatattcatattccatcatttttgtgggcacttgtatatacattgatgattaattgtattgttagataattgtgcattttaagattaaatgaattcctaaagcaaatcgttacataaacaatgtataaagcacacataacaaataaaggcatgtcttagtagattaaac

SEQ ID NO: 48670 - DNA, 5082 bp, Zea Mays
ccaagatagctagaggcctagagctacagcctctagtacttgccacagcaatagcacagcagcttttctgagtaataaacaacaccattgctcttctctcttctcgtttctctcctgtatccagttgtggctcaccactgctattctctctaccagcaagcagctcctgccttttgtttttcagctcctgctgcagcctttcccctcccaccacccaccacacccccaaacccgtgcaagaaaccaggagcagcaaagcaaccggcgctgcaacttgctccggtggcttaaagttggacagagtgggctcttggatcaccgttcaccggtccccgacccaccggcgtgccactgttcttggacagagggggcaatcattcgcgccgcggcagtagccaacctcctccgttcttggattggctcacagcgtgcgaccgtgcgggcccctcgaaccgagcaacaagccaagcaagaacacccactcccctctctccggactccgcatgcgattgctggctcggtgacgcgctgctggcctatctcaaatcctcaacttacttgcctcctcggttctttcttgtgcttcatgtggctcctgcaactcgctgcagcaccacttgcgctgtgtcgccacgcgctgtttcttgagcctctttggtagctttagtggttgaagcgaggtctgctcacccgatggttccgaacggagcaggggaatgcggcggcggctgccggcgagggaaagcagcgcacgccggtgtcggcgctgtggctggtttcttcttatgtctcttgatggtctgggcagttggtgggtctgaaagatcaggttgtggccgggtggctgagcaccacggggtggtacgggtggggcagttcaacctcagcaggagccagctgcaggcgttggtgttcctcctctcatcgacacataaagaatgtatggtaaattctggaatggtccatgatgggaatcaagtcaatggtgcgtcttttatcccagatattcgttgcattcgagataggatatatgatggaaaacagaattggttgaaggatgcaattcttcaagaatcttgcacagcacaagataaatatggcctaaatagtcatgcacctgcagtattggaagataagttattgcaaaatgttatacaagaagacattaattctaccacgcagtgcaatccggacgaatgtgacttatgtgctggaatcagtggcgtgaatgtggtccagaatattgggtcaagttctaatcgcacaataatattatgtctatctgcttttttggggagcattgtgatatcaatagttaaaactacgcacaaaagagggattcaaacccacaagctttatgcagatgagaaagttctccaggcaccaagtactaaaataagtcgaaagtggtcaaagagagccctgcttattggtgtcttatttgggctctgtagctctgtatgcatattttcatgcatgtatgccgatgttgttgctcggagaattgagaatcttgctaatatgtgtgatgagagagcaaggatgttacaggatcagtttaatgtaagcatgaaccatgtgcatgcgttggctatactggtctcatcatttcaccatgggaaggatccttctgctattgatcagaaaacatttgaggacttcacagcaaggacaacatttgaaaggccattgatgagtggtgtcgcctatgcattgaaggtattacacaatgaaagacaacagtttgaggaacaacatggatggaagattaagaagatggaagatggagatcagtcccttgttcatgactacaaccttgaaaagcttgaaccatcaccagttcaagatgagtatgcgcctgttattttctctcaggaaactgtgaagcacattatatctgtagatatgatgtctgggaaggaagatcatgacaatatattacgttcctggtcaacaggtaaaggggccctaacatccccttttaagcttctgaagtccaaccatctcggtgtggtgcttacattcactgtatataaatatgatctgcctccaaatgcaacaccacaggagcgtattcatgctacattgggctatcttggtgcctcatttgatgtcccttctctggttgataaactcctagaacaactcgctagcaaacgaaagatagtagttaatttatatgacaccacaaatcatacctctcctattgaaatgtatggttctgattttactccatctggtgatctgcatattagtagcattgattttggagacccaacacgcaaacatgagatgcattgcagatttaaacatgaaccttcactgccatggtctgcaataataatatcaacagctgtagctataattgttttgcttgttggacatattatttatgcaactctgaactcccttgaaaaggctgaacatgattatagagtaatgagagaacttaaaggacaagctgaagctgcagatatagcaaaatctcagtttctagcaactgtttcccatgagattcggactccaatgaatggtgttttaggtatgctgcagatgctaatggacactgaacttgatacaactcagcaggattttgtagtcaccgctcaagaaagtggaaaggtattaataaacttaataaatgaagtccttgatctggctaagatagagtcaggaaggattgagctggaagcagtgccttttgatgtccgtgatattcttgacaatgtgatatctcttttctacgataaatcacaagctaaaggcatagagttggccgtgcttgtatctgaccaagttcctgatgtcctaattggggatccatggcggttccggcagatcattacgaaccttgtggggaattctatgaagtttactgaacagggccacatctttgttcaagtccatttggtcaaggaactaaacaggaaaggaaacaatttttgtgatgtttctgctcataacagagaaattctgtatgattctgacaactcgatgctatggaacacactaagcggacttgaagtagcagatagctggaggtccttggagaattttacgatgttcaagaattcaaatggtgaaacagatacaattaggttagctgtcagagttgaagacaccggcataggaataacaaaagatgctcaaatgcgtatttttacacctttcatgcaagctgacagttccacctcacgaacatatggtggaactggaattggcttgagtattacaaaacgtttagttgaattgatgggtggagaaatagggtttactagtaaatcaggagttggtagtacattttcttttactgccattttcaaggagaacagaggatgtcctggagatatgaaaagatactattctgaacctactccgttggattttcaaggaatgagggctcttattattgatggaaggagtgcacgtgcagaggttactatgtaccatcttcgtagacttggaatacagtgcagtcttgttgccacatctgaatctgaatctgcatcttcagctttgatgaaagcctgcacctcaagcaaaaacaatccggacatggtccttgttgatacagaagcttggggtaaaggttcaggtttggcattctatcatcgttttgtagattgtcaactaaagggcgcacacaagttttctcagcccatgccaaagactattcttttgggaagctcaataagccctgttgaatctgattatttaagattgacaggatttggtgattgcataaggaaacccctccgtcttagtactattgttgcctgtcttcgcaaaaccttaggggttggggttacaaggcagcagagtagagaccaatctttggttcttcaaagtgtactaactggaaaacagattctggttgtggatgataatgcagtcaaccgtaaagttgcagctggttctttgaagaaatatggatctaaagttacatgtgttgatagtgggagtgatgcaattgatatgctcaagccacctcacacatttgatgcttgcttcatggatgttcagatgcccgagatggacgggtttgaagctacaagattaatccggtccatagagaaaaaaataaacgatatgatcatgatgggtgaaatatccgctaataattatggaaataaggcccattggcatgtaccaatattagctatgacggcagatgtaatccaagcgacttttgaaaaatgtatgcagtgtggaatggatggatatgtgtcaaagccatttgaagaacagcagctctactttgctgttgctcatttcttagagactgatgaaacagaataacaaatccaacttcgtaggagattgatttgccgcaacactgtttcaacatctgccaaaagaccatctgttcaacaggttctgaaaaacagcgatcggcagcatatttgaaattgctgatttggtaattttatctttgttttggagcaatggaattgaggtcccagttcttatatatagaacttgctccaggaaacaaaatacattggactcccactgaccagaagaaagaagataagatagtagggggtacaaaatgtttggtctggtttccgcagcaattttttttctggccgtgttttctggaaccaatacaacatgaccttgcaacagtggtgtcagttgcttctgtaatgccttatgacaccacgatatttccaaatgctgtgttgtaagtgctttacagacaaaccgaggtccagctttctaaaacattgagttcaatgacatcacttcatccattatttaagaaagcgagggtcttcaaatcaggaggatacaattgtatcaccaagtcaggcacacagtttcaaggtgactttgttctgatctgattgttaatgcaatctgtaaagaggcaactatgagttagggattgtttgatgccttgaatgtcgtatattcatattccatcatttttgtgggcacttgtatatacattgatgattaattgtattgttagataattgtgcattttaagattaaatgaattcctaaagcaaatcgttacataaacaatgtataaagcacacataacaaataaaggcatgtcttagtagattaaac

SEQ ID NO: 48671 - DNA, 2142 bp, Zea Mays
caagaaacctccctaaagataagaaggccacatctttgttcaagtccatttggtcaaggaactaaacaggaaaggaaacaatttttgtgatgtttctgctcataacagagaaattctgtatgattctgacaactcgatgctatggaacacactaagcggacttgaagtagcagatagctggaggtccttggagaattttacgatgttcaagaattcaaatggtgaaacagatacaattaggttagctgtcagagttgaagacaccggcataggaataacaaaagatgctcaaatgcgtatttttacacctttcatgcaagctgacagttccacctcacgaacatatggtggaactggaattggcttgagtattacaaaacgtttagttgaattgatgggtggagaaatagggtttactagtaaatcaggagttggtagtacattttcttttactgccattttcaaggagaacagaggatgtcctggagatatgaaaagatactattctgaacctactccgttggattttcaaggaatgagggctcttattattgatggaaggagtgcacgtgcagaggttactatgtaccatcttcgtagacttggaatacagtgcagtcttgttgccacatctgaatctgaatctgcatcttcagctttgatgaaagcctgcacctcaagcaaaaacaatccggacatggtccttgttgatacagaagcttggggtaaaggttcaggtttggcattctatcatcgttttgtagattgtcaactaaagggcgcacacaagttttctcagcccatgccaaagactattcttttgggaagctcaataagccctgttgaatctgattatttaagattgacaggatttggtgattgcataaggaaacccctccgtcttagtactattgttgcctgtcttcgcaaaaccttaggggttggggttacaaggcagcagagtagagaccaatctttggttcttcaaagtgtactaactggaaaacagattctggttgtggatgataatgcagtcaaccgtaaagttgcagctggttctttgaagaaatatggatctaaagttacatgtgttgatagtgggagtgatgcaattgatatgctcaagccacctcacacatttgatgcttgcttcatggatgttcagatgcccgagatggacgggtttgaagctacaagattaatccggtccatagagaaaaaaataaacgatatgatcatgatgggtgaaatatccgctaataattatggaaataaggcccattggcatgtaccaatattagctatgacggcagatgtaatccaagcgacttttgaaaaatgtatgcagtgtggaatggatggatatgtgtcaaagccatttgaagaacagcagctctactttgctgttgctcatttcttagagactgatgaaacagaataacaaatccaacttcgtaggagattgatttgccgcaacactgtttcaacatctgccaaaagaccatctgttcaacaggttctgaaaaacagcgatcggcagcatatttggaaacaaaatacattggactcccactgaccagaagaaagaagataagatagtagggggtacaaaatgtttggtctggtttccgcagcaattttttttctggccgtgttttctggaaccaatacaacatgaccttgcaacagtggtgtcagttgcttctgtaatgccttatgacaccacgatatttccaaatgctgtgttgtaagtgctttacagacaaaccgaggtccagctttctaaaacattgagttcaatgacatcacttcatccattatttaagaaagcgagggtcttcaaatcaggaggatacaattgtatcaccaagtcaggcacacagtttcaaggtgactttgttctgatctgattgttaatgcaatctgtaaagaggcaactatgagttagggattgtttgatgccttgaatgtcgtatattcatattccatcatttttgtgggcacttgtatatacattgatgattaattgtattgttagataattgtgcattttaagattaaatgaattcctaaagcaaatcgttacataaacaatgtataaagcacacataacaaataaaggcatgtcttagtagattaaac

SEQ ID NO: 48672 - DNA, 990 bp, Zea Mays
gttcacatggaagcatgtctttagttttaggtttgaagctacaagattaatccggtccatagagaaaaaaataaacgatatgatcatgatgggtgaaatatccgctaataattatggaaataaggcccattggcatgtaccaatattagctatgacggcagatgtaatccaagcgacttttgaaaaatgtatgcagtgtggaatggatggatatgtgtcaaagccatttgaagaacagcagctctactttgctgttgctcatttcttagagactgatgaaacagaataacaaatccaacttcgtaggagattgatttgccgcaacactgtttcaacatctgccaaaagaccatctgttcaacaggttctgaaaaacagcgatcggcagcatatttggaaacaaaatacattggactcccactgaccagaagaaagaagataagatagtagggggtacaaaatgtttggtctggtttccgcagcaattttttttctggccgtgttttctggaaccaatacaacatgaccttgcaacagtggtgtcagttgcttctgtaatgccttatgacaccacgatatttccaaatgctgtgttgtaagtgctttacagacaaaccgaggtccagctttctaaaacattgagttcaatgacatcacttcatccattatttaagaaagcgagggtcttcaaatcaggaggatacaattgtatcaccaagtcaggcacacagtttcaaggtgactttgttctgatctgattgttaatgcaatctgtaaagaggcaactatgagttagggattgtttgatgccttgaatgtcgtatattcatattccatcatttttgtgggcacttgtatatacattgatgattaattgtattgttagataattgtgcattttaagattaaatgaattcctaaagcaaatcgttacataaacaatgtataaagcacacataacaaataaaggcatgtcttagtagattaaac

SEQ ID NO: 48673 - DNA, 1331 bp, Zea Mays
atggaagcatgtctttagttttaggtttgaagctacaagattaatccggtccatagagaaaaaaataaacgatatgatcatgatgggtgaaatatccgctaataattatggaaataaggcccattggcatgtaccaatattagctatgacggcagatgtaatccaagcgacttttgaaaaatgtatgcagtgtggaatggatggatatgtgtcaaagccatttgaagaacagcagctctactttgctgttgctcatttcttagagactgatgaaacagaataacaaatccaacttcgtaggagattgatttgccgcaacactgtttcaacatctgccaaaagaccatctgttcaacaggttctgaaaaacagcgatcggcagcatatttggtgatttcctctacatgctttttaagagcaagctaatgcaattaaatatttccccatgcagttctacaagcttatgcatttacattctttgtggagcgataaaactttgcttgtatacttgtctgccaaatatctactataacatcttgttatcaagaaagaaacctattgtaacattgacttgcctagctctgaatgcagatgaagcatcaatatttttgaaacaaaaatactaatttgctcattactcattgaatcattgtagaaattgctgatttggtaattttatctttgttttggagcaatggaattgaggtcccagttcttatatatagaacttgctccaggaaacaaaatacattggactcccactgaccagaagaaagaagataagatagtagggggtacaaaatgtttggtctggtttccgcagcaattttttttctggccgtgttttctggaaccaatacaacatgaccttgcaacagtggtgtcagttgcttctgtaatgccttatgacaccacgatatttccaaatgctgtgttgtaagtgctttacagacaaaccgaggtccagctttctaaaacattgagttcaatgacatcacttcatccattatttaagaaagcgagggtcttcaaatcaggaggatacaattgtatcaccaagtcaggcacacagtttcaaggtgactttgttctgatctgattgttaatgcaatctgtaaagaggcaactatgagttagggattgtttgatgccttgaatgtcgtatattcatattccatcatttttgtgggcacttgtatatacattgatgattaattgtattgttagataattgtgcattttaagattaaatgaattcctaaagcaaatcgttacataaacaatgtataaagcacacataacaaataaaggcatgtcttagtagattaaac

SEQ ID NO: 48674 - DNA, 2493 bp, Zea Mays
gggctaaactttagcagggattggaagacctagtccacggtgaccaactgaccatggccagcattcactccactctgctccacgcgagccacgaggtgcgagagtgcgacgcgagagaggcagatatcagtggggcaatataaaataaaacaaaaagaaataaaaactgcatcggcatttattccgttgggcctcgcttccgatgcgccggagctcgcacgcgatgggagcgcaagcgtttcggctgctgctgcttctgctgctcgcggcggcggcggcggaggcgcgcttcgttgtggagaagaacagcctgatggtgacgtcgccgacttcgttgcggggacgacacgacagcgctatagggaacttcggaatcccacagtacggcgggagcatggcgggcgccgtcgtctaccctaaggacaacgccaagcctggcgcgatgcccacgttcctcctcatcgaccgcggtgagtgcttatttgcgaagaaggtttggaatgcacaaaatgctggtgcctctgcagtacttgtagttgatgacaaggatgaaccattgataacaatggatttacctcgtgaagatgacgaggcttcaaagtatatacaaaacataaccattccttctgcattaatagatgaaaaatttggtgaccagttgaagaaggctgttaaagatggggaaatggttaatgttaatcttgattggagggaggctgttccacatccagatgaccgtgttgagtatgagttatggacaaacagcaatgatgaatgcgggcctaaatgtgatatgctgatgaattttcttaaggaatttaaaggagctgcccaactacttgagaaaggtggctatagccaattcacgccccattacattacttggtactgtcctcaagcatttgtgatcagtaaacaatgcaagtctcaatgcataaaccatggaaggtactgtgcacctgatccagagcaagattttagcacaggctacgaaggaaaggatgtggtggtagagaacctcagacagttatgtgtgtttaaagttgcaaacgaaaataagaaaccatgggtctggtgggattatgtgactgattttcacataaggtgtccaatgaaggagaagaagtacaataaaaaatgtgcagaaactgtcatcaaatcactaggtctggatgtgaagaaggtcgataaatgcatgggagacccaaatgctgattctgaccacccgttacttaaaatggaacaagatgctcagattgggaaaggttcaagaggagatgttactatattgcctacacttgttgtgaacaaccggcaatatcgagggaagcttgagaggaaagctgtcctcaaagctatttgtgctggttttgaggaaactacagaaccaaatgtttgcctgagtgatgatatagagacaaatgagtgtctgaatgacaacgggggctgctggcaagacaaatctgctaatgtaacagcctgtagggacaccttccgtggtagagtgtgtgaatgccccactttcaatggcgtacaatttaaaggcgatggctacagcaattgtgaacctgctggaccaggaaaatgcttgataaaccatggaggatgttggcatgaaactcgcaacggaaaaacattctctgcttgccaggaatctggagatgggaaatgcctgtgcccagctggtttccgaggggacggcgttaaaaaatgtgaagacattgatgagtgcaaggagaaaaaagcttgtcagtgtcctgaatgcaactgcaaagatacatggggtggctatgactgcacttgcagtggtgaccttttgtacatcagagagcatgacacctgcataagcaagacagcagttcaggctaaagcagcatgggctgcagtgtggggtatcttgatagttgttgctgttgtggcagcgggaagttatgttgtgtacaaatacagactaaggacatatccagatagtctaatttgcatgaaaaatcacatgtatgatcaactcgatctataatcgaagctatcgtactaccacttaagtacttaatatttgactaatgatgtatccaaaatgtactgatggaatatcttggcgttccaatctccttgagaaaattgacaaaagcacaattgcagacctttattgattgacttgctataaccgtttgtgagttggaaagcgaatgtgttgaccaaagagagcctacggattttggttgaattcgtgcttacttcaatgctagtttatctttgatggccattgaccttttcaccttgggcaatcaaggttattgacatgatcagaagaggattattgtggagaggaagaaatgatgtgatgggaggtcacttcactgccttgtaacttgaaccaaagtgtatcttcctcgtgagcttggtcgacctggcatctctaaccttcagaaccttggatgggtgcatcaagcaaaaatggccatggctgaaaaaaaatcttagtcatccatggac

SEQ ID NO: 48675 - DNA, 1334 bp, Zea Mays
ctttagtgtgctcgctgacacaatagactattttgatttttgaatagtaccaattaccaaaccagccctgactccctgaggtttgacggaggttgggttggatgggtggcccttcctctccccgtcgggagaacgacggcgagggggagtggcgggagatctccggctccggcgacatggaaggagcgcccgaggtccttcgacgagaagaccaggacggcgtgttggcgtaaggcagcggtgctgtcgggacggcacccggaacgctggcggcaggacgccgtgggcaacgtggtctgccgccgtttctggggctgccacggatgcctctgctacgagtacgaccacatcgtccctttctccaaaggaggagaatccactgttgagaactgccagatcctccagactagggtgaaccgttccaaatctgataaagcatgggtagcgcaagcagagatgcagggtttttcctgcgatattatgtttactgataaggagctagatataattgagatggctgtgtacggggacgtcattcgtccagggaagcaatgtcgctgcagaacagtagccgaggtgctcgggcaggtgaagccaacgaatcgcatggctgcatgtgagttaccagacaaaggtgcctcttaaaatgtataattcgaataaattggtttcgaccctcacctgtcagaatacaaccttttgtagcgcagttgattccattcaacagaggaacttgagttctttctcacaagtcataatcttgggaaatggatgcagttgatctgcagcctgtgctcattcatgatatctgctcgtaaacattctgttgatttttttgttgttacatattgattgatggcaacgttatcaatgaattggcccattccaataattgggcttgaaaataactacttcgggtggttcaactcccatggctggtttagcttcagttggttggacctgtttagtaaggccactgtaaggatgtgagctgcaacagcctttgccgaggggtatagaaatgagaaactgaagtttaaatgttgtgttgtgatctgtagcctacatgatgtggtaacttcgaacttctacgcaaccatgatttctaccttaggaggcaaattccttaggagctgctggagaaggtcctcaattccgtatataccataccactagaaaagttgtaatcctacatgagtcagcttcaaattttgcattcctagtgccacttctgtctatacaccgtgaatgtgctgttatgcgccttggcccgtggggggaaaaaatacaattttacctttctcgctcctttgtcccgtcgacggtgaactgac

SEQ ID NO: 48676 - DNA, 1375 bp, Zea Mays
cccaagtgcatccgcattccacccggaaccgcggtctcagcgctcagatggctcagatgtcacccacccgcaacaagtgcgtcctaaccgccatctgagcgcgttcttgtccaccctaacctggtgcctctcacggccgcattcgcaccgcgatgaactacgccgcagccgccactaacgcccccgcggcggcgcccgcggcagcgccggcgtcgggcacagaacacgcccactacccgtattacgctggctattcttatccctacggcgcctatcaccaacctgccccgcccacgtactcctccgccgtggccgccgcctcgtcatcctactactaccccgtccctgccgccgcgtcgtccaccgccgcgcagtacgacccctattcgggttaccagcactacagtcacccggagggaggaggctcggcgggggctggcctggtgggctgctacagcaccgtcggcgaggcgttgcagcaggccgcggtagcatcgacgacgcaggcttgcaccatgcccagtggaatgctcattttgggtatcctgtgccgaaatatgtcttgaggaaacaaatgaagaaaaagccgaagactgtgcaaccagcgccatgtgaggtgtgcaagattcagtgtgatacactagaagttctcctgatccataagcagggaaagaagcacaagaaaaatttggagaaattacaagactcaatcacccgtaaaccaattataaagcccccaagcaatgtcatcggtccaagtatgccacctgttgctgtatccaactgtgtggtgccctctgtacagccgaagaagaagagcagctcagcagcaacccgggaagatctggaggtgaagaagaggcgagtccttgaggctggagcagcgcagggcgaagtaaaaatctgccaagtgtgcaatgttgtagtgaacagccaaaaagtgtacgagttccatattgcggggcagaagcaccaggccttggtacgtaagcagcaaccgctacgttttgtcacatgatgcagagccattttgctcgtcgtctttcgtctggcctcatgcttgtccggaagttcctctggaacgagaactcacaacattcgtatcttcaactttgttagcacatttcctcgtttagtgctcgtgctcctgtactactggtagcgtgccaaaaggttaacaggttttcattggacttttgcctgctggtcataattctgagtgctgaaactgaagactatattgtatgtcgcaagttctttatcagcatggtttggttgtatctagtaaaaaatcatggttggattgtagatcgtcaaagtttgctgttgctataaagcactccttccattctaaattataagttctgttatattt

SEQ ID NO: 48677 - DNA, 413 bp, Zea Mays
cccatatccaaatcgtgcagagcagtcatcccatctaggcgattatcggtcttctcgtgtgcgcagattgtgatatgttcctgagcttcgaggaatcgaagatcaagcgttggcgaccaagtgatctggctcttcgagttctacaaagttgaataccctgagcatctgtttggtgaaggcaagtgttctctgacccattatgtcctatctacttataattcactgtcccgcattacttaattgaaacataaggattgactagctttctatttaccttatccttgattaccttttgggttatcatggttagcctatgctaatgctttaacttaatcaatgaacatgatatgattatttatgatacgatgatgttatcccaatgatgatattgtgatactctaggggactcaggc

SEQ ID NO: 48678 - DNA, 770 bp, Zea Mays
gaaatatttcgtcgtctcgactgtcgactctcgagtatctcaagaaaaaggaaggtcttcgggaattctgttcagcagaatccgagtccactagccctcctcagtcctccccagggatttcgacttccccgagacaccatcgctacgacgagcaagcagagcaccatctcggctgccttaaactgtctctccgccggatactacacccgccgccgcagcgccgaccttgtctcaatcgagcggagcgggcgatcggattggttgcttccttcccccatctcatgttggtggactgagagatggagttttgatttcaaatagcatctagagaactgccactaagtttttaagttagtatataatgggtggctgttgttgctgttcgtcgagaacatctgaagccgatagagcaccaattgatatatatcgtcaacaaaatcttgaggagcatgagccgctgtcttcagcttttgatggatcatctccaccatcttcaattgttgcagtagacacaaatctggatacttccacacctgacacatatcgagcaccacctgcacccttgccttatgatgttgttttggcagtcccaactacccctggtttggagaagctagacaacaagagcaaaactgatgaccaacaagagtccataaatgatcaggagtctttaaaggtggatgagtcatgtaagaaaaatgtcactgaagataaggctgaggaggaggatgtttgtcctatctgccttgaagactgcactgttcgcagag

SEQ ID NO: 48679 - DNA, 1516 bp, Zea Mays
gaaatatttcgtcgtctcgactgtcgactctcgagtatctcaagaaaaaggaaggtcttcgggaattctgttcagcagaatccgagtccactagccctcctcagtcctccccagggatttcgacttccccgagacaccatcgctacgacgagcaagcagagcaccatctcggctgccttaaactgtctctccgccggatactacacccgccgccgcagcgccgaccttgtctcaatcgagcggagcgggcgatcggattggttgcttccttcccccatctcatgttggtggactgagagatggagttttgatttcaaatagcatctagagaactgccactaagtttttaagttagtatataatgggtggctgttgttgctgttcgtcgagaacatctgaagccgatagagcaccaattgatatatattagacacaaatctggatacttccacacctgacacatatcgagcaccacctgcacccttgccttatgatgttgttttggcagtcccaactacccctggtttggagaagctagacaacaagagcaaaactgatgaccaacaagagtccataaatgatcaggagtctttaaaggtggatgagtcatgtaagaaaaatgtcactgaagataaggctgaggaggaggatgtttgtcctatctgccttgaagaatacgatgaagaaaatccccgctctgtaactaagtgtgagcaccatttccatctttgctgcattcttgaatggatggagcgaaaagatacttgcccagtttgtgaccagacaattttggtggatgagatgtccgaatagacttggtaatcctggtggatcatcacttgaagctgtttgttactgaggaagtgcaggcaacaactactacactcttgatattcgtccattctgggtggctctcagagtaatgaattgatggggcaaaaattgaaaggatgaacgacatgaaatgtatttacgccccctcctttaccctgcattctgtgtcatgcttttgctgttcatagcaacaggtggactaggaaactgcttggttgaattatatatagagagagatatgtcggcttgcaggttgattcagttaaaagtgcaaaactatgccatttcgcttttctgaattcagagtttcagacatctgctggttcttccaggaatccagtcagctttttacatggtatattaggtggttgcaggtaaaaatggtctagatggaggtgggggtttctttgtataatccacatgctattcaagcttcctgtatataatatttcctgttttcttcgatttgtctagtcaggcaagtttcagggatatagttttctgttatgctgaatatttgcagatcctcgctgttctgataaaaaacttactgatcatcccaaatctgggccagacaaaacgtctcagggatataatataatacatctgacagctcttgttaaaacatcttcggggcctgctaaaatgttcacattatgttccggctatgaaaacttgcagt

SEQ ID NO: 48680 - DNA, 1615 bp, Zea Mays
gaaatatttcgtcgtctcgactgtcgactctcgagtatctcaagaaaaaggaaggtcttcgggaattctgttcagcagaatccgagtccactagccctcctcagtcctccccagggatttcgacttccccgagacaccatcgctacgacgagcaagcagagcaccatctcggctgccttaaactgtctctccgccggatactacacccgccgccgcagcgccgaccttgtctcaatcgagcggagcgggcgatcggattggttgcttccttcccccatctcatgttggtggactgagagatggagttttgatttcaaatagcatctagagaactgccactaagtttttaagttagtatataatgggtggctgttgttgctgttcgtcgagaacatctgaagccgatagagcaccaattgatatatatcgtcaacaaaatcttgaggagcatgagccgctgtcttcagcttttgatggatcatctccaccatcttcaattgttgcagtagacacaaatctggatacttccacacctgacacatatcgagcaccacctgcacccttgccttatgatgttgttttggcagtcccaactacccctggttttggaaactctatgtaggtttggagaagctagacaacaagagcaaaactgatgaccaacaagagtccataaatgatcaggagtctttaaaggtggatgagtcatgtaagaaaaatgtcactgaagataaggctgaggaggaggatgtttgtcctatctgccttgaagaatacgatgaagaaaatccccgctctgtaactaagtgtgagcaccatttccatctttgctgcattcttgaatggatggagcgaaaagatacttgcccagtttgtgaccagacaattttggtggatgagatgtccgaatagacttggtaatcctggtggatcatcacttgaagctgtttgttactgaggaagtgcaggcaacaactactacactcttgatattcgtccattctgggtggctctcagagtaatgaattgatggggcaaaaattgaaaggatgaacgacatgaaatgtatttacgccccctcctttaccctgcattctgtgtcatgcttttgctgttcatagcaacaggtggactaggaaactgcttggttgaattatatatagagagagatatgtcggcttgcaggttgattcagttaaaagtgcaaaactatgccatttcgcttttctgaattcagagtttcagacatctgctggttcttccaggaatccagtcagctttttacatggtatattaggtggttgcaggtaaaaatggtctagatggaggtgggggtttctttgtataatccacatgctattcaagcttcctgtatataatatttcctgttttcttcgatttgtctagtcaggcaagtttcagggatatagttttctgttatgctgaatatttgcagatcctcgctgttctgataaaaaacttactgatcatcccaaatctgggccagacaaaacgtctcagggatataatataatacatctgacagctcttgttaaaacatcttcggggcctgctaaaatgttcacattatgttccggctatgaaaacttgcagt

SEQ ID NO: 48681 - DNA, 1458 bp, Zea Mays
gaaatatttcgtcgtctcgactgtcgactctcgagtatctcaagaaaaaggaaggtcttcgggaattctgttcagcagaatccgagtccactagccctcctcagtcctccccagggatttcgacttccccgagacaccatcgctacgacgagcaagcagagcaccatctcggctgccttaaactgtctctccgccggatactacacccgccgccgcagcgccgaccttgtctcaatcgagcggagcgggcgatcggattggttgcttccttcccccatctcatgttggtgcgtcaacaaaatcttgaggagcatgagccgctgtcttcagcttttgatggatcatctccaccatcttcaattgttgcagtagacacaaatctggatacttccacacctgacacatatcgagcaccacctgcacccttgccttatgatgttgttttggcagtcccaactacccctggtttggagaagctagacaacaagagcaaaactgatgaccaacaagagtccataaatgatcaggagtctttaaaggtggatgagtcatgtaagaaaaatgtcactgaagataaggctgaggaggaggatgtttgtcctatctgccttgaagaatacgatgaagaaaatccccgctctgtaactaagtgtgagcaccatttccatctttgctgcattcttgaatggatggagcgaaaagatacttgcccagtttgtgaccagacaattttggtggatgagatgtccgaatagacttggtaatcctggtggatcatcacttgaagctgtttgttactgaggaagtgcaggcaacaactactacactcttgatattcgtccattctgggtggctctcagagtaatgaattgatggggcaaaaattgaaaggatgaacgacatgaaatgtatttacgccccctcctttaccctgcattctgtgtcatgcttttgctgttcatagcaacaggtggactaggaaactgcttggttgaattatatatagagagagatatgtcggcttgcaggttgattcagttaaaagtgcaaaactatgccatttcgcttttctgaattcagagtttcagacatctgctggttcttccaggaatccagtcagctttttacatggtatattaggtggttgcaggtaaaaatggtctagatggaggtgggggtttctttgtataatccacatgctattcaagcttcctgtatataatatttcctgttttcttcgatttgtctagtcaggcaagtttcagggatatagttttctgttatgctgaatatttgcagatcctcgctgttctgataaaaaacttactgatcatcccaaatctgggccagacaaaacgtctcagggatataatataatacatctgacagctcttgttaaaacatcttcggggcctgctaaaatgttcacattatgttccggctatgaaaacttgcagt

SEQ ID NO: 48682 - DNA, 1377 bp, Zea Mays
ctggagttgcgtgcttcgtgccgacctgattaattttatggctcttactgttcttgctgctgcctaagtcaggactgagagatggagttttgatttcaaatagcatctagagaactgccactaagtttttaagttagtatataatgggtggctgttgttgctgttcgtcgagaacatctgaagccgatagagcaccaattgatatatatcgtcaacaaaatcttgaggagcatgagccgctgtcttcagcttttgatggatcatctccaccatcttcaattgttgcagtagacacaaatctggatacttccacacctgacacatatcgagcaccacctgcacccttgccttatgatgttgttttggcagtcccaactacccctggtttggagaagctagacaacaagagcaaaactgatgaccaacaagagtccataaatgatcaggagtctttaaaggtggatgagtcatgtaagaaaaatgtcactgaagataaggctgaggaggaggatgtttgtcctatctgccttgaagaatacgatgaagaaaatccccgctctgtaactaagtgtgagcaccatttccatctttgctgcattcttgaatggatggagcgaaaagatacttgcccagtttgtgaccagacaattttggtggatgagatgtccgaatagacttggtaatcctggtggatcatcacttgaagctgtttgttactgaggaagtgcaggcaacaactactacactcttgatattcgtccattctgggtggctctcagagtaatgaattgatggggcaaaaattgaaaggatgaacgacatgaaatgtatttacgccccctcctttaccctgcattctgtgtcatgcttttgctgttcatagcaacaggtggactaggaaactgcttggttgaattatatatagagagagatatgtcggcttgcaggttgattcagttaaaagtgcaaaactatgccatttcgcttttctgaattcagagtttcagacatctgctggttcttccaggaatccagtcagctttttacatggtatattaggtggttgcaggtaaaaatggtctagatggaggtgggggtttctttgtataatccacatgctattcaagcttcctgtatataatatttcctgttttcttcgatttgtctagtcaggcaagtttcagggatatagttttctgttatgctgaatatttgcagatcctcgctgttctgataaaaaacttactgatcatcccaaatctgggccagacaaaacgtctcagggatataatataatacatctgacagctcttgttaaaacatcttcggggcctgctaaaatgttcacattatgttccggctatgaaaacttgcagt

SEQ ID NO: 48683 - DNA, 1381 bp, Zea Mays
ctatgtgctgcttgttatgagagctcagcacatgatgctgtggtttctgctcctaatggtgttgttatctctctaggactgagagatggagttttgatttcaaatagcatctagagaactgccactaagtttttaagttagtatataatgggtggctgttgttgctgttcgtcgagaacatctgaagccgatagagcaccaattgatatatatcgtcaacaaaatcttgaggagcatgagccgctgtcttcagcttttgatggatcatctccaccatcttcaattgttgcagtagacacaaatctggatacttccacacctgacacatatcgagcaccacctgcacccttgccttatgatgttgttttggcagtcccaactacccctggtttggagaagctagacaacaagagcaaaactgatgaccaacaagagtccataaatgatcaggagtctttaaaggtggatgagtcatgtaagaaaaatgtcactgaagataaggctgaggaggaggatgtttgtcctatctgccttgaagaatacgatgaagaaaatccccgctctgtaactaagtgtgagcaccatttccatctttgctgcattcttgaatggatggagcgaaaagatacttgcccagtttgtgaccagacaattttggtggatgagatgtccgaatagacttggtaatcctggtggatcatcacttgaagctgtttgttactgaggaagtgcaggcaacaactactacactcttgatattcgtccattctgggtggctctcagagtaatgaattgatggggcaaaaattgaaaggatgaacgacatgaaatgtatttacgccccctcctttaccctgcattctgtgtcatgcttttgctgttcatagcaacaggtggactaggaaactgcttggttgaattatatatagagagagatatgtcggcttgcaggttgattcagttaaaagtgcaaaactatgccatttcgcttttctgaattcagagtttcagacatctgctggttcttccaggaatccagtcagctttttacatggtatattaggtggttgcaggtaaaaatggtctagatggaggtgggggtttctttgtataatccacatgctattcaagcttcctgtatataatatttcctgttttcttcgatttgtctagtcaggcaagtttcagggatatagttttctgttatgctgaatatttgcagatcctcgctgttctgataaaaaacttactgatcatcccaaatctgggccagacaaaacgtctcagggatataatataatacatctgacagctcttgttaaaacatcttcggggcctgctaaaatgttcacattatgttccggctatgaaaacttgcagt

SEQ ID NO: 48684 - DNA, 1073 bp, Zea Mays
aataaccgagccgaagccaccagcgggacggccgcgtcgccggtggccatgttggcgagccaagagacgctgccttcgctgctgctgccgcccaggagcacgctgccttggcccccgccctcgatgcccaggccacccatcggcatcatcgcgctgtccggggtggcgtccgtgaacgtcgcgcccggtggcatcatggtccccgtcggcatagccggggtcgcgcccggcatcggcgttgcctccggcaccgtcgtcgtcattgtccccggcaccgtcgccggcgtcgcgcccggtgtggtcgtcgacttctggctgcgctcatgtcacgggtacatacaagagcagcgtatccatccggtcagaagttcacgtgctcagtagtacggacaaaatcattttgcacgcaaatgggaaatactactaataacgccccaaaaaaagcatttcgcccatgcgcttttcgtttcgtcccctctgctgtaaatcaaagatataaaaaatttattatgccaagatcttgtacgttgtagccccatgttcctagtctttcctcattctaggaacacaacaacacaggttcagtcactagcttgcattgcgtctacttcaatttctcagagaagaaccagaaatctctgacaatgtaaatcttgtaacaacagtagcctctgaaaaaaataattaatagctgaaaaaaatcttgcagtaaagtcagcaacctctgacagttgacaagaggagttaaaaggacgacagcaggctgtgtggatagattagctggcactggcagagacggtaaaagagctgcggcagatcaaccccaccttcacaagccgaagacccagacaatcttggcagaagcacagtgccaaatcatgatccatcacacacgcacctctctccacaaattgcaacgtgaatgatgagaatgaccaataatatgcaatggtgggagagaagagaagggtgggtgagtgaatcaaaggccggaccttggggtggcgccggggcagaaggtgacggtgtagtctgggccgccgccgcaggtgaatgtggaggtgggatcgtcg

SEQ ID NO: 48685 - DNA, 2237 bp, Zea Mays
cacaaaattcgcattgccatggttcccaaaccaacctcaagaggagactataaataccaagtgccatccgggtcttagatgcacaacacaacgcttatattacttacaacaaaagataagcccacgaatcagtagatcgaggtcccgcccagtccagcagaagcgcacacggagatgtcccagctgagccctgctggccacatggctgcgacgctcctcctcatcctcctggcctccgcagcagcagcagcggtgtcagctgaccaacaggtctctgcctgccagaatgacatagacgcactgtggcgcagctgcaagcagttcgtccagaaggaggggcccaagatgcctccgtccgaggactgctgcaaaaccatcaaggccttagacgcgcacgcgtcctgcatctgcgactacgtcggctccccggacgccaggaataagctagacctggacaaggtgttcttcgttaccaaacagtgcggcgtcaccgtccccaagggctgcggatcaaagcaggactgaagagcggctgaatctgaatggagcaagttggctaacatacgcacggcagctacaaatacttataggaataaataaagttggtcaactgttggtttcatggtgttggagtacaacaactgtactgttcttatcctcatatatgatatatgaactctagttcatcacataatataaatctgtaagagagcccagaaacatagatggctcatgggacagctggagaggcttattttctttctaccatccagtttctgattcaacataaacaaaagcgaataaaaaacatgtaaaaatatgcatattcaaaaccagcatacttacaatttggattttattccacagagagactgattgctcaagtttaaatcagtcaactgtttggtcttcttccataataatttctcaaactacttaaagactgaaattttgacaccaacatgtgggctccagtatgcataattgtattgaacaaatgctgcaaacgcggagaacataatatgcctaccaggataccacttataattgctgattttccttactgcattagaatgctgttctaaatacaactgctataagcaaaacctgtttctataataacttcagacagcattacaaaggaacaagcgcaaccatgatgcgaacaaacagattttttttaaaaaaaaattggaccaatccaattcggatgaacaagtagaacactgaaatacttccagaactttttatttaacgatatttgtccaatcttgagtcttgactagtaaaatatactgctaatatttaaaacaatcacactttcagattcagcaaattaaatacattcacagatacaggacaaccaccaaccgtgcctatatttggcaaacagggacttccaggctggttttgcttacaaacaaatttctaggagttatgcagctataagtctataatttctcattgacgtcgctcaacacaatcaaaaacataacaaaagtgaaatttctgagcaaagttgaattcatgtcataatactgtaaatttggataaatatgatatagaactaatttacaaaactacaactatccagatcattgtaacaaggaaccataactatggtgccgatcatgaaaccacaactactagtacccttggtaacaagaaactacaactgctagaaaaccgtaacagaacaggagcatgcaccctcctgtcagccttagcctaaggttgtctctagtggtgtcctctatatctatattttatagacttctcgaaaagattatctgctctatattttattcctctccaacatcctttatatcttgtcctctatacatcagtcatcaaagacccatattagagacatttttgctctagtttttttacgtatgtatttgtcataccctcaaatgtcataaacatattttagttttgcttaatctgttgtctaaaatataaaaatggatagagaagaagagtctctatatagaggggatggagtgctctatattcagagtaggttttagatgacaccattggaggctatagagaaagaaatcttctctatatttagggtagaggagcatatagagtcttctgttagagacaacttaatactgcagtagcaaccacattagagttgacacactgtttcactacgatttatataaaagctgaagttcctttgcactgagaacacaagtagctgtggttttgtgaacggacaccag

SEQ ID NO: 48686 - DNA, 1523 bp, Zea Mays
caagaacacatcgcctatccagtatccaccgacctagctcatcgcgaccaaagaaaaggacacagcaactcagcaagacccccatcttccatagctctagctactagctactagtttcaggcctgcggctcgtgaacacctcatctttttagccacttttgccaccaccgacgacgaccgatcgatcagctagcagctaggccatcccgcgcgcgtcacgaggaacccacggccggcgtcgccattgttgtcgctgtaacttgcaagctttccctagcatcggcccttttccccttccttttccctcgctcgtcctcgtgctagctgtgtataaaagcgcgtcgctagcgcgctcatggagcagcagcagcatcaggaggtgaggaggaacaggaaaggcgtgctgcaggtgcaggacggctctgagatccgggctctcgtggagaacaaggcggagttcgctaggttcgtcgacgacaggttccggaagctcgacgccgatggcgacgggaggctgtcggtgaaagagctccagccggccgtcgctgacatcggtgccgccatcgggctgccggccagagggtcgtcgccgcaggcggaccacatctacgcggaggtcatggagaacgtcgtggagcccgcgttccaagagctgcctgctagtgctacccagcagctcgacctcgaccagcctgttccctcccaggaagcctttctccaggaattcaggagacttttgggcgccatcaccctgagactgcgacagcaccctgtgatcgtcgcccataccgagaacaacttcgacgggagtggcgtcaggaggctactgtcgaacaagttcgagttcgacaagctgctggactctgtgtggagagaggtcccgaaagaacgcaaggacaagcaggcgtcgaaagagtacctccggatcgcgctcgacaggatcgccgattcggcgggcctgccgcctctgggggccgtcggtcaggtggatgccgtggtgaacgaggcgttcaagatggcgaaagccgacgacctcagggcggtggacgaggcggagttcaagaagctgctgaccgaggttcttggggccgtcatgctgcagctggacgccagccccgtcgctgtctccaccaacaccgtcgtccacgagcccatgtgcacctcctcctcctcctccgcgctgctgtcgcccacgccgctgtctccgatggtgtcctctcctgctagtgaataggagaagacttgacaactgagtgaggagatgacgatggagatggatcacaccggcccgtcacgctcagtttttctttttctgtgtcaccgggtactaataacatgttaggaacttgtgggtttttatgtcgcttataacttctcgtcgaaataaggcttttctaagcttttgagtagttgtgaacattttaagcaatcgtgaacagatggtggttgatatgtgtccagtatggttttttaattgtgaacatgtggtggttgattaattatgaacactacttaaacaacat

SEQ ID NO: 48687 - DNA, 3657 bp, Zea Mays
aaaactcgtacaaaaatttgagacaaacaggtgatgaagatcctgctgtgaacatcctgttgttattgtttgagagaaacggaagaaaaagaaaaaaaatagagagtaattaaaccccgtcggacccaaacctctgaaagccccaaaacctaaacctagcttttcgtcagtacaacgcctccgccgctccttccattagctcagacatggttctcggcctctacaccttcgccgacatcgacgccgacggagcaccccgcctcgaggttgccgatggcgaggagttcgtccgtgtcgatcgcgttgtcgagcttgccctcggtccccgggtgctgaaggcccctggaaccctttacctcaccaccaggagggtgatttgggtcagcgatggcggcgagggctacgctgtggacttcgttgccatctcgctccacgccgtgtcgcgtgatcccgaggcgtatccatacccctgcatctacacacagattggagtgatgcacgtgaaggtaagtgttctaaatggttctggttagtcataatgctactagtttatttcacatgagagttcgtttatgctgattttggatgttatttgatattacaattgtgatgttcatttggcaagtacgttttactcgtagctcttttgttttgtctattgtattttatttttgaacattgtagttctagcttttgatttgcacttcttgcatagaaggaagtttcaatatgttgtaatgtctatcttttctttctataaaacataagtttttggtttctataaataaaagggctgactattgtgttaaatgttcacttggtatatggggagccttatagatttgggaggaccattccaattacacgcgagctatttttctttggtccatgtgtaccagtgtattatcatcttttcatgtctttcctctttttgtgatgattcttcgggcctggtgggagtgggactacttcacactaaaattccaccttggagaggtaactgaggtgcttgccttagaagttggctcaaacttcagcaatgggaggttttgctgagaatgatcgagacggaagctatttctgacgaggagtctgatgtgtcagattctgaaacaaatggagaactcgagctctcaaaagttatggaaatgcgcatcataccttcagatcctggtcaattggatgaactctttgaagcattctgcaattgcgctgagcttaaccctgatcctagtgctgagagtgatgaagaacatggctgggttcatggtgatgagggttatgaagatacggtagatggaagcgacactgagttttcagatgtcaacccaattggtcaaactggtgagcaggatattaaccatgctgtaatcgagctccagatcaatgaccaacgttttgaggacgcggtagatgaggagagtcacaggaacgggaactagggaccatgtgaattggtcgtcgtcgatgcagcatacttgtctgtaaagacttcacttttctcatgttgtcagatcatgtggaccaacttgaatggcaacaatgggggataacgagctttattatatgagttgtgcctgtaccatacgtgcatgaccatctatggtcatatgactactgactagtattttagagggcgagggggtgcaaatcgatacccggccttgtgcaacacattttccttagcaaaagaaaaaaaatgttgtttggccaagtaaaattgtagtgttgaagggtcgaaagtggagaggtgtaaagttggttagttccacatcgcactatttctgtctgagtgtctctcttgaaacagtaaacaacaccactcctgtctggttttgtaaacaacattccagcagtagcttgcaaactgttcaataatcactgtagctagatgtctgaaaacagtacatccgacatgtaaatacattgtgttatcagaaaggcactgcttggcgcttcctgcctgacaagctatgtccttgaggcatgtctgcggtgcaatctggaacgaagttgatgaatgaagtataagggggtaaccttgatttccacgtcagcagactaaattctcctttgggcctaacagaaggatctaacagtagctctccaaacgccacctttggtagatcattgacaactcgagagtaagccttgctactacctctactagtacaaggtatcatgcgaaggtgaccaataccagcagggctcggaacgacgaactccgttatgtccacctcacggccttgctccaggagcagcttcggttgctgcccgtaggcgcagaggttcttctcgaccactcttctgcacctgttcagtatcgacagccagacctgagcgttcaggtttcttctcagcacatcagccaacgcgttcgctgcgacaagcgatccaccctggtgcagttccttagcaaacccctctgctatgtgcactagccttggatgctcgcccgggtccgcggcttggaacgccaggttcttgaacaggtaccagaactcctcgtacgacagagcgccgagaaagattggtggtcttgctgacccaccaaaccttgctactgatcttgcatgcttggctatgacgatcaccttgcttcctgcactagccgctctcgccacgaacgagtagaacgcgtcccattcctcgtcgcctacgtccgagacaagctcgacaactacgagtgacgatacccccagcagcatggccttctcatggtggacggtgttcaggaggaagtcgtctcctctcagatggagcaccgaagcgaatttcgagcgcaccctgtcgtcggcgcacacgtgggcgaccagagttttcttcccggccgcaagagcgccgacgattgggaggacgggaggcggtgcgccgtcgtcgcctggctgctgctgcagcaagaagttgaggagcctttgcttctcggcgtgtcggccaaacatgatactcccgaggtagaggtacgcgtcgtagggccgacgggacaggcgctcacacccgcacagaagcgcgacgaactctgcgctgttcgccatggctgtttccaggttctccagtgcggcctgtgccttgccctcccctttcgccgccggagcaagaactgcgcggcgacgtttgagacgtcgagtggcggaagaggagcaggctggtgagtcgtcgtcgctaacctcgtcgtcgagctggaatctcagggcgtccagcgcatggtagccctggtacatggcctccgacagcaccttcagctgcgtcagcatcccggagttggtgatgtgccgtgcatctgcctcctcgacgacggtgtgagacctcatcaggaggtgccgcagcctctcccgcttctcctccgatctttcgtagcttgaggagcagcatctgttcaacgcgaaggagatgaaccggctgacgagctcacctgcaaccgcagctatggcagattccatggactactcacttcgtagaggattgaagaatggacaggtaacctcatacatagctagctagctgtgatgtgaatggattgaattgtccagaaactggaagcctagctcatatcgatgcatacatttgcttttacaatttggcctccattattcaggtctcctttaccacgcgctctgataatgtgtttgacttgaggttaaaataggatgagtcgag

SEQ ID NO: 48688 - DNA, 869 bp, Zea Mays
cggaagaaaaagaaaaaaaatagagagtaattaaaccccgtcggacccaaacctctgaaagccccaaaacctaaacctagcttttcgtcagtacaacgcctccgccgctccttccattagctcagacatggttctcggcctctacaccttcgccgacatcgacgccgacggagcaccccgcctcgaggttgccgatggcgaggagttcgtccgtgtcgatcgcgttgtcgagcttgccctcggtccccgggtgctgaaggcccctggaaccctttacctcaccaccaggagggtgatttgggtcagcgatggcggcgagggctacgctgtggacttcgttgccatctcgctccacgccgtgtcgcgtgatcccgaggcgtatccatacccctgcatctacacacagattggagtgatgcacgtgaagatcgagacggaagctatttctgacgaggagtctgatgtgtcagattctgaaacaaatggagaactcgagctctcaaaagttatggaaatgcgcatcataccttcagatcctggtcaattggatgaactctttgaagcattctgcaattgcgctgagcttaaccctgatcctagtgctggtaactaatgccacatgcccataattttttatatccttgaactgtagtattttcatgtgttcttagaattggcacttaacagagagtgatgaagaacatggctgggttcatggtgatgagggttatgaagatacggtagatggaagcgacactgagttttcagatgtcaacccaattggtcaaactggtgagcaggatattaaccatgctgtaatcgaggactgtaatatttgaagttcagatatagcctcccttggtagccta

SEQ ID NO: 48689 - DNA, 3574 bp, Zea Mays
cggaagaaaaagaaaaaaaatagagagtaattaaaccccgtcggacccaaacctctgaaagccccaaaacctaaacctagcttttcgtcagtacaacgcctccgccgctccttccattagctcagacatggttctcggcctctacaccttcgccgacatcgacgccgacggagcaccccgcctcgaggttgccgatggcgaggagttcgtccgtgtcgatcgcgttgtcgagcttgccctcggtccccgggtgctgaaggcccctggaaccctttacctcaccaccaggagggtgatttgggtcagcgatggcggcgagggctacgctgtggacttcgttgccatctcgctccacgccgtgtcgcgtgatcccgaggcgtatccatacccctgcatctacacacagattggagtgatgcacgtgaaggtaagtgttctaaatggttctggttagtcataatgctactagtttatttcacatgagagttcgtttatgctgattttggatgttatttgatattacaattgtgatgttcatttggcaagtacgttttactcgtagctcttttgttttgtctattgtattttatttttgaacattgtagttctagcttttgatttgcacttcttgcatagaaggaagtttcaatatgttgtaatgtctatcttttctttctataaaacataagtttttggtttctataaataaaagggctgactattgtgttaaatgttcacttggtatatggggagccttatagatttgggaggaccattccaattacacgcgagctatttttctttggtccatgtgtaccagtgtattatcatcttttcatgtctttcctctttttgtgatgattcttcgggcctggtgggagtgggactacttcacactaaaattccaccttggagaggtaactgaggtgcttgccttagaagttggctcaaacttcagcaatgggaggttttgctgagaatgatcgagacggaagctatttctgacgaggagtctgatgtgtcagattctgaaacaaatggagaactcgagctctcaaaagttatggaaatgcgcatcataccttcagatcctggtcaattggatgaactctttgaagcattctgcaattgcgctgagcttaaccctgatcctagtgctgagagtgatgaagaacatggctgggttcatggtgatgagggttatgaagatacggtagatgcgacactgagttttcagatgtcaacccaattggtcaaactggtgagcaggatattaaccatgctgtaatcgagctccagatcaatgaccaacgttttgaggacgcggtagatgaggagagtcacaggaacgggaactagggaccatgtgaattggtcgtcgtcgatgcagcatacttgtctgtaaagacttcacttttctcatgttgtcagatcatgtggaccaacttgaatggcaacaatgggggataacgagctttattatatgagttgtgcctgtaccatacgtgcatgaccatctatggtcatatgactactgactagtattttagagggcgagggggtgcaaatcgatacccggccttgtgcaacacattttccttagcaaaagaaaaaaaatgttgtttggccaagtaaaattgtagtgttgaagggtcgaaagtggagaggtgtaaagttggttagttccacatcgcactatttctgtctgagtgtctctcttgaaacagtaaacaacaccactcctgtctggttttgtaaacaacattccagcagtagcttgcaaactgttcaataatcactgtagctagatgtctgaaaacagtacatccgacatgtaaatacattgtgttatcagaaaggcactgcttggcgcttcctgcctgacaagctatgtccttgaggcatgtctgcggtgcaatctggaacgaagttgatgaatgaagtataagggggtaaccttgatttccacgtcagcagactaaattctcctttgggcctaacagaaggatctaacagtagctctccaaacgccacctttggtagatcattgacaactcgagagtaagccttgctactacctctactagtacaaggtatcatgcgaaggtgaccaataccagcagggctcggaacgacgaactccgttatgtccacctcacggccttgctccaggagcagcttcggttgctgcccgtaggcgcagaggttcttctcgaccactcttctgcacctgttcagtatcgacagccagacctgagcgttcaggtttcttctcagcacatcagccaacgcgttcgctgcgacaagcgatccaccctggtgcagttccttagcaaacccctctgctatgtgcactagccttggatgctcgcccgggtccgcggcttggaacgccaggttcttgaacaggtaccagaactcctcgtacgacagagcgccgagaaagattggtggtcttgctgacccaccaaaccttgctactgatcttgcatgcttggctatgacgatcaccttgcttcctgcactagccgctctcgccacgaacgagtagaacgcgtcccattcctcgtcgcctacgtccgagacaagctcgacaactacgagtgacgatacccccagcagcatggccttctcatggtggacggtgttcaggaggaagtcgtctcctctcagatggagcaccgaagcgaatttcgagcgcaccctgtcgtcggcgcacacgtgggcgaccagagttttcttcccggccgcaagagcgccgacgattgggaggacgggaggcggtgcgccgtcgtcgcctggctgctgctgcagcaagaagttgaggagcctttgcttctcggcgtgtcggccaaacatgatactcccgaggtagaggtacgcgtcgtagggccgacgggacaggcgctcacacccgcacagaagcgcgacgaactctgcgctgttcgccatggctgtttccaggttctccagtgcggcctgtgccttgccctcccctttcgccgccggagcaagaactgcgcggcgacgtttgagacgtcgagtggcggaagaggagcaggctggtgagtcgtcgtcgctaacctcgtcgtcgagctggaatctcagggcgtccagcgcatggtagccctggtacatggcctccgacagcaccttcagctgcgtcagcatcccggagttggtgatgtgccgtgcatctgcctcctcgacgacggtgtgagacctcatcaggaggtgccgcagcctctcccgcttctcctccgatctttcgtagcttgaggagcagcatctgttcaacgcgaaggagatgaaccggctgacgagctcacctgcaaccgcagctatggcagattccatggactactcacttcgtagaggattgaagaatggacaggtaacctcatacatagctagctagctgtgatgtgaatggattgaattgtccagaaactggaagcctagctcatatcgatgcatacatttgcttttacaatttggcctccattattcaggtctcctttaccacgcgctctgataatgtgtttgacttgaggttaaaataggatgagtcgag

SEQ ID NO: 48690 - DNA, 3546 bp, Zea Mays
cggaagaaaaagaaaaaaaatagagagtaattaaaccccgtcggacccaaacctctgaaagccccaaaacctaaacctagcttttcgtcagtacaacgcctccgccgctccttccattagctcagacatggttctcggcctctacaccttcgccgacatcgacgccgacggagcaccccgcctcgaggttgccgatggcgaggagttcgtccgtgtcgatcgcgttgtcgagcttgccctcggtccccgggtgctgaaggcccctggaaccctttacctcaccaccaggagggtgatttgggtcagcgatggcggcgagggctacgctgtggacttcgttgccatctcgctccacgccgtgtcgcgtgatcccgaggcgtatccatacccctgcatctacacacagattggagtgatgcacgtgaaggtaagtgttctaaatggttctggttagtcataatgctactagtttatttcacatgagagttcgtttatgctgattttggatgttatttgatattacaattgtgatgttcatttggcaagtacgttttactcgtagctcttttgttttgtctattgtattttatttttgaacattgtagttctagcttttgatttgcacttcttgcatagaaggaagtttcaatatgttgtaatgtctatcttttctttctataaaacataagtttttggtttctataaataaaagggctgactattgtgttaaatgttcacttggtatatggggagccttatagatttgggaggaccattccaattacacgcgagctatttttctttggtccatgtgtaccagtgtattatcatcttttcatgtctttcctctttttgtgatgattcttcgggcctggtgggagtgggactacttcacactaaaattccaccttggagaggtaactgaggtgcttgccttagaagttggctcaaacttcagcaatgggaggttttgctgagaatgatcgagacggaagctatttctgacgaggagtctgatgtgtcagattctgaaacaaatggagaactcgagctctcaaaagttatggaaatgcgcatcataccttcagatcctggtcaattggatgaactctttgaagcattctgcaattgcgctgagcttaaccctgatcctagtgctgagagtgatgaagaacatggctgggttcatggtgatgagggttatgaagatacggtagatggaagcgacactgagttttcagatgtcaacccaattggtcaaactgctccagatcaatgaccaacgttttgaggacgcggtagatgaggagagtcacaggaacgggaactagggaccatgtgaattggtcgtcgtcgatgcagcatacttgtctgtaaagacttcacttttctcatgttgtcagatcatgtggaccaacttgaatggcaacaatgggggataacgagctttattatatgagttgtgcctgtaccatacgtgcatgaccatctatggtcatatgactactgactagtattttagagggcgagggggtgcaaatcgatacccggccttgtgcaacacattttccttagcaaaagaaaaaaaatgttgtttggccaagtaaaattgtagtgttgaagggtcgaaagtggagaggtgtaaagttggttagttccacatcgcactatttctgtctgagtgtctctcttgaaacagtaaacaacaccactcctgtctggttttgtaaacaacattccagcagtagcttgcaaactgttcaataatcactgtagctagatgtctgaaaacagtacatccgacatgtaaatacattgtgttatcagaaaggcactgcttggcgcttcctgcctgacaagctatgtccttgaggcatgtctgcggtgcaatctggaacgaagttgatgaatgaagtataagggggtaaccttgatttccacgtcagcagactaaattctcctttgggcctaacagaaggatctaacagtagctctccaaacgccacctttggtagatcattgacaactcgagagtaagccttgctactacctctactagtacaaggtatcatgcgaaggtgaccaataccagcagggctcggaacgacgaactccgttatgtccacctcacggccttgctccaggagcagcttcggttgctgcccgtaggcgcagaggttcttctcgaccactcttctgcacctgttcagtatcgacagccagacctgagcgttcaggtttcttctcagcacatcagccaacgcgttcgctgcgacaagcgatccaccctggtgcagttccttagcaaacccctctgctatgtgcactagccttggatgctcgcccgggtccgcggcttggaacgccaggttcttgaacaggtaccagaactcctcgtacgacagagcgccgagaaagattggtggtcttgctgacccaccaaaccttgctactgatcttgcatgcttggctatgacgatcaccttgcttcctgcactagccgctctcgccacgaacgagtagaacgcgtcccattcctcgtcgcctacgtccgagacaagctcgacaactacgagtgacgatacccccagcagcatggccttctcatggtggacggtgttcaggaggaagtcgtctcctctcagatggagcaccgaagcgaatttcgagcgcaccctgtcgtcggcgcacacgtgggcgaccagagttttcttcccggccgcaagagcgccgacgattgggaggacgggaggcggtgcgccgtcgtcgcctggctgctgctgcagcaagaagttgaggagcctttgcttctcggcgtgtcggccaaacatgatactcccgaggtagaggtacgcgtcgtagggccgacgggacaggcgctcacacccgcacagaagcgcgacgaactctgcgctgttcgccatggctgtttccaggttctccagtgcggcctgtgccttgccctcccctttcgccgccggagcaagaactgcgcggcgacgtttgagacgtcgagtggcggaagaggagcaggctggtgagtcgtcgtcgctaacctcgtcgtcgagctggaatctcagggcgtccagcgcatggtagccctggtacatggcctccgacagcaccttcagctgcgtcagcatcccggagttggtgatgtgccgtgcatctgcctcctcgacgacggtgtgagacctcatcaggaggtgccgcagcctctcccgcttctcctccgatctttcgtagcttgaggagcagcatctgttcaacgcgaaggagatgaaccggctgacgagctcacctgcaaccgcagctatggcagattccatggactactcacttcgtagaggattgaagaatggacaggtaacctcatacatagctagctagctgtgatgtgaatggattgaattgtccagaaactggaagcctagctcatatcgatgcatacatttgcttttacaatttggcctccattattcaggtctcctttaccacgcgctctgataatgtgtttgacttgaggttaaaataggatgagtcgag

SEQ ID NO: 48691 - DNA, 1756 bp, Zea Mays
cgggagtcgagagggcgttcgatggcatgacctcgcgacaggaatataatgtacgagctaattctgttatggataagacatactctattggacgatttgtcactggtttacctcctttctcgaaaaagaagaatgccgagaacaagtggtctctccataaggagggtctgcaaggccgtcagatagccgagaatatgcgggaaaaatacaacaagaaaccatggattttggaagacgaaacaggccaatatcagtatcaaggtcaaatggaaggatcacagtcagctacagctacatattatttgttaatgaggcacggcaaggaatttaatgcatatcctgctggctcttggtttaatttcagtaaaattgcacagtacaaacaattgacactggaggaggctgaagaaaagatgaataagaggaagaccagtgcaactggttatgaacgctggatgatgaaagcagcggcaaatggaccagctgcctttggttcagacatgaagaagcttgaggccacaaatggtggggaaaaagaaagtgctcgtcctaagaaaggaaaaaataatgaagagggtaataattctgataagggtgaggaggatgaagaagaggaagcaacacgcaagaatagacttggactaactaaaaagggcatggatgatgatgaggaaggtggaaaagatctagatttcgatttggatgatgaaattgagaaaggtgatgactgggagcatgaagaaacattcactgacgatgatgaggctgtagacattgatccagaggaacgggcagatttagctcctgaaattcctgctccacctgaaatcaagcaggatgatgaagagaacgaagaagaagggggcctgagcaagtctggcaaggaactaaaaaagttgcttgggcgcgctgctggactaaatgagtcagatgcggatgaggatgaagaagacgaagatcaagaagatgattcatcgccagtgcttgctccaaaacagaaggatcaagttaaagatgaacctgtggatagcagcccatctaaaccagcaccatcaggacatgctcgaggcacacctccggcatccaaatccaagcaaaagagaaaatcaggtgttgatgatgcaaaaacttctagtggtgcagcttcaaagaaagcaaaggatgcgaaagcatcaggcctcaaagaggaggcatcatctttggcaaaacctgcatcaaagacctctgctgcatcaaaaagtgggacaagcgtatcacctgtcacagaggatgaaatcaggagtgttcttcttgcagtggctccagtcaccacacaagatctggtatccagattcaagtctaggcttcgaggtgcagaggacaagaatgcatttgctgaaattctgaagaaaatttcgaagatacagaagacgaacggccacaactacgttgtcctcagagatgacaagaagtaaataaccgaacaaaggcgctgacatcgcaaccgttggctgtactgagataatatgtttatgtaacatgctgccttgaagataaacaagtctgtaacactagaattgtcttctaacccttgtgtacttgaattttattttactattccagattttatttatgcggctttgcactacacacctgttataaatggaaatccattgggagttcatctcgtgaattttggtagattgacataatttctctcgcttaaaataattattagcttatggggaacccagtgcagttgtgaattttgcgttgt

SEQ ID NO: 48692 - DNA, 1751 bp, Zea Mays
gcgttcgatggcatgacctcgcgacaggaatataatgtacgagctaattctgttatggataagacatactctattggacgatttgtcactggtttacctcctttctcgaaaaagaagaatgccgagaacaagtggtctctccataaggagggtctgcaaggccgtcagatagccgagaatatgcgggaaaaatacaacaagaaaccatggattttggaagacgaaacaggccaatatcagtatcaaggtcaaatggaaggatcacagtcagctacagctacatattatttgttaatgaggcacggcaaggaatttaatgcatatcctgctggctcttggtttaatttcagtaaaattgcacagtacaaacaattgacactggaggaggctgaagaaaagatgaataagaggaagaccagtgcaactggttatgaacgctggatgatgaaagcagcggcaaatggaccagctgcctttggttcagacatgaagaagcttgaggccacaaatggtggggaaaaagaaagtgctcgtcctaagaaaggaaaaaataatgaagagggtaataattctgataagggtgaggaggatgaagaagaggaagcaacacgcaagaatagacttggactaactaaaaagggcatggatgatgatgaggaaggtggaaaagatctagatttcgatttggatgatgaaattgagaaaggtgatgactgggagcatgaagaaacattcactgacgatgatgaggctgtagacattgatccagaggaacgggcagatttagctcctgaaattcctgctccacctgaaatcaagcaggatgatgaagagaacgaagaagaagggggcctgagcaagtctggcaaggaactaaaaaagttgcttgggcgcgctgctggactaaatgagtcagatgcggatgaggatgaagaagacgaagatcaagaagatgattcatcgccagtgcttgctccaaaacagaaggatcaagttaaagatgaacctgtggatagcagcccatctaaaccagcaccatcaggacatgctcgaggcacacctccggcatccaaatccaagcaaaagagaaaatcaggtgttgatgatgcaaaaacttctagtggtgcagcttcaaagaaagcaaaggtggaattggatgcgaaagcatcaggcctcaaagaggaggcatcatctttggcaaaacctgcatcaaagacctctgctgcatcaaaaagtgggacaagcgtatcacctgtcacagaggatgaaatcaggagtgttcttcttgcagtggctccagtcaccacacaagatctggtatccagattcaagtctaggcttcgaggtgcagaggacaagaatgcatttgctgaaattctgaagaaaatttcgaagatacagaagacgaacggccacaactacgttgtcctcagagatgacaagaagtaaataaccgaacaaaggcgctgacatcgcaaccgttggctgtactgagataatatgtttatgtaacatgctgccttgaagataaacaagtctgtaacactagaattgtcttctaacccttgtgtacttgaattttattttactattccagattttatttatgcggctttgcactacacacctgttataaatggaaatccattgggagttcatctcgtgaattttggtagattgacataatttctctcgcttaaaataattattagcttatggggaacccagtgcagttgtgaattttgcgttgt

SEQ ID NO: 48693 - DNA, 1872 bp, Zea Mays
gttcatgctaggttcacaattctaaagtgcttaatgatgaattactcaatgctgttgcatgggttcaaaggtgaggcaagtgttgggtctgcctggatgcctaggccgtaggcgttgcctaggcgataatgtgccactgtttcccaaggaatataatgtacgagctaattctgttatggataagacatactctattggacgatttgtcactggtttacctcctttctcgaaaaagaagaatgccgagaacaagtggtctctccataaggagggtctgcaaggccgtcagatagccgagaatatgcgggaaaaatacaacaagaaaccatggattttggaagacgaaacaggccaatatcagtatcaaggtcaaatggaaggatcacagtcagctacagctacatattatttgttaatgaggcacggcaaggaatttaatgcatatcctgctggctcttggtttaatttcagtaaaattgcacagtacaaacaattgacactggaggaggctgaagaaaagatgaataagaggaagaccagtgcaactggttatgaacgctggatgatgaaagcagcggcaaatggaccagctgcctttggttcagacatgaagaagcttgaggccacaaatggtggggaaaaagaaagtgctcgtcctaagaaaggaaaaaataatgaagagggtaataattctgataagggtgaggaggatgaagaagaggaagcaacacgcaagaatagacttggactaactaaaaagggcatggatgatgatgaggaaggtggaaaagatctagatttcgatttggatgatgaaattgagaaaggtgatgactgggagcatgaagaaacattcactgacgatgatgaggctgtagacattgatccagaggaacgggcagatttagctcctgaaattcctgctccacctgaaatcaagcaggatgatgaagagaacgaagaagaagggggcctgagcaagtctggcaaggaactaaaaaagttgcttgggcgcgctgctggactaaatgagtcagatgcggatgaggatgaagaagacgaagatcaagaagatgattcatcgccagtgcttgctccaaaacagaaggatcaagttaaagatgaacctgtggatagcagcccatctaaaccagcaccatcaggacatgctcgaggcacacctccggcatccaaatccaagcaaaagagaaaatcaggtgttgatgatgcaaaaacttctagtggtgcagcttcaaagaaagcaaaggtggaattggatgcgaaagcatcaggcctcaaagaggaggcatcatctttggcaaaacctgcatcaaagacctctgctgcatcaaaaagtgggacaagcgtatcacctgtcacagaggatgaaatcaggagtgttcttcttgcagtggctccagtcaccacacaagatctggtatccagattcaagtctaggcttcgaggtgcagaggacaagaatgcatttgctgaaattctgaagaaaatttcgaagatacagaagacgaacggccacaactacgttgtcctcagagatgacaagaagtaaataaccgaacaaaggcgctgacatcgcaaccgttggctgtactgagataatatgtttatgtaacatgctgccttgaagataaacaagtctgtaacactagaattgtcttctaacccttgtgtacttgaattttattttactattccagattttatttatgcggctttgcactacacacctgttataaatggaaatccattgggagttcatctcgtgaattttggtagattgacataatttctctcgcttaaaataattattagcttatggggaacccagtgcagttgtgaattttgcgttgt

SEQ ID NO: 48694 - DNA, 1610 bp, Zea Mays
cttggttttggccttaaggatccgggatcgaggaggagccgtgacgacggcgaggaaaaatacaacaagaaaccatggattttggaagacgaaacaggccaatatcagtatcaaggtcaaatggaaggatcacagtcagctacagctacatattatttgttaatgaggcacggcaaggaatttaatgcatatcctgctggctcttggtttaatttcagtaaaattgcacagtacaaacaattgacactggaggaggctgaagaaaagatgaataagaggaagaccagtgcaactggttatgaacgctggatgatgaaagcagcggcaaatggaccagctgcctttggttcagacatgaagaagcttgaggccacaaatggtggggaaaaagaaagtgctcgtcctaagaaaggaaaaaataatgaagagggtaataattctgataagggtgaggaggatgaagaagaggaagcaacacgcaagaatagacttggactaactaaaaagggcatggatgatgatgaggaaggtggaaaagatctagatttcgatttggatgatgaaattgagaaaggtgatgactgggagcatgaagaaacattcactgacgatgatgaggctgtagacattgatccagaggaacgggcagatttagctcctgaaattcctgctccacctgaaatcaagcaggatgatgaagagaacgaagaagaagggggcctgagcaagtctggcaaggaactaaaaaagttgcttgggcgcgctgctggactaaatgagtcagatgcggatgaggatgaagaagacgaagatcaagaagatgattcatcgccagtgcttgctccaaaacagaaggatcaagttaaagatgaacctgtggatagcagcccatctaaaccagcaccatcaggacatgctcgaggcacacctccggcatccaaatccaagcaaaagagaaaatcaggtgttgatgatgcaaaaacttctagtggtgcagcttcaaagaaagcaaaggatgcgaaagcatcaggcctcaaagaggaggcatcatctttggcaaaacctgcatcaaagacctctgctgcatcaaaaagtgggacaagcgtatcacctgtcacagaggatgaaatcaggagtgttcttcttgcagtggctccagtcaccacacaagatctggtatccagattcaagtctaggcttcgaggtgcagaggacaagaatgcatttgctgaaattctgaagaaaatttcgaagatacagaagacgaacggccacaactacgttgtcctcagagatgacaagaagtaaataaccgaacaaaggcgctgacatcgcaaccgttggctgtactgagataatatgtttatgtaacatgctgccttgaagataaacaagtctgtaacactagaattgtcttctaacccttgtgtacttgaattttattttactattccagattttatttatgcggctttgcactacacacctgttataaatggaaatccattgggagttcatctcgtgaattttggtagattgacataatttctctcgcttaaaataattattagcttatggggaacccagtgcagttgtgaattttgcgttgt

SEQ ID NO: 48695 - DNA, 1701 bp, Zea Mays
ccacaacaagattttagcttctcatacattgtaacatattgctactggaaaaaagattctatcttcaaaaacaatgaagttgcaggtgtatggcaatatataaattaccatggattcatgtttgtcttaatcttgaatcttgcaggaaaaatacaacaagaaaccatggattttggaagacgaaacaggccaatatcagtatcaaggtcaaatggaaggatcacagtcagctacagctacatattatttgttaatgaggcacggcaaggaatttaatgcatatcctgctggctcttggtttaatttcagtaaaattgcacagtacaaacaattgacactggaggaggctgaagaaaagatgaataagaggaagaccagtgcaactggttatgaacgctggatgatgaaagcagcggcaaatggaccagctgcctttggttcagacatgaagaagcttgaggccacaaatggtggggaaaaagaaagtgctcgtcctaagaaaggaaaaaataatgaagagggtaataattctgataagggtgaggaggatgaagaagaggaagcaacacgcaagaatagacttggactaactaaaaagggcatggatgatgatgaggaaggtggaaaagatctagatttcgatttggatgatgaaattgagaaaggtgatgactgggagcatgaagaaacattcactgacgatgatgaggctgtagacattgatccagaggaacgggcagatttagctcctgaaattcctgctccacctgaaatcaagcaggatgatgaagagaacgaagaagaagggggcctgagcaagtctggcaaggaactaaaaaagttgcttgggcgcgctgctggactaaatgagtcagatgcggatgaggatgaagaagacgaagatcaagaagatgattcatcgccagtgcttgctccaaaacagaaggatcaagttaaagatgaacctgtggatagcagcccatctaaaccagcaccatcaggacatgctcgaggcacacctccggcatccaaatccaagcaaaagagaaaatcaggtgttgatgatgcaaaaacttctagtggtgcagcttcaaagaaagcaaaggatgcgaaagcatcaggcctcaaagaggaggcatcatctttggcaaaacctgcatcaaagacctctgctgcatcaaaaagtgggacaagcgtatcacctgtcacagaggatgaaatcaggagtgttcttcttgcagtggctccagtcaccacacaagatctggtatccagattcaagtctaggcttcgaggtgcagaggacaagaatgcatttgctgaaattctgaagaaaatttcgaagatacagaagacgaacggccacaactacgttgtcctcagagatgacaagaagtaaataaccgaacaaaggcgctgacatcgcaaccgttggctgtactgagataatatgtttatgtaacatgctgccttgaagataaacaagtctgtaacactagaattgtcttctaacccttgtgtacttgaattttattttactattccagattttatttatgcggctttgcactacacacctgttataaatggaaatccattgggagttcatctcgtgaattttggtagattgacataatttctctcgcttaaaataattattagcttatggggaacccagtgcagttgtgaattttgcgttgt

SEQ ID NO: 48696 - DNA, 1645 bp, Zea Mays
caaaaacaatgaagttgcaggtgtatggcaatatataaattaccatggattcatgtttgtcttaatcttgaatcttgcaggaaaaatacaacaagaaaccatggattttggaagacgaaacaggccaatatcagtatcaaggtcaaatggaaggatcacagtcagctacagctacatattatttgttaatgaggcacggcaaggaatttaatgcatatcctgctggctcttggtttaatttcagtaaaattgcacagtacaaacaattgacactggaggaggctgaagaaaagatgaataagaggaagaccagtgcaactggttatgaacgctggatgatgaaagcagcggcaaatggaccagctgcctttggttcagacatgaagaagcttgaggccacaaatggtggggaaaaagaaagtgctcgtcctaagaaaggaaaaaataatgaagagggtaataattctgataagggtgaggaggatgaagaagaggaagcaacacgcaagaatagacttggactaactaaaaagggcatggatgatgatgaggaaggtggaaaagatctagatttcgatttggatgatgaaattgagaaaggtgatgactgggagcatgaagaaacattcactgacgatgatgaggctgtagacattgatccagaggaacgggcagatttagctcctgaaattcctgctccacctgaaatcaagcaggatgatgaagagaacgaagaagaagggggcctgagcaagtctggcaaggaactaaaaaagttgcttgggcgcgctgctggactaaatgagtcagatgcggatgaggatgaagaagacgaagatcaagaagatgattcatcgccagtgcttgctccaaaacagaaggatcaagttaaagatgaacctgtggatagcagcccatctaaaccagcaccatcaggacatgctcgaggcacacctccggcatccaaatccaagcaaaagagaaaatcaggtgttgatgatgcaaaaacttctagtggtgcagcttcaaagaaagcaaaggtggaattggatgcgaaagcatcaggcctcaaagaggaggcatcatctttggcaaaacctgcatcaaagacctctgctgcatcaaaaagtgggacaagcgtatcacctgtcacagaggatgaaatcaggagtgttcttcttgcagtggctccagtcaccacacaagatctggtatccagattcaagtctaggcttcgaggtgcagaggacaagaatgcatttgctgaaattctgaagaaaatttcgaagatacagaagacgaacggccacaactacgttgtcctcagagatgacaagaagtaaataaccgaacaaaggcgctgacatcgcaaccgttggctgtactgagataatatgtttatgtaacatgctgccttgaagataaacaagtctgtaacactagaattgtcttctaacccttgtgtacttgaattttattttactattccagattttatttatgcggctttgcactacacacctgttataaatggaaatccattgggagttcatctcgtgaattttggtagattgacataatttctctcgcttaaaataattattagcttatggggaacccagtgcagttgtgaattttgcgttgt

SEQ ID NO: 48697 - DNA, 1509 bp, Zea Mays
tataaattaccatggattcatgtttgtcttaatcttgaatcttgcaggaaaaatacaacaagaaaccatggattttggaagacgaaacaggccaatatcagtatcaagtaaaattgcacagtacaaacaattgacactggaggaggctgaagaaaagatgaataagaggaagaccagtgcaactggttatgaacgctggatgatgaaagcagcggcaaatggaccagctgcctttggttcagacatgaagaagcttgaggccacaaatggtggggaaaaagaaagtgctcgtcctaagaaaggaaaaaataatgaagagggtaataattctgataagggtgaggaggatgaagaagaggaagcaacacgcaagaatagacttggactaactaaaaagggcatggatgatgatgaggaaggtggaaaagatctagatttcgatttggatgatgaaattgagaaaggtgatgactgggagcatgaagaaacattcactgacgatgatgaggctgtagacattgatccagaggaacgggcagatttagctcctgaaattcctgctccacctgaaatcaagcaggatgatgaagagaacgaagaagaagggggcctgagcaagtctggcaaggaactaaaaaagttgcttgggcgcgctgctggactaaatgagtcagatgcggatgaggatgaagaagacgaagatcaagaagatgattcatcgccagtgcttgctccaaaacagaaggatcaagttaaagatgaacctgtggatagcagcccatctaaaccagcaccatcaggacatgctcgaggcacacctccggcatccaaatccaagcaaaagagaaaatcaggtgttgatgatgcaaaaacttctagtggtgcagcttcaaagaaagcaaaggtggaattggatgcgaaagcatcaggcctcaaagaggaggcatcatctttggcaaaacctgcatcaaagacctctgctgcatcaaaaagtgggacaagcgtatcacctgtcacagaggatgaaatcaggagtgttcttcttgcagtggctccagtcaccacacaagatctggtatccagattcaagtctaggcttcgaggtgcagaggacaagaatgcatttgctgaaattctgaagaaaatttcgaagatacagaagacgaacggccacaactacgttgtcctcagagatgacaagaagtaaataaccgaacaaaggcgctgacatcgcaaccgttggctgtactgagataatatgtttatgtaacatgctgccttgaagataaacaagtctgtaacactagaattgtcttctaacccttgtgtacttgaattttattttactattccagattttatttatgcggctttgcactacacacctgttataaatggaaatccattgggagttcatctcgtgaattttggtagattgacataatttctctcgcttaaaataattattagcttatggggaacccagtgcagttgtgaattttgcgttgt

SEQ ID NO: 48698 - DNA, 1058 bp, Zea Mays
ggatggtaaagttgtgctgcaggtgatgactgggagcatgaagaaacattcactgacgatgatgaggctgtagacattgatccagaggaacgggcagatttagctcctgaaattcctgctccacctgaaatcaagcaggatgatgaagagaacgaagaagaagggggcctgagcaagtctggcaaggaactaaaaaagttgcttgggcgcgctgctggactaaatgagtcagatgcggatgaggatgaagaagacgaagatcaagaagatgattcatcgccagtgcttgctccaaaacagaaggatcaagttaaagatgaacctgtggatagcagcccatctaaaccagcaccatcaggacatgctcgaggcacacctccggcatccaaatccaagcaaaagagaaaatcaggtgttgatgatgcaaaaacttctagtggtgcagcttcaaagaaagcaaaggatgcgaaagcatcaggcctcaaagaggaggcatcatctttggcaaaacctgcatcaaagacctctgctgcatcaaaaagtgggacaagcgtatcacctgtcacagaggatgaaatcaggagtgttcttcttgcagtggctccagtcaccacacaagatctggtatccagattcaagtctaggcttcgaggtgcagaggacaagaatgcatttgctgaaattctgaagaaaatttcgaagatacagaagacgaacggccacaactacgttgtcctcagagatgacaagaagtaaataaccgaacaaaggcgctgacatcgcaaccgttggctgtactgagataatatgtttatgtaacatgctgccttgaagataaacaagtctgtaacactagaattgtcttctaacccttgtgtacttgaattttattttactattccagattttatttatgcggctttgcactacacacctgttataaatggaaatccattgggagttcatctcgtgaattttggtagattgacataatttctctcgcttaaaataattattagcttatggggaacccagtgcagttgtgaattttgcgttgt

SEQ ID NO: 48699 - DNA, 1069 bp, Zea Mays
aagaaaatcccttctctcttgatggccgtaggcaaagccttgcggccgacctccccagcgcctctaaccctagccgtcgccctcaaaccctcgcagccatctgctgaccataacaatctggtatcagagatgtcaagccctccgtccaccaccatccagtcatcggcctccaccacgcggtgcccagacccgccacatcctcatacacaccacctccacctccccgtcgagtccttggaagcagccgcccatgagctcacgcgatccatggaaaccatgcaggagacattggcaaccgcccttcttcctccgcagcagcagccactgcccacagccgccgatatcttatggcatgtcacgtaccagcgccccagcggcatcatgtctacccattcatctgttgcccaatgccatcgtcgcctttccctattccatcatacaccatggctatggggggaccccagtaatgtcttcacctcaaacacagattgcgacatcaggcgcaatcatccctcagggaggcctacccctttacctcatctccatgccaccatcaccatctccaattccatagtacgccctctcatcaacgacggcgccggaaatcacgatggttgtattgacgaggagaacgagggtagatagattgcagaccctctatggttgagcttatcgcttgaactttcccacgtacaatacttccaaggatgtcaatatattgtgtgatagcttcaaattaatgtgattggaatgtgtgatagcttcagattaatgtgattggaatgtgtgattgcttcagaatacattgtatagttgagcttaactttcaacgaaaatgtgggaaataggttcatctgaagtactttgaggtttaagctgtgagacttgtgtgttaatgcccaaggcactcgcactaggagtggtgctacagaaaaatacattgatatgtactactttagttgcacaaataaaaaagtatgaactgtggaagcatatccttttttcgaacaacgcatgagagctgtgtgtcatttcattaagcaaggggagaaaaaacacaacactctgg

SEQ ID NO: 48700 - DNA, 2806 bp, Zea Mays
ctatgtaattgttgtgcactaatgttttgttgaatattttgtgtgtcgttgtaaagcacgggcacatacctaaactactaaattttttgttgattttattaagcatgtttgtaaatattaatagtttcttctcaaatacttcgttcagccgatggttgtaacaaacaattaacaccccttgctcgctctgtccaagaacatggctgtaacaaaagtggcaagaacctgatggaatcatggaaggccgttagaagcttaaaataaatatagatagacacagattttgtatattatagtgaatagatggtgagagactatgcacgagacatgcaaattaacaagactcatacaagcgcgttcgagccccagcctttgcatatcatacacatgctcaggtcttaacatgtttggcttccgagcaaactttctccagatcccaaaaaatataatatccgatcaaatatgtgtcgatgctcatcctaacatactcccgttgcaacgtacgggcacacacctagtatatacataaggacgaggttccatgccctcctactcagcgtatagcaggatgaggaaattgatgatgcgcagcaggaagtagaagacaatgatgtagagccatttgacaccggcccagccccatccaatgcccttaatagcagcaaatgcccagttggcatatacaacaatcagagtggcattctgcaaacaccataaaatgtaaggagacgcggaaagaccacatacaacagtaaggtatggaactagagtcggatgactcagcagctgcgccaccaagaaggcaaaggttagcaagaacctaggacggtacacaaatgaccagttgcgagcgtgcgagaccgtgtaagttaagggccctgattgattgtgctgacttgaaggtacatggcagaggaaagcgtatgaaaatcaccctgggaaattttctcaaggctttcgacatggaacaatttctgtatattagcaaccatgaaaaggatgggcacactacgatgatttctcaaaactttaaataatgctaaaccagccactggcccataccgagaagaagtcagtcttgtacgtagcccagaagaaaaaatgacagtcatcacgaccaaataacttccaactgtcaggttgtgcaggtggttttactatgtccttcgagatagccacaatggtacttattcatgtcgccaggttgatgttgttagtttacctaatatgctgcttgtactgacaatatgaaccgaagaaattaggatcaactacagattttaccctcatcatgaactatagccaaccaaaaggaggcttaccgtcattgaggatggcaatgatctggacggtaaatgttgggaagtcaaacttccatatcagcgcaagaagcataaaaccaagctgttacaacaaagtatgtatgagtcagatatattacatctgttctcgaatatttatcgtctgaccagttcatttttgaactaaaatgcgacaaatataaaaaaatgaagtgagtattatttatctattcagtcaagcgagcgttattttctaaaaattaagcagaagtctatacataccacaatacagatggtaattgattcaacatagatctgcaaacaaaaataaactttgaaaatactgaacatagaaacagaatgctaggagactcagggggcaaagcgaggatttgagattgcggtgacaaatcagattgtgagggctgttagaaggtattttacattatttatatggtgattagctaaaaattttagtagctcctataaaatttgaggagggttagactatcttcaatagactccatatcccattctctatctcactccttatttcaaacttcaatcctgcaaacagtgcaatttacagtgtaaaatagtactttgcacggccgtttacacagcctgctagagatggccttaggtgggacattgccccctccgccccatactagaatcaccctgaggagaccgaaaagaaactgcagtattgacttattgtgtaattcttaaccctttggaaaattgctcgactcatcagcacaactctattaattacactaaggccgggttcatttaggacaatgtcagaagcaccacgggctgcgtcagtagagtctgctattgcaataccaatatccgccttttttaaagttggggcatcatttacaccatcccaagtcatgccacataaatgtttttcatacatgtgttctatcaagcattaacaaaatatgaattagacataagtactgcctatatatgttgaagaactgttgagcctatcaaacaggagtaataaaaaaaaggcaatctgcatagttgtacctggaaagactctagcaaagccatcagccttctcggtcaattcatcaattggcaatgaagcaagtgactcatccttacatttagtacccattcccaaacgacgtgttgtttccttcccaatagcaagttgatcacccttgcaaccttggagagcgtgggccagcgcttagcgtcgacgactgcggtgcagttcggggcagggtgcttccaggtggagtgcttggccagggagacggagggagatggggacagggacagggagaggtgctacggcgtcggatcaggtgaggaggtggcggcgggatgctccatagccggctagggtttggcacaggggataggatggatggatcgctgctccttttgggcgatggcgggtgggggaggccgggagggacgtccccatggctgacccaacatgagacgtgtcttttttcctcacttgtgtgtcatcctcc

SEQ ID NO: 48701 - DNA, 1292 bp, Zea Mays
ccccgtgaccccaccgccatagcctcccccagtccctcttctattgtgaccccgccggcccctccccctcctctcactcgtgtcactgccaccatcgacttctttcctcatctgatcgagatcgtagtgttagaacaaactatatgctataagaagataagataggagatgacatagttgcctcacacaaccttaaggagtagagaagagatgagaccggtgttgagctgcagagctggggcacatgaaggaatgctgggatggaatttggactggccgactggatctttttctgtacgacaaagaaaagctacagtagtgctcatgttgggccttgggccattgacgacgagccttacatcagacccagaactacttcatcccgcgccccctgaagctcgagcacggcagcaccgtccgatcctggatccaacagccgaaacccacccacctggaaaccctagcgccgccacactatataaccttctctcttcgccgtgctccgatttgacacacctcccaaaccctacactcccggcggcggcggcggcggcgcagcagcggcagcagcatccgaagatggtgaagttcctcaagcccggcaaggcagttatcgtgcgcgtgttcgaggagggcacccgcgaccgcccctatggccactgcctcgtcgcaggcctcgccaagtacccaaagaaggtgatccgcaaggactccgccaagaagactgcgaagaagtcgcgcgtcaagtgcttcatcaagctcgtcaacttcactcacctcatgcccacccgctacaccctcgacgtcgatttcaaggatgtcgccaccggtgggcccgacgcactctctacccacgacaagaaggtcgccgcctgcaagacggccaaagcgcgccttgaggagaggttcaagaccggcaagaacaggtggttctttaccaagctccgcttctagatgctcggcctcccgaatagtcctgctttagctgtcgatttgttgtatcggacacactccatctctgttttcgtattaccatgaatatttcgtgtttagtcctggggctctcagagataaatttgctaagatatgccgttgttgtgttacatgttttcgtgataggtctggttaaaattttgttctgttttacggcttgcgggtttcttgttggtgccagacatttgtgatgcatcttgttagtagtgtttcatcaagtatgctcttttgtttctcctgatgatctggttaattatgaaaagtagaaatgtagcataaggtatacaaatatattatgt

SEQ ID NO: 48702 - DNA, 2549 bp, Zea Mays
cctctctatattcttcctaatctatataaatagattttttttataaaaaatatcctctaacaacttatctaaatatagctattttctattttgggttagctagctaaatacagagtgcaaataagatatagaaagactgttgcagactaagaaaaaatatagaaagttattttgatataaatggttctttaaataataatttagagagtggaatttagaaaaacttttggagtgctctaaaagtcaactattctagagtttgtagggacactttagagttggatttgaaaggtcagatttgatgagatggaaggtcgctccggccccggccccggccccacccccagttaggtaataaaagccgtgcccaggcaaaaaaaaaaaaaaatatcgggaaaaagctacagaacggacggaaaattgacgacctctcccgttccggcggccgaccgtgcacgatcgtctgcctgccctgctcacccacttgccgtcgcaccggctccgttccttctgccccactaccgccatcccaaccggcaagcgcgccaccgccttctccaccctcgcccaccttgctgccgcagtcgcccataccgctaccgcgcccacgcccgcctcgagggcccgacgccagaggggctgccctcgatctgaccccacggggtaggatggacaaagggaaatcggtggtggccgagctggcggcgtcgttcagcgatgtccgtgtcacgccgcgccagaaccccaagaccaagagcttcctaccgtcgccctccttctattcttcctcgaagaaaggtaaacctcagaaattggtcagcttgtgccttggcacccttggtcagcatcttgaagatatcatcactgatatttcagaatttgctgccttatttccaccccacataaagttgacaattatgtctattgcaaggaggaggaggctcctgaatgatgaagttttgacttctcttgctgaaagttcctgggaaatcctagatatatctggatctgatgtaactgatgctggtttggctactgtagcgaatgtttgtagtaatttacgagcagttgatattagtcgctgtgaaaaagttactacttctggtgtgtctgagattgtatgccactgcccgtccttggagatattgagatgtggaggctgtccaagaagtgaagtaacggcacggaggtgcttggatctcttgaaacccaaattgaataatcttgaagaggactcatgggaggaacttaatacactagatataggaggtggtgcggaatccttaaaatggcttgtttggccgaagatagatgataactcaaaggagactttagctgctgaatgccctcgtgttactgtcaacccacagccatcgctgtttgacctctcaggatccaaagtcccagttgaagcactggcaagcgtaccgctggaccattccatagttgaggatattgatcccaagacatgggctgtttctgctgctcctcgaagacctgttgctcctcccaatccaaatgctccccctgaaataccgatagcggaaaggttcaggctggcctatgtggagagggaagcaaggctggcacccaagagggccaaacgggaaaggcagcagcggcgccgagctgaaagggactacatgatgaatgacatcgacgcgaggtcgatggcacttgctgctcaagcaagcagaaacctgcgcaagagctgatagcgaactttgcttggcttggcttggcttcttgtttatgctgtttgttgtatgcatatctcaatagttgtcaaacacaatgtaaacatagcagttttgtattgggctatagcagtggcgtttacactttcatgtactactacaaaaaagtctaaatgtgaatacactcggtgcaaggaaagcgtgccttcattgggtcgcgatgaattagattatattcgtatcctgcttgtctgcatatcatattatatcctgaagtgcctactgtcggattagcgtctttggttgtgtgggcgtgtcacctggataggctgagcgcatgcaaaatagaacaagcctaactcatttttagaattaagtactccgtctcaaattaatattcatttttacccttttagtagatttatatattaatgtatatgttctatatatgtttaccttcgttatcattcatataaatatagacatactatattagaacggagggagtatttaataagacttgttgtaacttaacccattgttacaatagctagagccgatcaaactaaaaaaatagcgtcgctgatttttagtttcatttagaaatattatataaaatattagtcgttttaactctttatttatgttatgtttaaatggatgataaatctagacacatatataaaacaaatatattaattattgtatgaatcaactaaaaaggtaaaacgaattttattttaggacgtagagagtgcattaattcttatttttgcttttgcttttatcccctccgtcttagaaagatatttataattagattatgaaatagtaatgttccacatgtgtaag

SEQ ID NO: 48703 - DNA, 2545 bp, Zea Mays
cctctctatattcttcctaatctatataaatagattttttttataaaaaatatcctctaacaacttatctaaatatagctattttctattttgggttagctagctaaatacagagtgcaaataagatatagaaagactgttgcagactaagaaaaaatatagaaagttattttgatataaatggttctttaaataataatttagagagtggaatttagaaaaacttttggagtgctctaaaagtcaactattctagagtttgtagggacactttagagttggatttgaaaggtcagatttgatgagatggaaggtcgctccggccccggccccggccccacccccagttaggtaataaaagccgtgcccaggcaaaaaaaaaaaaaaatatcgggaaaaagctacagaacggacggaaaattgacgacctctcccgttccggcggccgaccgtgcacgatcgtctgcctgccctgctcacccacttgccgtcgcaccggctccgttccttctgccccactaccgccatcccaaccggcaagcgcgccaccgccttctccaccctcgcccaccttgctgccgcagtcgcccataccgctaccgcgcccacgcccgcctcgagggcccgacgccagaggggctgccctcgatctgaccccacggggtaggatggacaaagggaaatcggtggtggccgagctggcggcgtcgttcagcgatgtccgtgtcacgccgcgccagaaccccaagaccaagagcttcctaccgtcgccctccttctattcttcctcgaagaaaggtaaacctcagaaattggtcagcttgtgccttggcacccttggtcagcatcttgaagatatcatcactgatatttcagaatttgctgccttatttccaccccacataaagttgacaattatgtctattgcaaggaggaggaggctcctgaatgatgaagttttgacttctcttgctgaaagttcctgggaaatcctagatatatctggatctgatgtaactgatgctggtttggctactgtagcgaatgtttgtagtaatttacgagcagttgatattagtcgctgtgaaaaagttactacttctggtgtgtctgagattgtatgccactgcccgtccttggagatattgagataggctgtccaagaagtgaagtaacggcacggaggtgcttggatctcttgaaacccaaattgaataatcttgaagaggactcatgggaggaacttaatacactagatataggaggtggtgcggaatccttaaaatggcttgtttggccgaagatagatgataactcaaaggagactttagctgctgaatgccctcgtgttactgtcaacccacagccatcgctgtttgacctctcaggatccaaagtcccagttgaagcactggcaagcgtaccgctggaccattccatagttgaggatattgatcccaagacatgggctgtttctgctgctcctcgaagacctgttgctcctcccaatccaaatgctccccctgaaataccgatagcggaaaggttcaggctggcctatgtggagagggaagcaaggctggcacccaagagggccaaacgggaaaggcagcagcggcgccgagctgaaagggactacatgatgaatgacatcgacgcgaggtcgatggcacttgctgctcaagcaagcagaaacctgcgcaagagctgatagcgaactttgcttggcttggcttggcttcttgtttatgctgtttgttgtatgcatatctcaatagttgtcaaacacaatgtaaacatagcagttttgtattgggctatagcagtggcgtttacactttcatgtactactacaaaaaagtctaaatgtgaatacactcggtgcaaggaaagcgtgccttcattgggtcgcgatgaattagattatattcgtatcctgcttgtctgcatatcatattatatcctgaagtgcctactgtcggattagcgtctttggttgtgtgggcgtgtcacctggataggctgagcgcatgcaaaatagaacaagcctaactcatttttagaattaagtactccgtctcaaattaatattcatttttacccttttagtagatttatatattaatgtatatgttctatatatgtttaccttcgttatcattcatataaatatagacatactatattagaacggagggagtatttaataagacttgttgtaacttaacccattgttacaatagctagagccgatcaaactaaaaaaatagcgtcgctgatttttagtttcatttagaaatattatataaaatattagtcgttttaactctttatttatgttatgtttaaatggatgataaatctagacacatatataaaacaaatatattaattattgtatgaatcaactaaaaaggtaaaacgaattttattttaggacgtagagagtgcattaattcttatttttgcttttgcttttatcccctccgtcttagaaagatatttataattagattatgaaatagtaatgttccacatgtgtaag

SEQ ID NO: 48704 - DNA, 2375 bp, Zea Mays
aaaaaatatagaaagttattttgatataaatggttctttaaataataatttagagagtggaatttagaaaaacttttggagtgctctaaaagtcaactattctagagtttgtagggacactttagagttggatttgaaaggtcagatttgatgagatggaaggtcgctccggccccggccccggccccacccccagttaggtaataaaagccgtgcccaggcaaaaaaaaaaaaaaatatcgggaaaaagctacagaacggacggaaaattgacgacctctcccgttccggcggccgaccgtgcacgatcgtctgcctgccctgctcacccacttgccgtcgcaccggctccgttccttctgccccactaccgccatcccaaccggcaagcgcgccaccgccttctccaccctcgcccaccttgctgccgcagtcgcccataccgctaccgcgcccacgcccgcctcgagggcccgacgccagaggggctgccctcgatctgaccccacggggtaggatggacaaagggaaatcggtggtggccgagctggcggcgtcgttcagcgatgtccgtgtcacgccgcgccagaaccccaagaccaagagcttcctaccgtcgccctccttctattcttcctcgaagaaaggtaaacctcagaaattggtcagcttgtgccttggcacccttggtcagcatcttgaagatatcatcactgatatttcagaatttgctgccttatttccaccccacataaaggaggaggaggctcctgaatgatgaagttttgacttctcttgctgaaagttcctgggaaatcctagatatatctggatctgatgtaactgatgctggtttggctactgtagcgaatgtttgtagtaatttacgagcagttgatattagtcgctgtgaaaaagttactacttctggtgtgtctgagattgtatgccactgcccgtccttggagatattgagatgtggaggctgtccaagaagtgaagtaacggcacggaggtgcttggatctcttgaaacccaaattgaataatcttgaagaggactcatgggaggaacttaatacactagatataggaggtggtgcggaatccttaaaatggcttgtttggccgaagatagatgataactcaaaggagactttagctgctgaatgccctcgtgttactgtcaacccacagccatcgctgtttgacctctcaggatccaaagtcccagttgaagcactggcaagcgtaccgctggaccattccatagttgaggatattgatcccaagacatgggctgtttctgctgctcctcgaagacctgttgctcctcccaatccaaatgctccccctgaaataccgatagcggaaaggttcaggctggcctatgtggagagggaagcaaggctggcacccaagagggccaaacgggaaaggcagcagcggcgccgagctgaaagggactacatgatgaatgacatcgacgcgaggtcgatggcacttgctgctcaagcaagcagaaacctgcgcaagagctgatagcgaactttgcttggcttggcttggcttcttgtttatgctgtttgttgtatgcatatctcaatagttgtcaaacacaatgtaaacatagcagttttgtattgggctatagcagtggcgtttacactttcatgtactactacaaaaaagtctaaatgtgaatacactcggtgcaaggaaagcgtgccttcattgggtcgcgatgaattagattatattcgtatcctgcttgtctgcatatcatattatatcctgaagtgcctactgtcggattagcgtctttggttgtgtgggcgtgtcacctggataggctgagcgcatgcaaaatagaacaagcctaactcatttttagaattaagtactccgtctcaaattaatattcatttttacccttttagtagatttatatattaatgtatatgttctatatatgtttaccttcgttatcattcatataaatatagacatactatattagaacggagggagtatttaataagacttgttgtaacttaacccattgttacaatagctagagccgatcaaactaaaaaaatagcgtcgctgatttttagtttcatttagaaatattatataaaatattagtcgttttaactctttatttatgttatgtttaaatggatgataaatctagacacatatataaaacaaatatattaattattgtatgaatcaactaaaaaggtaaaacgaattttattttaggacgtagagagtgcattaattcttatttttgcttttgcttttatcccctccgtcttagaaagatatttataattagattatgaaatagtaatgttccacatgtgtaag

SEQ ID NO: 48705 - DNA, 2154 bp, Zea Mays
gaacggacggaaaattgacgacctctcccgttccggcggccgaccgtgcacgatcgtctgcctgccctgctcacccacttgccgtcgcaccggctccgttccttctgccccactaccgccatcccaaccggcaagcgcgccaccgccttctccaccctcgcccaccttgctgccgcagtcgcccataccgctaccgcgcccacgcccgcctcgagggcccgacgccagaggggctgccctcgatctgaccccacggggtaggatggacaaagggaaatcggtggtggccgagctggcggcgtcgttcagcgatgtccgtgtcacgccgcgccagaaccccaagaccaagagcttcctaccgtcgccctccttctcgttatctccaaatattgacttcaaaattgtacttcagattcttcctcgaagaaaggtaaacctcagaaattggtcagcttgtgccttggcacccttggtcagcatcttgaagatatcatcactgatatttcagaatttgctgccttatttccaccccacataaaggaggaggaggctcctgaatgatgaagttttgacttctcttgctgaaagttcctgggaaatcctagatatatctggatctgatgtaactgatgctggtttggctactgtagcgaatgtttgtagtaatttacgagcagttgatattagtcgctgtgaaaaagttactacttctggtgtgtctgagattgtatgccactgcccgtccttggagatattgagataggctgtccaagaagtgaagtaacggcacggaggtgcttggatctcttgaaacccaaattgaataatcttgaagaggactcatgggaggaacttaatacactagatataggaggtggtgcggaatccttaaaatggcttgtttggccgaagatagatgataactcaaaggagactttagctgctgaatgccctcgtgttactgtcaacccacagccatcgctgtttgacctctcaggatccaaagtcccagttgaagcactggcaagcgtaccgctggaccattccatagttgaggatattgatcccaagacatgggctgtttctgctgctcctcgaagacctgttgctcctcccaatccaaatgctccccctgaaataccgatagcggaaaggttcaggctggcctatgtggagagggaagcaaggctggcacccaagagggccaaacgggaaaggcagcagcggcgccgagctgaaagggactacatgatgaatgacatcgacgcgaggtcgatggcacttgctgctcaagcaagcagaaacctgcgcaagagctgatagcgaactttgcttggcttggcttggcttcttgtttatgctgtttgttgtatgcatatctcaatagttgtcaaacacaatgtaaacatagcagttttgtattgggctatagcagtggcgtttacactttcatgtactactacaaaaaagtctaaatgtgaatacactcggtgcaaggaaagcgtgccttcattgggtcgcgatgaattagattatattcgtatcctgcttgtctgcatatcatattatatcctgaagtgcctactgtcggattagcgtctttggttgtgtgggcgtgtcacctggataggctgagcgcatgcaaaatagaacaagcctaactcatttttagaattaagtactccgtctcaaattaatattcatttttacccttttagtagatttatatattaatgtatatgttctatatatgtttaccttcgttatcattcatataaatatagacatactatattagaacggagggagtatttaataagacttgttgtaacttaacccattgttacaatagctagagccgatcaaactaaaaaaatagcgtcgctgatttttagtttcatttagaaatattatataaaatattagtcgttttaactctttatttatgttatgtttaaatggatgataaatctagacacatatataaaacaaatatattaattattgtatgaatcaactaaaaaggtaaaacgaattttattttaggacgtagagagtgcattaattcttatttttgcttttgcttttatcccctccgtcttagaaagatatttataattagattatgaaatagtaatgttccacatgtgtaag

SEQ ID NO: 48706 - DNA, 2132 bp, Zea Mays
gaacggacggaaaattgacgacctctcccgttccggcggccgaccgtgcacgatcgtctgcctgccctgctcacccacttgccgtcgcaccggctccgttccttctgccccactaccgccatcccaaccggcaagcgcgccaccgccttctccaccctcgcccaccttgctgccgcagtcgcccataccgctaccgcgcccacgcccgcctcgagggcccgacgccagaggggctgccctcgatctgaccccacggggtaggatggacaaagggaaatcggtggtggccgagctggcggcgtcgttcagcgatgtccgtgtcacgccgcgccagaaccccaagaccaagagcttcctaccgtcgccctccttctattcttcctcgaagaaagttgacaattatgtctattgcaaggaggaggaggctcctgaatgatgaagttttgacttctcttgctgaaagttcctgggaaatcctagatatatctggatctgatgtaactgatgctggtttggctactgtagcgaatgtttgtagtaatttacgagcagttgatattagtcgctgtgaaaaagttactacttctggtgtgtctgagattgtatgccactgcccgtccttggagatattgagatgtggaggctgtccaagaagtgaagtaacggcacggaggtgcttggatctcttgaaacccaaattgaataatcttgaagaggactcatgggaggaacttaatacactagatataggaggtggtgcggaatccttaaaatggcttgtttgggtatgcaagcaagttcacttctctagctatgatttgtggtgtgtttacaattcaccaatacgtatctcgtgtttaatgaatattttccctgttttgcagccgaagatagatgataactcaaaggagactttagctgctgaatgccctcgtgttactgtcaacccacagccatcgctgtttgacctctcaggatccaaagtcccagttgaagcactggcaagcgtaccgctggaccattccatagttgaggatattgatcccaagacatgggctgtttctgctgctcctcgaagacctgttgctcctcccaatccaaatgctccccctgaaataccgatagcggaaaggttcaggctggcctatgtggagagggaagcaaggctggcacccaagagggccaaacgggaaaggcagcagcggcgccgagctgaaagggactacatgatgaatgacatcgacgcgaggtcgatggcacttgctgctcaagcaagcagaaacctgcgcaagagctgatagcgaactttgcttggcttggcttggcttcttgtttatgctgtttgttgtatgcatatctcaatagttgtcaaacacaatgtaaacatagcagttttgtattgggctatagcagtggcgtttacactttcatgtactactacaaaaaagtctaaatgtgaatacactcggtgcaaggaaagcgtgccttcattgggtcgcgatgaattagattatattcgtatcctgcttgtctgcatatcatattatatcctgaagtgcctactgtcggattagcgtctttggttgtgtgggcgtgtcacctggataggctgagcgcatgcaaaatagaacaagcctaactcatttttagaattaagtactccgtctcaaattaatattcatttttacccttttagtagatttatatattaatgtatatgttctatatatgtttaccttcgttatcattcatataaatatagacatactatattagaacggagggagtatttaataagacttgttgtaacttaacccattgttacaatagctagagccgatcaaactaaaaaaatagcgtcgctgatttttagtttcatttagaaatattatataaaatattagtcgttttaactctttatttatgttatgtttaaatggatgataaatctagacacatatataaaacaaatatattaattattgtatgaatcaactaaaaaggtaaaacgaattttattttaggacgtagagagtgcattaattcttatttttgcttttgcttttatcccctccgtcttagaaagatatttataattagattatgaaatagtaatgttccacatgtgtaag

SEQ ID NO: 48707 - DNA, 3486 bp, Zea Mays
gaacggacggaaaattgacgacctctcccgttccggcggccgaccgtgcacgatcgtctgcctgccctgctcacccacttgccgtcgcaccggctccgttccttctgccccactaccgccatcccaaccggcaagcgcgccaccgccttctccaccctcgcccaccttgctgccgcagtcgcccataccgctaccgcgcccacgcccgcctcgagggcccgacgccagaggggctgccctcgatctgaccccacggggtaggatggacaaagggaaatcggtggtggccgagctggcggcgtcgttcagcgatgtccgtgtcacgccgcgccagaaccccaagaccaagagcttcctaccgtcgccctccttctcgttatctccaaatattgacttcaaaattgtacttcagattcttcctcgaagaaaggtaaacctcagaaattggtcagcttgtgccttggcacccttggtcagcatcttgaagatatcatcactgatatttcagaatttgctgccttatttccaccccacataaaggtatctttatgcatcaatatcttttatttggttgtcaatttgcctcagtgtcgaataaaatattcatatattatactccgtctgtctcaatttataattcatttgaaatttttgtaacaagtttgaccggttcgtcttattcttttatttttgcgaaaaatgaaaaattcaaagccgtatctaaagtatattatgtggtaaacgatatcacagtaaaagttaataacaattatgttttttttaataatactaggcagtcaaacttatggtaaaaaagtcaaacgaattataaattggaatggaggaagtataaggttttttattgttagatagagtttactttttaaggtggaagcccatttcattgccgtggtggtgttcacaaactgaaaagagaagttgatgttcttgttagttctaagttcatcggatggctcccaacactgattagtttgtttatgaaatactctcctttcttccagttgacttgtgagttgtaactcttgcttcaaagtacacatatagagggcattcatcccaaagaagtcaccattaacattttttgtttgattgctgttgagtttgcatttaaaagtttggaagtagcatatattagaatatacaatgctcatattaacatggttctctgaacttagctagagctttgctgttcgctagcgaagagccgaagagttgcagttttgggaggctggccagggcattatctacttctttgcccatgagctacttgagaggcatggtcatgttgtttttcttgtaataggtgtgcatgttttgattgaacctctagatcaaggtgccgtggtgtgtggttgtatgggttcttaaccttttctttcttaatataatgatatgttggttcctgcatgtttgaaaaaaatggatagtaacattaatctcagaaaaacataggaatggatagtaaggaactgttaaaacaaatggttgatgtgtgacatgtactaaggctctctagcattatgcatggccttcttgtaccactgttgttagcaagttgacctcaagcttttcgtcagtatttttaaggttttgaagttaccaggtccagtaaatgcaaaacagcaactgttgatttagttcatatactgacatctgatgtctacgtgtacttatgcatgttattgtgagttagtgacaattgagtttatttgttatatgatacagttgacaattatgtctattgcaaggaggaggaggctcctgaatgatgaagttttgacttctcttgctgaaagttcctgggaaatcctagatatatctggatctgatgtaactgatgctggtttggctactgtagcgaatgtttgtagtaatttacgagcagttgatattagtcgctgtgaaaaagttactacttctggtgtgtctgagattgtatgccactgcccgtccttggagatattgagatgtggaggctgtccaagaagtgaagtaacggcacggaggtgcttggatctcttgaaacccaaattgaataatcttgaagaggactcatgggaggaacttaatacactagatataggaggtggtgcggaatccttaaaatggcttgtttgggtatgcaagcaagttcacttctctagctatgatttgtggtgtgtttacaattcaccaatacgtatctcgtgtttaatgaatattttccctgttttgcagccgaagatagatgataactcaaaggagactttagctgctgaatgccctcgtgttactgtcaacccacagccatcgctgtttgacctctcaggatccaaagtcccagttgaagcactggcaagcgtaccgctggaccattccatagttgaggatattgatcccaagacatgggctgtttctgctgctcctcgaagacctgttgctcctcccaatccaaatgctccccctgaaataccgatagcggaaaggttcaggctggcctatgtggagagggaagcaaggctggcacccaagagggccaaacgggaaaggcagcagcggcgccgagctgaaagggactacatgatgaatgacatcgacgcgaggtcgatggcacttgctgctcaagcaagcagaaacctgcgcaagagctgatagcgaactttgcttggcttggcttggcttcttgtttatgctgtttgttgtatgcatatctcaatagttgtcaaacacaatgtaaacatagcagttttgtattgggctatagcagtggcgtttacactttcatgtactactacaaaaaagtctaaatgtgaatacactcggtgcaaggaaagcgtgccttcattgggtcgcgatgaattagattatattcgtatcctgcttgtctgcatatcatattatatcctgaagtgcctactgtcggattagcgtctttggttgtgtgggcgtgtcacctggataggctgagcgcatgcaaaatagaacaagcctaactcatttttagaattaagtactccgtctcaaattaatattcatttttacccttttagtagatttatatattaatgtatatgttctatatatgtttaccttcgttatcattcatataaatatagacatactatattagaacggagggagtatttaataagacttgttgtaacttaacccattgttacaatagctagagccgatcaaactaaaaaaatagcgtcgctgatttttagtttcatttagaaatattatataaaatattagtcgttttaactctttatttatgttatgtttaaatggatgataaatctagacacatatataaaacaaatatattaattattgtatgaatcaactaaaaaggtaaaacgaattttattttaggacgtagagagtgcattaattcttatttttgcttttgcttttatcccctccgtcttagaaagatatttataattagattatgaaatagtaatgttccacatgtgtaag

SEQ ID NO: 48708 - DNA, 2195 bp, Zea Mays
gaacggacggaaaattgacgacctctcccgttccggcggccgaccgtgcacgatcgtctgcctgccctgctcacccacttgccgtcgcaccggctccgttccttctgccccactaccgccatcccaaccggcaagcgcgccaccgccttctccaccctcgcccaccttgctgccgcagtcgcccataccgctaccgcgcccacgcccgcctcgagggcccgacgccagaggggctgccctcgatctgaccccacggggtaggatggacaaagggaaatcggtggtggccgagctggcggcgtcgttcagcgatgtccgtgtcacgccgcgccagaaccccaagaccaagagcttcctaccgtcgccctccttctattcttcctcgaagaaaggtaaacctcagaaattggtcagcttgtgccttggcacccttggtcagcatcttgaagatatcatcactgatatttcagaatttgctgccttatttccaccccacataaagttgacaattatgtctattgcaaggaggaggaggctcctgaatgatgaagttttgacttctcttgctgaaagttcctgggaaatcctagatatatctggatctgatgtaactgatgctggtttggctactgtagcgaatgtttgtagtaatttacgagcagttgatattagtcgctgtgaaaaagttactacttctggtgtgtctgagattgtatgccactgcccgtccttggagatattgagatgtgggtacgacttccaacaatttgtatgcataatcttagggtcaatcagtctcaataggctgtccaagaagtgaagtaacggcacggaggtgcttggatctcttgaaacccaaattgaataatcttgaagaggactcatgggaggaacttaatacactagatataggaggtggtgcggaatccttaaaatggcttgtttggccgaagatagatgataactcaaaggagactttagctgctgaatgccctcgtgttactgtcaacccacagccatcgctgtttgacctctcaggatccaaagtcccagttgaagcactggcaagcgtaccgctggaccattccatagttgaggatattgatcccaagacatgggctgtttctgctgctcctcgaagacctgttgctcctcccaatccaaatgctccccctgaaataccgatagcggaaaggttcaggctggcctatgtggagagggaagcaaggctggcacccaagagggccaaacgggaaaggcagcagcggcgccgagctgaaagggactacatgatgaatgacatcgacgcgaggtcgatggcacttgctgctcaagcaagcagaaacctgcgcaagagctgatagcgaactttgcttggcttggcttggcttcttgtttatgctgtttgttgtatgcatatctcaatagttgtcaaacacaatgtaaacatagcagttttgtattgggctatagcagtggcgtttacactttcatgtactactacaaaaaagtctaaatgtgaatacactcggtgcaaggaaagcgtgccttcattgggtcgcgatgaattagattatattcgtatcctgcttgtctgcatatcatattatatcctgaagtgcctactgtcggattagcgtctttggttgtgtgggcgtgtcacctggataggctgagcgcatgcaaaatagaacaagcctaactcatttttagaattaagtactccgtctcaaattaatattcatttttacccttttagtagatttatatattaatgtatatgttctatatatgtttaccttcgttatcattcatataaatatagacatactatattagaacggagggagtatttaataagacttgttgtaacttaacccattgttacaatagctagagccgatcaaactaaaaaaatagcgtcgctgatttttagtttcatttagaaatattatataaaatattagtcgttttaactctttatttatgttatgtttaaatggatgataaatctagacacatatataaaacaaatatattaattattgtatgaatcaactaaaaaggtaaaacgaattttattttaggacgtagagagtgcattaattcttatttttgcttttgcttttatcccctccgtcttagaaagatatttataattagattatgaaatagtaatgttccacatgtgtaag

SEQ ID NO: 48709 - DNA, 2177 bp, Zea Mays
gaacggacggaaaattgacgacctctcccgttccggcggccgaccgtgcacgatcgtctgcctgccctgctcacccacttgccgtcgcaccggctccgttccttctgccccactaccgccatcccaaccggcaagcgcgccaccgccttctccaccctcgcccaccttgctgccgcagtcgcccataccgctaccgcgcccacgcccgcctcgagggcccgacgccagaggggctgccctcgatctgaccccacggggtaggatggacaaagggaaatcggtggtggccgagctggcggcgtcgttcagcgatgtccgtgtcacgccgcgccagaaccccaagaccaagagcttcctaccgtcgccctccttctcgttatctccaaatattgacttcaaaattgtacttcagattcttcctcgaagaaaggtaaacctcagaaattggtcagcttgtgccttggcacccttggtcagcatcttgaagatatcatcactgatatttcagaatttgctgccttatttccaccccacataaagttgacaattatgtctattgcaaggaggaggaggctcctgaatgatgaagttttgacttctcttgctgaaagttcctgggaaatcctagatatatctggatctgatgtaactgatgctggtttggctactgtagcgaatgtttgtagtaatttacgagcagttgatattagtcgctgtgaaaaagttactacttctggtgtgtctgagattgtatgccactgcccgtccttggagatattgagataggctgtccaagaagtgaagtaacggcacggaggtgcttggatctcttgaaacccaaattgaataatcttgaagaggactcatgggaggaacttaatacactagatataggaggtggtgcggaatccttaaaatggcttgtttggccgaagatagatgataactcaaaggagactttagctgctgaatgccctcgtgttactgtcaacccacagccatcgctgtttgacctctcaggatccaaagtcccagttgaagcactggcaagcgtaccgctggaccattccatagttgaggatattgatcccaagacatgggctgtttctgctgctcctcgaagacctgttgctcctcccaatccaaatgctccccctgaaataccgatagcggaaaggttcaggctggcctatgtggagagggaagcaaggctggcacccaagagggccaaacgggaaaggcagcagcggcgccgagctgaaagggactacatgatgaatgacatcgacgcgaggtcgatggcacttgctgctcaagcaagcagaaacctgcgcaagagctgatagcgaactttgcttggcttggcttggcttcttgtttatgctgtttgttgtatgcatatctcaatagttgtcaaacacaatgtaaacatagcagttttgtattgggctatagcagtggcgtttacactttcatgtactactacaaaaaagtctaaatgtgaatacactcggtgcaaggaaagcgtgccttcattgggtcgcgatgaattagattatattcgtatcctgcttgtctgcatatcatattatatcctgaagtgcctactgtcggattagcgtctttggttgtgtgggcgtgtcacctggataggctgagcgcatgcaaaatagaacaagcctaactcatttttagaattaagtactccgtctcaaattaatattcatttttacccttttagtagatttatatattaatgtatatgttctatatatgtttaccttcgttatcattcatataaatatagacatactatattagaacggagggagtatttaataagacttgttgtaacttaacccattgttacaatagctagagccgatcaaactaaaaaaatagcgtcgctgatttttagtttcatttagaaatattatataaaatattagtcgttttaactctttatttatgttatgtttaaatggatgataaatctagacacatatataaaacaaatatattaattattgtatgaatcaactaaaaaggtaaaacgaattttattttaggacgtagagagtgcattaattcttatttttgcttttgcttttatcccctccgtcttagaaagatatttataattagattatgaaatagtaatgttccacatgtgtaag

SEQ ID NO: 48710 - DNA, 1698 bp, Zea Mays
cttctcgttatctccaaatattgacttcaaaattgtacttcagattcttcctcgaagaaagttgacaattatgtctattgcaaggaggaggaggctcctgaatgatgaagttttgacttctcttgctgaaagttcctgggaaatcctagatatatctggatctgatgtaactgatgctggtttggctactgtagcgaatgtttgtagtaatttacgagcagttgatattagtcgctgtgaaaaagttactacttctggtgtgtctgagattgtatgccactgcccgtccttggagatattgagataggctgtccaagaagtgaagtaacggcacggaggtgcttggatctcttgaaacccaaattgaataatcttgaagaggactcatgggaggaacttaatacactagatataggaggtggtgcggaatccttaaaatggcttgtttggccgaagatagatgataactcaaaggagactttagctgctgaatgccctcgtgttactgtcaacccacagccatcgctgtttgacctctcaggatccaaagtcccagttgaagcactggcaagcgtaccgctggaccattccatagttgaggatattgatcccaagacatgggctgtttctgctgctcctcgaagacctgttgctcctcccaatccaaatgctccccctgaaataccgatagcggaaaggttcaggctggcctatgtggagagggaagcaaggctggcacccaagagggccaaacgggaaaggcagcagcggcgccgagctgaaagggactacatgatgaatgacatcgacgcgaggtcgatggcacttgctgctcaagcaagcagaaacctgcgcaagagctgatagcgaactttgcttggcttggcttggcttcttgtttatgctgtttgttgtatgcatatctcaatagttgtcaaacacaatgtaaacatagcagttttgtattgggctatagcagtggcgtttacactttcatgtactactacaaaaaagtctaaatgtgaatacactcggtgcaaggaaagcgtgccttcattgggtcgcgatgaattagattatattcgtatcctgcttgtctgcatatcatattatatcctgaagtgcctactgtcggattagcgtctttggttgtgtgggcgtgtcacctggataggctgagcgcatgcaaaatagaacaagcctaactcatttttagaattaagtactccgtctcaaattaatattcatttttacccttttagtagatttatatattaatgtatatgttctatatatgtttaccttcgttatcattcatataaatatagacatactatattagaacggagggagtatttaataagacttgttgtaacttaacccattgttacaatagctagagccgatcaaactaaaaaaatagcgtcgctgatttttagtttcatttagaaatattatataaaatattagtcgttttaactctttatttatgttatgtttaaatggatgataaatctagacacatatataaaacaaatatattaattattgtatgaatcaactaaaaaggtaaaacgaattttattttaggacgtagagagtgcattaattcttatttttgcttttgcttttatcccctccgtcttagaaagatatttataattagattatgaaatagtaatgttccacatgtgtaag

SEQ ID NO: 48711 - DNA, 1471 bp, Zea Mays
atgcattcaacggtcctaatcctgcttgcctaaccaaattttatggacttcaatgggatgaaataatggaaaacaggaacacatccctgaatatatcaatgcacgcagaattagtttgatggaaaacagaaacatccaagaatatatacaataaaaagaaagttgatggaaaaattacatcatatcgttaagtttgttccaatgaaggtcatcgagcacaagacaaaatagatcattagtaaaatgtcctagagctgaaactagaactgatggtgaagtccgcatgtgtcttaaaatagagggagagggttatgtagtatatgacacttagaaaagacttcacatttaatggtatcacaaaagaaattttcagaagttagctagtagccaaattggtggatcctttaatccacatttaatggtatcacaaaggaaattttcagaagttagctagtagccaagttggtggatcctttaatctgagctagacgcgccttgatcataaaaactagtcgcagtcgcagaccaaacatgagcgtgagatgacatatggaggatggcatatggagaagttaggagtatgttaaagcattttaaagataaacttgtcaagaaccattatttcaatacactttgctaatggattgtgaagaaaaacttacaaatgtgttttgggttgatgctaaaatgttggttgattatgcaaaatttggtgatgtctatttgactttatgtttcaattttcgattggaaaagcaagtgttgaaggtttcaattttcacgtattgcaaaacaataaaaaaattctgctatattaatacaaagacgcagctgcaaatatttgcagggccattcagtttgaaaataatcagcacaaaaatatgaatcgattcggtagtacaccaagcaaaaaaatggaatctcgtgctgttatttaactcccaactcacagtaaacagagacgaagctgatgacaacacacgctctccgagctttttcagcctccgcgcaactcagagcacttgcgcaaggatagttaaacccggaaccagttaattagactatacaagcaaaccaaaacagttaagaattctgtcaatggcctcagatttacccggagatatcatgcgagagcagcggcaccaagtaggttcttcctgacaagcaggaacttggtgacgacagcagcctcaaccaaatcgggcgacttcatcacagaccattacgatttccaaactaaatctggtgatcagagagaaatggattgaccctgttacgagtatggacgtgcgatgtcatgtgaatgattgaggctcagatacgaatcagctttatcagtcatgaattatcagaagcagaactggcgttttaagctgaattgttgtatcatcactgacagatagttcacatgaacagggatgctgatttttttacgtatagtataaaaacaaaaaaaatgaagtggcttgtg

SEQ ID NO: 48712 - DNA, 169 bp, Zea Mays
gacgctatgaacatctgtatccatttctttgacacagaccaatcacaagattcgtcagggcctgcaacactgaatggcatggtggatctagcacaggcattggggcttccttcttcaaatggtaaaaaatccgacaagcccggggttagcaccgcgcagcaacctatct

SEQ ID NO: 48713 - DNA, 2510 bp, Zea Mays
ccaacgcgcaggcgtactggcgttggcgcgtacagctcatgccactaccccaccccacacccgcacccgccccatgaaatcacgagcgccatttgcaccatgggcagaggcagacacacccccaccccacgcccccctccctcggatccagattatcaccgcacctccctcatttatattcgcttccatccacctgccgccgcagcagatccaccggcacgagaccgaccccgtttcctcgctccttcgtctctcgctgacactgtttgacccctgtcctccaggctcggctccagctaaggtcgagcggcgaggcgacagccctagtgtagcgcggcgcggtaccatagatggggagacgaatggaggccccctcctcgccggcgtccctcgtcgtcgtcctcctcctcggctcgctgctcctgcaggcacgcgccgatgacccctacaggttctacacctggaacgtcacctttggcgacatctacccgctcggcgtcaagcaggaggggatactgatcaacggccagttcccggggccgcagatcgacgccgtcaccaacgacaacatcatcgtcaacgtcttcaacaacctgccggtccccttcctcctctcctggcagggaattcagcagcggaggagctcatggcaggacggcgtgtacggcaccaactgcccgatccctccgggcggcaatttcacttacaacatgcagttcaaggaccagatcgggagctactactacttcccttcccttctgtttcacaaggcagctggcggttacggtgccatcagggttctcagccggccgaggatccctgtcccgtttgacccgcctgccggggatttcaccatattggcgggtgactggttcaagctcaaccacaccgacctgaaaggcattctggacagtggcaatgacctgccgtttcctgacggccttcttatcaatggccaaggttggaatggcaacagattcacggtggaccaagggaaaacgtatcggttccgggtgtcgaacgtgggaatcgcgacctcggtgaacataaggatccaaggccattccatgctgctggtcgaggtggaggggtctcacaccatgcagagcacttacacgtccatcgacgtccatctaggccaatcatactcgttccttgttactgctgatcagccacctgcagactactccatagttgtctccacacgctttaccacccctgtcctcaccaccgctgccatcctccactacagcagctcaaatggtgctgcaagtgtgccgcctcccccggcgcctaccgttgagatcgatttctctctcaaccaggctagatccatccggtggaacctgacagcgagtggaccaaggccaaaccctcagggttcctaccactacggtctcgtcaacaccacaagaaccatcaggctcgccaactcgcgggcaaccatcaacggcaagctgagatacgcagtgaacggcatctccttcgtcccggccgacactcctctcaaggttgctgatttctacagcatcccgggagttttcacgctgggcagcatgcccgacaacccgacgggcggcggcgcttacctccagacgtctgtgatggcggccaacatgcgggactatgttgaggtcgtctttgaaaacgcggagaacttggtgcagtcgtggcacatcgacggctacgcgttctgggtcgtcgggatggatggaggacagtggacaccggctagtcgtcagggctacaacctcagggacgccattgctcggtacacattgcagtcatggacggctatctacatgccgctggacaacgtggggatgtggaacgtgaggtccgagagctgggccaggcagtacctcggccagcagttctacctccgcgtctactcgccggcgaactcgtggcgggacgagaacccgatccccaagaacgcgctgctctgcggccgggcctctggacgccggaccaggcctctctgaagctgaatccctgagcccaagaagaccatgtttgttcggccacgaaggggtggccggaacttgcggggatcaattgaagttgagggaagagatgattggagtgttcagattgctgaactgagttccattttgtggcgctgatgatcgttcagctcatatattatttagcaattgtagctaaaacattaattcccggtcgatttgttgtatgtgaagcttcctcgcttcctcgctcacatcattgatgatgataatattcatagtaaccagattttcctttttcatacactgtcagatttctcatcgatctgaatgagttcaagaaacactgaaacgagcaatacgtgtacagcgcaagtagagatgtaatatggtttggaaaatatccgtccgaattttggattcgaagatgatgaatacttgttcggatggaattttcggatatccggttttttttttctaataacagatacatatattttgtttgaatatcggattcgaatacaatatatctgatatctggat

SEQ ID NO: 48714 - DNA, 1632 bp, Zea Mays
ctcctccacgccacgggtggcgcctccgttccaacccacaaaccgagcggcggccgccgcctcccttttcgtctctgactttttctacaagctcattcttcctcccccgatctcgggagcagccgaagcatgtcctggcggtggactctcgcgcgccgcgtcgccacgctggccgcgatcggtggcggcggtgcccaggcgcagaggctcctgtccacctcgtcagccggcggtggcactggcctcctgggtcggcactacatacccctcgcctcccagattcggagcaaggtagttggttgcagaggagctgctcttgtgagctccagatggttgcatgaggcccaataccaggttcgccaggacggggcttccagggctcagcaagatccatttgaattagtcgccgatgagctatcacttcttgcaaataggttacgatccatggtggctgctgaggtccccaaactggcatcagcagctgagtactttttcaaggtgggagcagagggaaaaagattccgacctacggttttgttgctcatggcatcagctctgaaatttcctttgtcagagtcaacagaaggaagagttctcagtatattggcagataaactccgcacaaggcaacagaacattgctgagataactgaaatgattcatgtcgcaagccttctgcatgatgatgttcttgatgatgctgatactaggcgtggtgtcagttcattgaatctcatcatggggaacaagagactgtaaaaagcaaggaaggagctatatatgagaccgaatacaacaagggcacatgcatagacatttaacacagtgaactggtgtgcattcatgctctagcaggtaaataaaaacttcattgggttccaggttaatatgaagttaggatatttggaaagcaaactcttttttataaggattaaattagttggcactctcatcttgaagttacagaataacaggagcaccattttttttgttaaggcagcagcgttaagatatgttctcaaaactgctttctttgtggttctctttctaaactggagagctttctacagttgagattgtctgacaacagtattcatcgaatgttctgtctctagctttctgtgctggctggtgatttccttctgtctagagcatgtgtggcccttgcagcacttgggaacacagaggtggtttctctaatggcaactgctgtagaacatctagttactggtgaaactatgcagatctcaacaagcagagagcaacggcgaagcatggagtactacctgcagaagacatactacaaaacggcatcattgatatcaaatagttgcaaggctgttgctattcttgcagggcacacaactgaggtctcggtgcttgcatatgaatatggtcgaaacctgggtctagccttccagttaattgatgatgttcttgatttcaccggcacctctgcatcccttgggaagggttcattgtctgatattcgccacggaattattactgccccgatgctatatgcgatggaggaattcccacaactgcaagaagttgttgaccggggttttgataatcctgcaaatgttgaaattgcatcctaaaaaaggtgtggcgtctgaggaaggaata

SEQ ID NO: 48715 - DNA, 2018 bp, Zea Mays
ctcctccacgccacgggtggcgcctccgttccaacccacaaaccgagcggcggccgccgcctcccttttcgtctctgactttttctacaagctcattcttcctcccccgatctcgggagcagccgaagcatgtcctggcggtggactctcgcgcgccgcgtcgccacgctggccgcgatcggtggcggcggtgcccaggcgcagaggctcctgtccacctcgtcagccggcggtggcactggcctcctgggtcggcactacatacccctcgcctcccagattcggagcaaggtagttggttgcagaggagctgctcttgtgagctccagatggttgcatgaggcccaataccaggttcgccaggacggggcttccagggctcagcaagatccatttgaattagtcgccgatgagctatcacttcttgcaaataggttacgatccatggtggctgctgaggtccccaaactggcatcagcagctgagtactttttcaaggtgggagcagagggaaaaagattccgacctacggttttgttgctcatggcatcagctctgaaatttcctttgtcagagtcaacagaaggaagagttctcagtatattggcagataaactccgcacaaggcaacagaacattgctgagataactgaaatgattcatgtcgcaagccttctgcatgatgatgttcttgatgatgctgatactaggcgtggtgtcagttcattgaatctcatcatggggaacaagagactgtaaaaagcaaggaaggagctatatatgagaccgaatacaacaagggcacatgcatagacatttaacacagtgaactggtgtgcattcatgctctagcagttacagaataacaggagcaccattttttttgttaaggcagcagcgttaagatatgttctcaaaactgctttctttgtggttctctttctaaactggagagctttctacagttgagattgtctgacaacagtattcatcgaatgttctgtctctagctttctgtgctggctggtgatttccttctgtctagagcatgtgtggcccttgcagcacttgggaacacagaggtggtttctctaatggcaactgctgtagaacatctagttactggtgaaactatgcagatctcaacaagcagagagcaacggcgaagcatggagtactacctgcagaagacatactacaaaacggcatcattgatatcaaatagttgcaaggctgttgctattcttgcagggcacacaactgaggtctcggtgcttgcatatgaatatggtcgaaacctgggtctagccttccagttaattgatgatgttcttgatttcaccggcacctctgcatcccttgggaagggttcattgtctgatattcgccacggaattattactgccccgatgctatatgcgatggaggaattcccacaactgcaagaagttgttgaccggggttttgataatcctgcaaatgttgaaattgcccttgactatctccagaagagccgtgggattgaaaagacaaaagagcttgcacgagaacatgctgatcgtgcagtcaaggctatagaatctctacctgatagcgacgacgaggatgttctgacttcaaggcgtgctcttattgatatcacagaaagagtcatcacacggacaaaataggaaggtgttcggcgtccataagccaaaaccccaagttttgtgtatcattgctgaaatttaggattaagaaatggccctgcatttctgggaagcttctagaggttttggctgcatgtggcaacaaaatatatgtcaccgattgcaatggcaccagatatcgtgtagccatataagtgtgggagcattgtacccaatatacactcccgtaaagactaagatagtactaccataaaatatctgttaaccgttcctcttcaaattttgactcttcaaattgatggttgtttctcgtgaacacgtgtaaacttggttccgtgtgcaaattgaaaccaatgtattcaatctccc

SEQ ID NO: 48716 - DNA, 1731 bp, Zea Mays
gttccaacccacaaaccgagcggcggccgccgcctcccttttcgtctctgactttttctacaagctcattcttcctcccccgatctcgggagcagccgaagcatgtcctggcggtggactctcgcgcgccgcgtcgccacgctggccgcgatcggtggcggcggtgcccaggcgcagaggctcctgtccacctcgtcagccggcggtggcactggcctcctgggtcggcactacatacccctcgcctcccagattcggagcaaggtagttggttgcagaggagctgctcttgtgagctccagatggttgcatgaggcccaataccaggttcgccaggacggggcttccagggctcagcaagatccatttgaattagtcgccgatgagctatcacttcttgcaaataggttacgatccatggtggctgctgaggtccccaaactggcatcagcagctgagtactttttcaaggtgggagcagagggaaaaagattccgacctacggttttgttgctcatggcatcagctctgaaatttcctttgtcagagtcaacagaaggaagagttctcagtatattggcagataaactccgcacaaggcaacagaacattgctgagataactgaaatgattcatgtcgcaagccttctgcatgatgatgttcttgatgatgctgatactaggcgtggtgtcagttcattgaatctcatcatggggaacaagctttctgtgctggctggtgatttccttctgtctagagcatgtgtggcccttgcagcacttgggaacacagaggtggtttctctaatggcaactgctgtagaacatctagttactggtgaaactatgcagatctcaacaagcagagagcaacggcgaagcatggagtactacctgcagaagacatactacaaaacggcatcattgatatcaaatagttgcaaggctgttgctattcttgcagggcacacaactgaggtctcggtgcttgcatatgaatatggtcgaaacctgggtctagccttccagttaattgatgatgttcttgatttcaccggcacctctgcatcccttgggaagggttcattgtctgatattcgccacggaattattactgccccgatgctatatgcgatggaggaattcccacaactgcaagaagttgttgaccggggttttgataatcctgcaaatgttgaaattgcccttgactatctccagaagagccgtgggattgaaaagacaaaagagcttgcacgagaacatgctgatcgtgcagtcaaggctatagaatctctacctgatagcgacgacgaggatgttctgacttcaaggcgtgctcttattgatatcacagaaagagtcatcacacggacaaaataggaaggtgttcggcgtccataagccaaaaccccaagttttgtgtatcattgctgaaatttaggattaagaaatggccctgcatttctgggaagcttctagaggttttggctgcatgtggcaacaaaatatatgtcaccgattgcaatggcaccagatatcgtgtagccatataagtgtgggagcattgtacccaatatacactcccgtaaagactaagatagtactaccataaaatatctgttaaccgttcctcttcaaattttgactcttcaaattgatggttgtttctcgtgaacacgtgtaaacttggttccgtgtgcaaattgaaaccaatgtattcaatctccc

SEQ ID NO: 48717 - DNA, 1844 bp, Zea Mays
gttccaacccacaaaccgagcggcggccgccgcctcccttttcgtctctgactttttctacaagctcattcttcctcccccgatctcgggagcagccgaagcatgtcctggcggtggactctcgcgcgccgcgtcgccacgctggccgcgatcggtggcggcggtgcccaggcgcagaggctcctgtccacctcgtcagccggcggtggcactggcctcctgggtcggcactacatacccctcgcctcccagattcggagcaaggtagttggttgcagaggagctgctcttgtgagctccagatggttgcatgaggcccaataccaggttcgccaggacggggcttccagggctcaggaacagcaagatccatttgaattagtcgccgatgagctatcacttcttgcaaataggttacgatccatggtggctgctgaggtccccaaactggcatcagcagctgagtactttttcaaggtgggagcagagggaaaaagattccgacctacggttttgttgctcatggcatcagctctgaaatttcctttgtcagagtcaacagaaggaagagttctcagtatattggcagataaactccgcacaaggcaacagaacattgctgagataactgaaatgattcatgtcgcaagccttctgcatgatgatgttcttgatgatgctgatactaggcgtggtgtcagttcattgaatctcatcatggggaacaagagactgtaaaaagcaaggaaggagctatatatgagaccgaatacaacaagggcacatgcatagacatttaacacagtgaactggtgtgcattcatgctctagcaggtaaataaaaacttcattgggttccaggttaatatgaagttaggatatttggaaagcaaactcttttttataaggattaaattagttggcactctcatcttgaagttacagaataacaggagcaccattttttttgttaaggcagcagcgttaagatatgttctcaaaactgctttctttgtggttctctttctaaactggagagctttctacagttgagattgtctgacaacagtattcatcgaatgttctgtctctagctttctgtgctggctggtgatttccttctgtctagagcatgtgtggcccttgcagcacttgggaacacagaggtggtttctctaatggcaactgctgtagaacatctagttactggtgaaactatgcagatctcaacaagcagagagcaacggcgaagcatggagtactacctgcagaagacatactacaaaacggcatcattgatatcaaatagttgcaaggctgttgctattcttgcagggcacacaactgaggtctcggtgcttgcatatgaatatggtcgaaacctgggtctagccttccagttaattgatgatgttcttgatttcaccggcacctctgcatcccttgggaagggttcattgtctgatattcgccacggaattattactgccccgatgctatatgcgatggaggaattcccacaactgcaagaagttgttgaccggggttttgataatcctgcaaatgttgaaattgcccttgactatctccagaagagccgtgggattgaaaagacaaaagagcttgcacgagaacatgctgatcgtgcagtcaaggctatagaatctctacctgatagcgacgacgaggatgttctgacttcaaggcgtgctcttattgatatcacagaaagagtcatcacacggacaaaataggaaggtgttcggcgtccataagggattaagctgaattgttttctgaaactggtgctttgttttgcctccatctggtgaaagtagttcttc

SEQ ID NO: 48718 - DNA, 2070 bp, Zea Mays
gttccaacccacaaaccgagcggcggccgccgcctcccttttcgtctctgactttttctacaagctcattcttcctcccccgatctcgggagcagccgaagcatgtcctggcggtggactctcgcgcgccgcgtcgccacgctggccgcgatcggtggcggcggtgcccaggcgcagaggctcctgtccacctcgtcagccggcggtggcactggcctcctgggtcggcactacatacccctcgcctcccagattcggagcaaggtagttggttgcagaggagctgctcttgtgagctccagatggttgcatgaggcccaataccaggttcgccaggacggggcttccagggctcagcaagatccatttgaattagtcgccgatgagctatcacttcttgcaaataggttacgatccatggtggctgctgaggtccccaaactggcatcagcagctgagtactttttcaaggtgggagcagagggaaaaagattccgacctacggttttgttgctcatggcatcagctctgaaatttcctttgtcagagtcaacagaaggaagagttctcagtatattggcagataaactccgcacaaggcaacagaacattgctgagataactgaaatgattcatgtcgcaagccttctgcatgatgatgttcttgatgatgctgatactaggcgtggtgtcagttcattgaatctcatcatggggaacaagctttctgtgctggctggtgatttccttctgtctagagcatgtgtggcccttgcagcacttgggaacacagaggtggtttctctaatggcaactgctgtagaacatctagttactggtgaaactatgcagatctcaacaagcagagagcaacggcgaagcatggagtactacctgcagaagacatactacaaaacggcatcattgatatcaaatagttgcaaggctgttgctattcttgcagggcacacaactgaggtctcggtgcttgcatatgaatatggtcgaaacctgggtctagccttccagttaattgatgatgttcttgatttcaccggcacctctgcatcccttgggaagggttcattgtctgatattcgccacggaattattactgccccgatgctatatgcgatggaggaattcccacaactgcaagaagttgttgaccggggttttgataatcctgcaaatgttgaaattgcccttgactatctccagaagagccgtgggattgaaaagacaaaagagcttgcacgagaacatgctgatcgtgcagtcaaggctatagaatctctacctgatagcgacgacgaggatgttctgacttcaaggcgtgctcttattgatatcacagaaagagtcatcacacggacaaaataggaaggtgttcggcgtccataaggtgagtagccaatggattgattgacattaccttttggaggggaggaggcatgtgatgtgggatgattgtgttctgctaccctctttgtagacagagcatcatggtggctgatacatgccctcattcttccaaactcctcactcttcattctcatgcatgttattttttttataaatgcactccctgttccacttcacactactacttttttgtgtgtgttttatttattttggtgctcttgcactgtgtagcactcaaccatgttatcactacgtttagaatttagatgtgctatcgaataattatccatctgaaagctgaacagtctaggaccaatccagtgtccatggaaaaggctactaggtagagacagatcaaagtggttaatcactctagcatcaggcaaaccttttcctttttggaccaaattaacaccaagcatagtgtgtctgcctcaggtttaaacaacactagcaacttgaggcactacaactcaggagcagctcaccattaggctgcaaatcatgtggagtgtgcttaaagctgtaagcttggggtactaaaagtgagctacaacttgtgactgcagatgcccctatacatcgcgcatgtttaaaaactccagcaaaatcttggccagaatcacatggatgtttatttaagtt

SEQ ID NO: 48719 - DNA, 1520 bp, Zea Mays
gttccaacccacaaaccgagcggcggccgccgcctcccttttcgtctctgactttttctacaagctcattcttcctcccccgatctcgggagcagccgaagcatgtcctggcggtggactctcgcgcgccgcgtcgccacgctggccgcgatcggtggcggcggtgcccaggcgcagaggctcctgtccacctcgtcagccggcggtggcactggcctcctgggtcggcactacatacccctcgcctcccagattcggagcaaggtagttggttgcagaggagctgctcttgtgagctccagatggttgcatgaggcccaataccaggttcgccaggacggggcttccagggctcaggaacagcaagatccatttgaattagtcgccgatgagctatcacttcttgcaaataggttacgatccatggtggctgctgaggtccccaaactggcatcagcagctgagtactttttcaaggtgggagcagagggaaaaagattccgacctacggttttgttgctcatggcatcagctctgaaatttcctttgtcagagtcaacagaaggaagagttctcagtatattggcagataaactccgcacaaggcaacagaacattgctgagataactgaaatgattcatgtcgcaagccttctgcatgatgatgttcttgatgatgctgatactaggcgtggtgtcagttcattgaatctcatcatggggaacaagctttctgtgctggctggtgatttccttctgtctagagcatgtgtggcccttgcagcacttgggaacacagaggtggtttctctaatggcaactgctgtagaacatctagttactggtgaaactatgcagatctcaacaagcagagagcaacggcgaagcatggagtactacctgcagaagacatactacaaaacggcatcattgatatcaaatagttgcaaggctgttgctattcttgcagggcacacaactgaggtctcggtgcttgcatatgaatatggtcgaaacctgggtctagccttccagttaattgatgatgttcttgatttcaccggcacctctgcatcccttgggaagggttcattgtctgatattcgccacggaattattactgccccgatgctatatgcgatggaggaattcccacaactgcaagaagttgttgaccggggttttgataatcctgcaaatgttgaaattgcccttgactatctccagaagagccgtgggattgaaaagacaaaagagcttgcacgagaacatgctgatcgtgcagtcaaggctatagaatctctacctgatagcgacgacgaggatgttctgacttcaaggcgtgctcttattgatatcacagaaagagtcatcacacggacaaaataggaaggtgttcggcgtccataagattcaggtaggttgcagcaagaacagtggcggcgtagctcggccggtgccagcagcccagcaggcagcttcttgcagttgcaggggcagcagacacagacaggatcaag

SEQ ID NO: 48720 - DNA, 1514 bp, Zea Mays
gttccaacccacaaaccgagcggcggccgccgcctcccttttcgtctctgactttttctacaagctcattcttcctcccccgatctcgggagcagccgaagcatgtcctggcggtggactctcgcgcgccgcgtcgccacgctggccgcgatcggtggcggcggtgcccaggcgcagaggctcctgtccacctcgtcagccggcggtggcactggcctcctgggtcggcactacatacccctcgcctcccagattcggagcaaggtagttggttgcagaggagctgctcttgtgagctccagatggttgcatgaggcccaataccaggttcgccaggacggggcttccagggctcagcaagatccatttgaattagtcgccgatgagctatcacttcttgcaaataggttacgatccatggtggctgctgaggtccccaaactggcatcagcagctgagtactttttcaaggtgggagcagagggaaaaagattccgacctacggttttgttgctcatggcatcagctctgaaatttcctttgtcagagtcaacagaaggaagagttctcagtatattggcagataaactccgcacaaggcaacagaacattgctgagataactgaaatgattcatgtcgcaagccttctgcatgatgatgttcttgatgatgctgatactaggcgtggtgtcagttcattgaatctcatcatggggaacaagctttctgtgctggctggtgatttccttctgtctagagcatgtgtggcccttgcagcacttgggaacacagaggtggtttctctaatggcaactgctgtagaacatctagttactggtgaaactatgcagatctcaacaagcagagagcaacggcgaagcatggagtactacctgcagaagacatactacaaaacggcatcattgatatcaaatagttgcaaggctgttgctattcttgcagggcacacaactgaggtctcggtgcttgcatatgaatatggtcgaaacctgggtctagccttccagttaattgatgatgttcttgatttcaccggcacctctgcatcccttgggaagggttcattgtctgatattcgccacggaattattactgccccgatgctatatgcgatggaggaattcccacaactgcaagaagttgttgaccggggttttgataatcctgcaaatgttgaaattgcccttgactatctccagaagagccgtgggattgaaaagacaaaagagcttgcacgagaacatgctgatcgtgcagtcaaggctatagaatctctacctgatagcgacgacgaggatgttctgacttcaaggcgtgctcttattgatatcacagaaagagtcatcacacggacaaaataggaaggtgttcggcgtccataagattcaggtaggttgcagcaagaacagtggcggcgtagctcggccggtgccagcagcccagcaggcagcttcttgcagttgcaggggcagcagacacagacaggatcaag

SEQ ID NO: 48721 - DNA, 1885 bp, Zea Mays
gttccaacccacaaaccgagcggcggccgccgcctcccttttcgtctctgactttttctacaagctcattcttcctcccccgatctcgggagcagccgaagcatgtcctggcggtggactctcgcgcgccgcgtcgccacgctggccgcgatcggtggcggcggtgcccaggcgcagaggctcctgtccacctcgtcagccggcggtggcactggcctcctgggtcggcactacatacccctcgcctcccagattcggagcaaggtagttggttgcagaggagctgctcttgtgagctccagatggttgcatgaggcccaataccaggttcgccaggacggggcttccagggctcaggaacagcaagatccatttgaattagtcgccgatgagctatcacttcttgcaaataggttacgatccatggtggctgctgaggtccccaaactggcatcagcagctgagtactttttcaaggtgggagcagagggaaaaagattccgacctacggttttgttgctcatggcatcagctctgaaatttcctttgtcagagtcaacagaaggaagagttctcagtatattggcagataaactccgcacaaggcaacagaacattgctgagataactgaaatgattcatgtcgcaagccttctgcatgatgatgttcttgatgatgctgatactaggcgtggtgtcagttcattgaatctcatcatggggaacaagagactgtaaaaagcaaggaaggagctatatatgagaccgaatacaacaagggcacatgcatagacatttaacacagtgaactggtgtgcattcatgctctagcaggtaaataaaaacttcattgggttccaggttaatatgaagttaggatatttggaaagcaaactcttttttataaggattaaattagttggcactctcatcttgaagttacagaataacaggagcaccattttttttgttaaggcagcagcgttaagatatgttctcaaaactgctttctttgtggttctctttctaaactggagagctttctacagttgagattgtctgacaacagtattcatcgaatgttctgtctctagctttctgtgctggctggtgatttccttctgtctagagcatgtgtggcccttgcagcacttgggaacacagaggtggtttctctaatggcaactgctgtagaacatctagttactggtgaaactatgcagatctcaacaagcagagagcaacggcgaagcatggagtactacctgcagaagacatactacaaaacggcatcattgatatcaaatagttgcaaggctgttgctattcttgcagggcacacaactgaggtctcggtgcttgcatatgaatatggtcgaaacctgggtctagccttccagttaattgatgatgttcttgatttcaccggcacctctgcatcccttgggaagggttcattgtctgatattcgccacggaattattactgccccgatgctatatgcgatggaggaattcccacaactgcaagaagttgttgaccggggttttgataatcctgcaaatgttgaaattgcccttgactatctccagaagagccgtgggattgaaaagacaaaagagcttgcacgagaacatgctgatcgtgcagtcaaggctatagaatctctacctgatagcgacgacgaggatgttctgacttcaaggcgtgctcttattgatatcacagaaagagtcatcacacggacaaaataggaaggtgttcggcgtccataagattcaggtaggttgcagcaagaacagtggcggcgtagctcggccggtgccagcagcccagcaggcagcttcttgcagttgcaggggcagcagacacagacaggatcaag

SEQ ID NO: 48722 - DNA, 1067 bp, Zea Mays
cttttctccagctcatcctccctgcctccgatctcgggagcaactgaagcatgtcttggcggtgggctttcgcgcgccatgtcgcccaggcgcagaggctcctgcccacctcgtcggccggcggtggcactggcctcctgggtcggcaccaccaccacatgcccctcgcctcccagattcggagcaaggtccccaaactggcatcaacagctgagtactttttcaaggtgggagtagagggaaaaagattccaacctacggttttgttgctcatggcatcagctgtgaaattctctttgtcagaatcaacagaaggcaaagttctcagtatattggcagataaactccgctcacggcagcagaacattgccgagataactgaaatgattcatgttgcaagccttatgcatgatgatgttcttgacaatgccgatactaggtgtggcgtcagatcattgaatctcatcaagggaaacaagctttctgtgctggctggtgacttcctgctgtctagagcatgtgtggcccttgcagcacttgggaacacagaggtggcttctctaatggcaactactgtagaacatctagttactggtgaaactatgcagatctctacaagcacagagcaacaacgaagcatggagtactacctgcagaagacatactacaaaacgtcatcattgatatcaaatagttgcaaggcggttgctattcttgcaggacacacagctgaggtctcggtgcttgcatacgaatatggtcgaaacctgggtctagccttccagttaattgatgatgtacttaatttcacaggcacctctgcatcccttgggaacggttcattgtctcatattcgccatgtgagaataacaacttaactttttcattctatttactttgcagtgactgaaaatgtaatcatgtctattatctgaaatatatatttatactagttagatgctcgtgtcttgctacgtttctatatatcacatatgtataccttgtttaaatgagataattgttcaaaaatattccaaacctttacaataatttgtattctatttgaa

SEQ ID NO: 48723 - DNA, 1039 bp, Zea Mays
cttttctccagctcatcctccctgcctccgatctcgggagcaactgaagcatgtcttggcggtgggctttcgcgcgccatgtcgcccaggcgcagaggctcctgcccacctcgtcggccggcggtggcactggcctcctgggtcggcaccaccaccacatgcccctcgcctcccagattcggagcaaggaacagcaagatccatttgaattagtcgccgatgaggtatcacttcttgtaaatcggttacgattcatggtgtctgctgaggtccccaaactggcatcaacagctgagtactttttcaaggtgggagtagagggaaaaagattccaacctacggttttgttgctcatggcatcagctgtgaaattctctttgtcagaatcaacagaaggcaaagttctcagtatattggcagataaactccgctcacggcagcagaacattgccgagataactgaaatgattcatgttgcaagccttatgcatgatgatgttcttgacaatgccgatactaggtgtggcgtcagatcattgaatctcatcaagggaaacaagctttctgtgctggctggtgacttcctgctgtctagagcatgtgtggcccttgcagcacttgggaacacagaggtggcttctctaatggcaactactgtagaacatctagttactggtgaaactatgcagatctctacaagcacagagcaacaacgaagcatggagtactacctgcagaagacatactacaaaacgtcatcattgatatcaaatagttgcaaggcggttgctattcttgcaggacacacagctgaggtctcggtgcttgcatacgaatatggtcgaaacctgggtctagccttccagttaattgatgatgtacttaatttcacaggcacctctgcatcccttgggaacggttcattgtctcatattcgccatggaatcattactgccccaatgctatatgcgatggaggaattcccgcaactactagaagttgttgaccgagggtttggtaatcctgcaaacgttgaaat

SEQ ID NO: 48724 - DNA, 1003 bp, Zea Mays
cttttctccagctcatcctccctgcctccgatctcgggagcaactgaagcatgtcttggcggtgggctttcgcgcgccatgtcgcccaggcgcagaggctcctgcccacctcgtcggccggcggtggcactggcctcctgggtcggcaccaccaccacatgcccctcgcctcccagattcggagcaaggtccccaaactggcatcaacagctgagtactttttcaaggtgggagtagagggaaaaagattccaacctacggttttgttgctcatggcatcagctgtgaaattctctttgtcagaatcaacagaaggcaaagttctcagtatattggcagataaactccgctcacggcagcagaacattgccgagataactgaaatgattcatgttgcaagccttatgcatgatgatgttcttgacaatgccgatactaggtgtggcgtcagatcattgaatctcatcaagggaaacaagctttctgtgctggctggtgacttcctgctgtctagagcatgtgtggcccttgcagcacttgggaacacagaggtggcttctctaatggcaactactgtagaacatctagttactggtgaaactatgcagatctctacaagcacagagcaacaacgaagcatggagtactacctgcagaagacatactacaaaacgtcatcattgatatcaaatagttgcaaggcggttgctattcttgcaggacacacagctgaggtctcggtgcttgcatacgaatatggtcgaaacctgggtctagccttccagttaattgatgatgtacttaatttcacaggcacctctgcatcccttgggaacggttcattgtctcatattcgccatgcccttgactatctccggaagagccatggggttgaaaggacaaaggagctcgcacgagaacactctgatcgtgcagtcaaggctatagaatccctcccctatccgacgacaaggatgttctgacctcaaggcgtgctcttgtg

SEQ ID NO: 48725 - DNA, 1084 bp, Zea Mays
cttttctccagctcatcctccctgcctccgatctcgggagcaactgaagcatgtcttggcggtgggctttcgcgcgccatgtcgcccaggcgcagaggctcctgcccacctcgtcggccggcggtggcactggcctcctgggtcggcaccaccaccacatgcccctcgcctcccagattcggagcaaggaacagcaagatccatttgaattagtcgccgatgaggtatcacttcttgtaaatcggttacgattcatggtgtctgctgaggtccccaaactggcatcaacagctgagtactttttcaaggtgggagtagagggaaaaagattccaacctacggttttgttgctcatggcatcagctgtgaaattctctttgtcagaatcaacagaaggcaaagttctcagtatattggcagataaactccgctcacggcagcagaacattgccgagataactgaaatgattcatgttgcaagccttatgcatgatgatgttcttgacaatgccgatactaggtgtggcgtcagatcattgaatctcatcaagggaaacaagctttctgtgctggctggtgacttcctgctgtctagagcatgtgtggcccttgcagcacttgggaacacagaggtggcttctctaatggcaactactgtagaacatctagttactggtgaaactatgcagatctctacaagcacagagcaacaacgaagcatggagtactacctgcagaagacatactacaaaacgtcatcattgatatcaaatagttgcaaggcggttgctattcttgcaggacacacagctgaggtctcggtgcttgcatacgaatatggtcgaaacctgggtctagccttccagttaattgatgatgtacttaatttcacaggcacctctgcatcccttgggaacggttcattgtctcatattcgccatgcccttgactatctccggaagagccatggggttgaaaggacaaaggagctcgcacgagaacactctgatcgtgcagtcaaggctatagaatccctcccctatccgacgacaaggatgttctgacctcaaggcgtgctcttgtg

SEQ ID NO: 48726 - DNA, 991 bp, Zea Mays
cgagaatctagaggaggagctctaccaaactggctcttaggggatgtttggatggtgccctaccaggaagctagctggccaggcaatgatctcagccctaggcgactgaaatccaatgcctgagaatcgtgtctggccaggaacagcaagatccatttgaattagtcgccgatgaggtatcacttcttgtaaatcggttacgattcatggtgtctgctgaggtccccaaactggcatcaacagctgagtactttttcaaggtgggagtagagggaaaaagattccaacctacggttttgttgctcatggcatcagctgtgaaattctctttgtcagaatcaacagaaggcaaagttctcagtatattggcagataaactccgctcacggcagcagaacattgccgagataactgaaatgattcatgttgcaagccttatgcatgatgatgttcttgacaatgccgatactaggtgtggcgtcagatcattgaatctcatcaagggaaacaagctttctgtgctggctggtgacttcctgctgtctagagcatgtgtggcccttgcagcacttgggaacacagaggtggcttctctaatggcaactactgtagaacatctagttactggtgaaactatgcagatctctacaagcacagagcaacaacgaagcatggagtactacctgcagaagacatactacaaaacgtcatcattgatatcaaatagttgcaaggcggttgctattcttgcaggacacacagctgaggtctcggtgcttgcatacgaatatggtcgaaacctgggtctagccttccagttaattgatgatgtacttaatttcacaggcacctctgcatcccttgggaacggttcattgtctcatattcgccatggaatcattactgccccaatgctatatgcgatggaggaattcccgcaactactagaagttgttgaccgagggtttggtaatcctgcaaacgttgaaat

SEQ ID NO: 48727 - DNA, 927 bp, Zea Mays
ggttaatccacccagtatcattcctcagacttttctcggccatttccctaggcctcggcctaggaactgactcgcgccacaacgacgtggaacatttccacgcgaaggcgagggggagcccgggagggaggtgtgtgcgattcgtgcggcggcggcacactagggcgacacctgcgactcctctccgccccctacgtaggaggaggtgagagtttttggcggactgcaacatctacctcgttagggcagccgcttggattcgttgtacagccgcccggattcgcaggggcagtcgctcagattcgctgggagttctccgcctgcaatgtattcaagtcaagacatgttctggtgtacaatgtactcagttgtccctaaaaggctctaccaccagcttgcaacattggtattgatcattctaacaaaatatattccactgaacttgagaagatgcctacttaattttcttgtctctgtacttgcggttgccgatcgaaaatctgcatcagcaaacttatgagtattattgctagagttgctgcagatacttatgagtattagtatatgtgcttctgcatcacctatggttctacaaatgtaagagctaggatagtaaatgcacttggaggtggacaagagaaaaaaacaaagcttgactgcttgtgttgatcatttctgttgttgagccaactttgaggtcaacacaatgacaattctatgttgttgagcaaactattcagaagacaatatactaaaagatgaaagctttgaaaaatttctcttagaaataggtcatatatgcaacatgggatatgcacaatgttgtggttcactttttaagatatgctctattgtatattcaaccaagcctgaagaataattatagacaatattgaaatttgagtttttaaattggctttctaaaac

SEQ ID NO: 48728 - DNA, 922 bp, Zea Mays
ggttaatccacccagtatcattcctcagacttttctcggccatttccctaggcctcggcctaggaactgactcgcgccacaacgacgtggaacatttccacgcgaaggcgagggggagcccgggagggaggtgtgtgcgattcgtgcggcggcggcacactagggcgacacctgcgactcctctccgccccctacgtaggaggaggtgagagtttttggcggactgcaacatctacctcgttagggcagccgcttggattcgttgtacagccgcccggattcgcaggggcagtcgctcagattcgctgggagttctccgcctgcaatgtattcaagtcaagacatgttctggtgtacaatgtactcaggtcaagacgtgtatttggcaaattggaattgacaaactactattttttggcttttgatactaatttcagatgtgcataattcatttttttgtccttgctgctttcacacatgaatctctctgaagttgtccctaaaaggctctaccaccagcttgcaacattggtattgatcattctaacaaaatatattccactgaacttgagaagatgcctacttaattttcgtaagagctaggatagtaaatgcacttggaggtggacaagagaaaaaaacaaagcttgactgcttgtgttgatcatttctgttgttgagccaactttgaggtcaacacaatgacaattctatgttgttgagcaaactattcagaagacaatatactaaaagatgaaagctttgaaaaatttctcttagaaataggtcatatatgcaacatgggatatgcacaatgttgtggttcactttttaagatatgctctattgtatattcaaccaagcctgaagaataattatagacaatattgaaatttgagtttttaaattggctttctaaaac

SEQ ID NO: 48729 - DNA, 934 bp, Zea Mays
ggttaatccacccagtatcattcctcagacttttctcggccatttccctaggcctcggcctaggaactgactcgcgccacaacgacgtggaacatttccacgcgaaggcgagggggagcccgggagggaggtgtgtgcgattcgtgcggcggcggcacactagggcgacacctgcgactcctctccgccccctacgtaggaggaggtgagagtttttggcggactgcaacatctacctcgttagggcagccgcttggattcgttgtacagccgcccggattcgcaggggcagtcgctcagattcgctgggagttctccgatgtgcataattcatttttttgtccttgctgctttcacacatgaatctctctgaagttgtccctaaaaggctctaccaccagcttgcaacattggtattgatcattctaacaaaatatattccactgaacttgagaagatgcctacttaattttcttgtctctgtacttgcggttgccgatcgaaaatctgcatcagcaaacttatgagtattattgctagagttgctgcagatacttatgagtattagtatatgtgcttctgcatcacctatggttctacaaatgtaagagctaggatagtaaatgcacttggaggtggacaagagaaaaaaacaaagcttgactgcttgtgttgatcatttctgttgttgagccaactttgaggtcaacacaatgacaattctatgttgttgagcaaactattcagaagacaatatactaaaagatgaaagctttgaaaaatttctcttagaaataggtcatatatgcaacatgggatatgcacaatgttgtggttcactttttaagatatgctctattgtatattcaaccaagcctgaagaataattatagacaatattgaaatttgagtttttaaattggctttctaaaac

SEQ ID NO: 48730 - DNA, 906 bp, Zea Mays
cttttctcggccatttccctaggcctcggcctaggaactgactcgcgccacaacgacgtggaacatttccacgcgaaggcgagggggagcccgggagggaggtgtgtgcgattcgtgcggcggcggcacactagggcgacacctgcgactcctctccgccccctacgtaggagcctgcaatgtattcaagtcaagacatgttctggtgtacaatgtactcaggtcaagacgtgtatttggcaaattggaattgacaaactactattttttggcttttgatactaatttcagatgtgcataattcatttttttgtccttgctgctttcacacatgaatctctctgaagttgtccctaaaaggctctaccaccagcttgcaacattggtattgatcattctaacaaaatatattccactgaacttgagaagatgcctacttaattttcttgtctctgtacttgcggttgccgatcgaaaatctgcatcagcaaacttatgagtattattgctagagttgctgcagatacttatgagtattagtatatgtgcttctgcatcacctatggttctacaaatgtaagagctaggatagtaaatgcacttggaggtggacaagagaaaaaaacaaagcttgactgcttgtgttgatcatttctgttgttgagccaactttgaggtcaacacaatgacaattctatgttgttgagcaaactattcagaagacaatatactaaaagatgaaagctttgaaaaatttctcttagaaataggtcatatatgcaacatgggatatgcacaatgttgtggttcactttttaagatatgctctattgtatattcaaccaagcctgaagaataattatagacaatattgaaatttgagtttttaaattggctttctaaaac

SEQ ID NO: 48731 - DNA, 633 bp, Zea Mays
cttttctcggccatttccctaggcctcggcctaggaactgactcgcgccacaacgacgtggaacatttccacgcgaaggcgagggggagcccgggagggaggtgtgtgcgattcgtgcggcggcggcacactagggcgacacctgcgactcctctccgccccctacgtaggagttgtctctgtacttgcggttgccgatcgaaaatctgcatcagcaaacttatgagtattattgctagagttgctgcagatacttatgagtattagtatatgtgcttctgcatcacctatggttctacaaatgtaagagctaggatagtaaatgcacttggaggtggacaagagaaaaaaacaaagcttgactgcttgtgttgatcatttctgttgttgagccaactttgaggtcaacacaatgacaattctatgttgttgagcaaactattcagaagacaatatactaaaagatgaaagctttgaaaaatttctcttagaaataggtcatatatgcaacatgggatatgcacaatgttgtggttcactttttaagatatgctctattgtatattcaaccaagcctgaagaataattatagacaatattgaaatttgagtttttaaattggctttctaaaac

SEQ ID NO: 48732 - DNA, 768 bp, Zea Mays
ggccatttccctaggcctcggcctaggaactgactcgcgccacaacgacgtggaacatttccacgcgaaggcgagggggagcccgggagggaggtgtgtgcgattcgtgcggcggcggcacactagggcgacacctgcgactcctctccgccccctacgtaggagcctgcaatgtattcaagtcaagacatgttctggtgtacaatgtactcaggtcaagacgtgtatttggcaaattggaattgacaaactactattttttggcttttgatactaatttcagatgtgcataattcatttttttgtccttgctgctttcacacatgaatctctctgaagttgtccctaaaaggctctaccaccagcttgcaacattggtattgatcattctaacaaaatatattccactgaacttgagaagatgcctacttaattttcgtaagagctaggatagtaaatgcacttggaggtggacaagagaaaaaaacaaagcttgactgcttgtgttgatcatttctgttgttgagccaactttgaggtcaacacaatgacaattctatgttgttgagcaaactattcagaagacaatatactaaaagatgaaagctttgaaaaatttctcttagaaataggtcatatatgcaacatgggatatgcacaatgttgtggttcactttttaagatatgctctattgtatattcaaccaagcctgaagaataattatagacaatattgaaatttgagtttttaaattggctttctaaaac

SEQ ID NO: 48733 - DNA, 724 bp, Zea Mays
ggccatttccctaggcctcggcctaggaactgactcgcgccacaacgacgtggaacatttccacgcgaaggcgagggggagcccgggagggaggtgtgtgcgattcgtgcggcggcggcacactagggcgacacctgcgactcctctccgccccctacgtaggagttgtccctaaaaggctctaccaccagcttgcaacattggtattgatcattctaacaaaatatattccactgaacttgagaagatgcctacttaattttcttgtctctgtacttgcggttgccgatcgaaaatctgcatcagcaaacttatgagtattattgctagagttgctgcagatacttatgagtattagtatatgtgcttctgcatcacctatggttctacaaatgtaagagctaggatagtaaatgcacttggaggtggacaagagaaaaaaacaaagcttgactgcttgtgttgatcatttctgttgttgagccaactttgaggtcaacacaatgacaattctatgttgttgagcaaactattcagaagacaatatactaaaagatgaaagctttgaaaaatttctcttagaaataggtcatatatgcaacatgggatatgcacaatgttgtggttcactttttaagatatgctctattgtatattcaaccaagcctgaagaataattatagacaatattgaaatttgagtttttaaattggctttctaaaac

SEQ ID NO: 48734 - DNA, 893 bp, Zea Mays
ggccatttccctaggcctcggcctaggaactgactcgcgccacaacgacgtggaacatttccacgcgaaggcgagggggagcccgggagggaggtgtgtgcgattcgtgcggcggcggcacactagggcgacacctgcgactcctctccgccccctacgtaggagtaggaggtgagagtttttggcggactgcaacatctacctcgttagggcagccgcttggattcgttgtacagccgcccggattcgcaggggcagtcgctcagattcgctgggagttctccgcctgcaatgtattcaagtcaagacatgttctggtgtacaatgtactcagttgtccctaaaaggctctaccaccagcttgcaacattggtattgatcattctaacaaaatatattccactgaacttgagaagatgcctacttaattttcttgtctctgtacttgcggttgccgatcgaaaatctgcatcagcaaacttatgagtattattgctagagttgctgcagatacttatgagtattagtatatgtgcttctgcatcacctatggttctacaaatgtaagagctaggatagtaaatgcacttggaggtggacaagagaaaaaaacaaagcttgactgcttgtgttgatcatttctgttgttgagccaactttgaggtcaacacaatgacaattctatgttgttgagcaaactattcagaagacaatatactaaaagatgaaagctttgaaaaatttctcttagaaataggtcatatatgcaacatgggatatgcacaatgttgtggttcactttttaagatatgctctattgtatattcaaccaagcctgaagaataattatagacaatattgaaatttgagtttttaaattggctttctaaaac

SEQ ID NO: 48735 - DNA, 584 bp, Zea Mays
ctcagattcgctgggagttctccggttgtccctaaaaggctctaccaccagcttgcaacattggtattgatcattctaacaaaatatattccactgaacttgagaagatgcctacttaattttcttgtctctgtacttgcggttgccgatcgaaaatctgcatcagcaaacttatgagtattattgctagagttgctgcagatacttatgagtattagtatatgtgcttctgcatcacctatggttctacaaatgtaagagctaggatagtaaatgcacttggaggtggacaagagaaaaaaacaaagcttgactgcttgtgttgatcatttctgttgttgagccaactttgaggtcaacacaatgacaattctatgttgttgagcaaactattcagaagacaatatactaaaagatgaaagctttgaaaaatttctcttagaaataggtcatatatgcaacatgggatatgcacaatgttgtggttcactttttaagatatgctctattgtatattcaaccaagcctgaagaataattatagacaatattgaaatttgagtttttaaattggctttctaaaac

SEQ ID NO: 48736 - DNA, 484 bp, Zea Mays
ctcagattcgctgggagttctccgttgtctctgtacttgcggttgccgatcgaaaatctgcatcagcaaacttatgagtattattgctagagttgctgcagatacttatgagtattagtatatgtgcttctgcatcacctatggttctacaaatgtaagagctaggatagtaaatgcacttggaggtggacaagagaaaaaaacaaagcttgactgcttgtgttgatcatttctgttgttgagccaactttgaggtcaacacaatgacaattctatgttgttgagcaaactattcagaagacaatatactaaaagatgaaagctttgaaaaatttctcttagaaataggtcatatatgcaacatgggatatgcacaatgttgtggttcactttttaagatatgctctattgtatattcaaccaagcctgaagaataattatagacaatattgaaatttgagtttttaaattggctttctaaaac

SEQ ID NO: 48737 - DNA, 4396 bp, Zea Mays
gtgagacttaagcacctgccaggcatcaatcagcacgccacaagatgaggacgtgacggggggggtcgggagtgcggcacgcggagcactgtacatgtgcgactgcacgtcgcgcgcggcgcagcgcagcgcaggcacagagccactgaaccagtagccgtactctacagaagcaaggacatagagaattgacaagaaaaatcacgcaagggaggagagagagaaggggggagcatagcataggcatagcaagagcaaagctgaaaaagaggagcaccactcgtggggggttaaaaccccgagaacaaacttgggagtagcagcggccagccggaagcgagcggagaccgaggggagagggggtgaagaagcaacgagacgcagcgagcaagcgaaagcataccagagcaccaagcatagggacgcgcgcgcttctccagttctccctccctgccctgcaaggcggctgcaactgttccagctagcccctctcccagcctctgcgtcgtagacgtggtagtagcagccgcagcagcagaagcggcggcgagcatgctcttggcacccctccccggcgccgggcggatctgccggagggcggcggccggggcgcttggagcgcggcgctaaccgcgttcgaaggacctcgggatctgacgccgcgcctcccctaatcgatcgactccatcggtggcggcggcggccgaggcggcagcagccgggtctctcggctccgggacaagaagggaaagattgcgcttgcgcttgcttgggcgccggccgcgccggtggcggtaatcttcgagagccgcggtcgcggcgcgcggtgaagagaaaaaaaggtgtgtgtgtgtgagagagagaggaggctccctgccctctcgcggtgacttggcgaggagggggagggactgggaaagcgaatggttttcgggaaggcgctgtgatttggcctggaaaggaggaacctttccttcctcttcccgtcctttgccggctcttgtaccgccctcagatcggcgacccggttgtttcttcggcaacgggcggaaatgaggctctcgtcgtcgtccggcagcgtcctgccggctcagccgggctcgccggaagctgtggaggagcacaagtgcctgaactcggagttgtggcatgcttgtgccggcccgcttgtttccttgcccgcggtgggtagccgagttgtgtacttccctcagggccacagcgagcaggtagcagcatcaacaaacaaggaaatagagtctcagatccccaactatcctaatctgccgccacagcttatatgccaacttcataatgtgacgatgcatgctgatgcagagacagatgaggtatatgcacagatgacactacaaccactcaacccgcaagaactgaaggacccatatttacctgcagaattaggttcggccaataaacagccaacaaactatttctgcaaaacattaacagcaagtgataccagtacccatggtgggttctccgttccccgtcgagcagctgagaaagtgtttcctccactggatttcacccagcaacccccatgccaggagttgatggcaaaagatcttcatggcaatgagtggaaattccgtcacatctttcgtggccagccaaagcggcatcttctaactacaggttggagtgtctttgtaagtgcaaagagactcgttgctggcgactctgtcctttttatctggaatgacaataaccagcttctgctgggaattcgtcgtgcaaatcggccacaaactgtcatgccatcttcagtcttatcaagcgatagcatgcatatcggtcttcttgctgcagctgctcatgctgcttcgacaaatagccgatttacaattttttacaacccaagggcaagcccttcagagtttgtcataccactcgtaaagtatgttaaggctgtgtatcatacccgcatatctgtggggatgcgattcaggatgctttttgagacagaagagtctagcgttaggagatacatggggacaattaccggaatctgtgatcttgattctgttcggtggccaaattcacactggcgttctgttaaggttggctgggatgagtcaactgctggtgagcgacaaccaagggtgtcactatgggagattgaacccctgacaactttcccaatgtatccatctccttttccgctcaggctcaagcgtccatggccaacaggcttgccttctctgcatggtgggaaggatgatgacctggctaactctctcatgtggcttcgagataccgcaaatcctggttttcagtcgttaaattttggtggacttggtatgagcccttggatgcagccaaggctggatgctaccttacttggtctgcaacctgacatgtatcaggcgatggccacagctgcttttcaggatgcaacaaagcaggcatcgcccacaatgctgcagttccagcagccccagaacatagctggccgggcttccccgcttctttcaagtcagattttgcagcaagcacatcatcaatttcagcagcaaccgtaccttcaaaacatctctgagagcacaatccaagcacagggtcagtctgagttcctcaagcagcagatccaacgcagccagtcattcaatgagcagaagccccagatgcaacaccagcaagaatcacagcagcagcagcaaccacagtgtctgccagtcccccaacatcagcaaatgcaacaacagaatatgaccaactaccagtctatatctaatgcattatcaccgttttctcagctgtcgccagtttctcagtcttcacctatggcgctgcagactatattaccgttctcgcaggcacagagcttcacagacacgaatgtaggttcattgtctccatccaatggtaacaccatgcaaaacacactgaggccgttctcatcagaagcagtttctcacctcagtatgccgaggcccactgcgatacctgtcgcagacccatggtcgtcgaagcgtgtcgcggtggagtctctgcttccttctcggcctcaggtttcatcccagatggaacaattggaccctgcaccagctagtatacctcatagctctgcgttggcaccacttcccggaagagggtgcttggttgaccaagatgtgaactctgatcctcaaaatcatctcttgttcggtgttagtatagactcgcagtcactgctaatgcaagggggcattcctggtctccaaaacgggaatgattcagctgctataccttattccacttccaatttcctcagcccttctcagaatgactttcctctggaccatacactaaattcttcaggctgcttagatgattctgggtacgtcccgccatgttcagataattctgacaaagtgaaccgaccaccagcgaccttcgtgaaggtttacaaatctggaacctacgggaggtcgcttgatatcactaggtttagcagctatcacgagctccgtagggaactggggcgcctatttggccttgagggccagttggaagacccattgagatcaggctggcagcttgtattcgtcgaccgtgaggaggacgtccttctcgtgggcgacgacccttggcaggaattcgtgagcacggtgtcctgcataaagatcctctccccgcaggaggtgcagcagatggggaagcagggcctggagctcctgagctcggcccccgcgcggaggctcggtagcagctgtgacgactacgtcagcaggcaggagtcgagaagcctgagcaccgggatcgcgtccgtcggttcggtcgagttgggatgagcagcaagatagcgcgcacgcagcagcagcagcagcaggttacgcatcctcagcctcagggtaggtaggggactgaagggttggtctgcgacttgatgacccacgagctcctcgttgcgcgcttcgttcgcctccatgcgatggatagaagttcagcgcagaccaagccttagctctgcgagctatgtaccatctaataattctgtccgtgtcgtaccatgtcaactcctaagtagaagaattgaagaaactaccagcagccgctgtctggtatacacgctgaaacattttttttcttgtatggagaaatactaatcatctggatgtagccaggcctatgctctctaatggttgatcgggtaatacagcccctcgcacacagcaaactcacaagagaaacttccagttgctacattaagtttgggcagtaataaaaggtccgtcaaaaattaacttttttttttctcggcagcaacaagaagtccatacaaaattaacttattttttagtggctaaacggaggaggctgaaaatattttttttgttttggcggtatgtactaagacgttgtatttagtcattgaaaatagattgattttcgg

SEQ ID NO: 48738 - DNA, 4315 bp, Zea Mays
cacagagccactgaaccagtagccgtactctacagaagcaaggacatagagaattgacaagaaaaatcacgcaagggaggagagagagaaggggggagcatagcataggcatagcaagagcaaagctgaaaaagaggagcaccactcgtggggggttaaaaccccgagaacaaacttgggagtagcagcggccagccggaagcgagcggagaccgaggggagagggggtgaagaagcaacgagacgcagcgagcaagcgaaagcataccagagcaccaagcatagggacgcgcgcgcttctccagttctccctccctgccctgcaaggcggctgcaactgttccagctagcccctctcccagcctctgcgtcgtagacgtggtagtagcagccgcagcagcagaagcggcggcgagcatgctcttggcacccctccccggcgccgggcggatctgccggagggcggcggccggggcgcttggagcgcggcgctaaccgcgttcgaaggacctcgggatctgacgccgcgcctcccctaatcgatcgactccatcggtggcggcggcggccgaggcggcagcagccgggtctctcggctccgggacaagataagcttttgctctgcgcattcgcgctgctcaaacatcgtagccagccacaccaagcaactgacttgtgctcctctgattgtacaagggaaagattgcgcttgcgcttgcttgggcgccggccgcgccggtggcggtaatcttcgagagccgcggtcgcggcgcgcggtgaagagaaaaaaaggtgtgtgtgtgtgagagagagaggaggctccctgccctctcgcggtgacttggcgaggagggggagggactgggaaagcgaatggttttcgggaaggcgctgtgatttggcctggaaaggaggaacctttccttcctcttcccgtcctttgccggctcttgtaccgccctcagatcggcgacccggttgtttcttcggcaacgggcggaaatgaggctctcgtcgtcgtccggcagcgtcctgccggctcagccgggctcgccggaagctgtggaggagcacaagtgcctgaactcggagttgtggcatgcttgtgccggcccgcttgtttccttgcccgcggtgggtagccgagttgtgtacttccctcagggccacagcgagcaggtagcagcatcaacaaacaaggaaatagagtctcagatccccaactatcctaatctgccgccacagcttatatgccaacttcataatgtgacgatgcatgctgatgcagagacagatgaggtatatgcacagatgacactacaaccactcaacccgaattaggttcggccaataaacagccaacaaactatttctgcaaaacattaacagcaagtgataccagtacccatggtgggttctccgttccccgtcgagcagctgagaaagtgtttcctccactggatttcacccagcaacccccatgccaggagttgatggcaaaagatcttcatggcaatgagtggaaattccgtcacatctttcgtggccagccaaagcggcatcttctaactacaggttggagtgtctttgtaagtgcaaagagactcgttgctggcgactctgtcctttttatctggaatgacaataaccagcttctgctgggaattcgtcgtgcaaatcggccacaaactgtcatgccatcttcagtcttatcaagcgatagcatgcatatcggtcttcttgctgcagctgctcatgctgcttcgacaaatagccgatttacaattttttacaacccaagggcaagcccttcagagtttgtcataccactcgtaaagtatgttaaggctgtgtatcatacccgcatatctgtggggatgcgattcaggatgctttttgagacagaagagtctagcgttaggagatacatggggacaattaccggaatctgtgatcttgattctgttcggtggccaaattcacactggcgttctgttaaggttggctgggatgagtcaactgctggtgagcgacaaccaagggtgtcactatgggagattgaacccctgacaactttcccaatgtatccatctccttttccgctcaggctcaagcgtccatggccaacaggcttgccttctctgcatggtgggaaggatgatgacctggctaactctctcatgtggcttcgagataccgcaaatcctggttttcagtcgttaaattttggtggacttggtatgagcccttggatgcagccaaggctggatgctaccttacttggtctgcaacctgacatgtatcaggcgatggccacagctgcttttcaggatgcaacaaagcaggcatcgcccacaatgctgcagttccagcagccccagaacatagctggccgggcttccccgcttctttcaagtcagattttgcagcaagcacatcatcaatttcagcagcaaccgtaccttcaaaacatctctgagagcacaatccaagcacagggtcagtctgagttcctcaagcagcagatccaacgcagccagtcattcaatgagcagaagccccagatgcaacaccagcaagaatcacagcagcagcagcaaccacagtgtctgccagtcccccaacatcagcaaatgcaacaacagaatatgaccaactaccagtctatatctaatgcattatcaccgttttctcagctgtcgccagtttctcagtcttcacctatggcgctgcagactatattaccgttctcgcaggcacagagcttcacagacacgaatgtaggttcattgtctccatccaatggtaacaccatgcaaaacacactgaggccgttctcatcagaagcagtttctcacctcagtatgccgaggcccactgcgatacctgtcgcagacccatggtcgtcgaagcgtgtcgcggtggagtctctgcttccttctcggcctcaggtttcatcccagatggaacaattggaccctgcaccagctagtatacctcatagctctgcgttggcaccacttcccggaagagggtgcttggttgaccaagatgtgaactctgatcctcaaaatcatctcttgttcggtgttagtatagactcgcagtcactgctaatgcaagggggcattcctggtctccaaaacgggaatgattcagctgctataccttattccacttccaatttcctcagcccttctcagaatgactttcctctggaccatacactaaattcttcaggctgcttagatgattctgggtacgtcccgccatgttcagataattctgacaaagtgaaccgaccaccagcgaccttcgtgaaggtttacaaatctggaacctacgggaggtcgcttgatatcactaggtttagcagctatcacgagctccgtagggaactggggcgcctatttggccttgagggccagttggaagacccattgagatcaggctggcagcttgtattcgtcgaccgtgaggaggacgtccttctcgtgggcgacgacccttggcaggaattcgtgagcacggtgtcctgcataaagatcctctccccgcaggaggtgcagcagatggggaagcagggcctggagctcctgagctcggcccccgcgcggaggctcggtagcagctgtgacgactacgtcagcaggcaggagtcgagaagcctgagcaccgggatcgcgtccgtcggttcggtcgagttgggatgagcagcaagatagcgcgcacgcagcagcagcagcagcaggttacgcatcctcagcctcagggtaggtaggggactgaagggttggtctgcgacttgatgacccacgagctcctcgttgcgcgcttcgttcgcctccatgcgatggatagaagttcagcgcagaccaagccttagctctgcgagctatgtaccatctaataattctgtccgtgtcgtaccatgtcaactcctaagtagaagaattgaagaaactaccagcagccgctgtctggtatacacgctgaaacattttttttcttgtatggagaaatactaatcatctggatgtagccaggcctatgctctctaatggttgatcgggtaatacagcccctcgcacacagcaaactcacaagagaaacttccagttgctacattaagtttgggcagtaataaaaggtccgtcaaaaattaacttttttttttctcggcagcaacaagaagtccatacaaaattaacttattttttagtggctaaacggaggaggctgaaaatattttttttgttttggcggtatgtactaagacgttgtatttagtcattgaaaatagattgattttcgg

SEQ ID NO: 48739 - DNA, 4358 bp, Zea Mays
cacagagccactgaaccagtagccgtactctacagaagcaaggacatagagaattgacaagaaaaatcacgcaagggaggagagagagaaggggggagcatagcataggcatagcaagagcaaagctgaaaaagaggagcaccactcgtggggggttaaaaccccgagaacaaacttgggagtagcagcggccagccggaagcgagcggagaccgaggggagagggggtgaagaagcaacgagacgcagcgagcaagcgaaagcataccagagcaccaagcatagggacgcgcgcgcttctccagttctccctccctgccctgcaaggcggctgcaactgttccagctagcccctctcccagcctctgcgtcgtagacgtggtagtagcagccgcagcagcagaagcggcggcgagcatgctcttggcacccctccccggcgccgggcggatctgccggagggcggcggccggggcgcttggagcgcggcgctaaccgcgttcgaaggacctcgggatctgacgccgcgcctcccctaatcgatcgactccatcggtggcggcggcggccgaggcggcagcagccgggtctctcggctccgggacaagataagcttttgctctgcgcattcgcgctgctcaaacatcgtagccagccacaccaagcaactgacttgtgctcctctgattgtacaagggaaagattgcgcttgcgcttgcttgggcgccggccgcgccggtggcggtaatcttcgagagccgcggtcgcggcgcgcggtgaagagaaaaaaaggtgtgtgtgtgtgagagagagaggaggctccctgccctctcgcggtgacttggcgaggagggggagggactgggaaagcgaatggttttcgggaaggcgctgtgatttggcctggaaaggaggaacctttccttcctcttcccgtcctttgccggctcttgtaccgccctcagatcggcgacccggttgtttcttcggcaacgggcggaaatgaggctctcgtcgtcgtccggcagcgtcctgccggctcagccgggctcgccggaagctgtggaggagcacaagtgcctgaactcggagttgtggcatgcttgtgccggcccgcttgtttccttgcccgcggtgggtagccgagttgtgtacttccctcagggccacagcgagcaggtagcagcatcaacaaacaaggaaatagagtctcagatccccaactatcctaatctgccgccacagcttatatgccaacttcataatgtgacgatgcatgctgatgcagagacagatgaggtatatgcacagatgacactacaaccactcaacccgcaagaactgaaggacccatatttacctgcagaattaggttcggccaataaacagccaacaaactatttctgcaaaacattaacagcaagtgataccagtacccatggtgggttctccgttccccgtcgagcagctgagaaagtgtttcctccactggatttcacccagcaacccccatgccaggagttgatggcaaaagatcttcatggcaatgagtggaaattccgtcacatctttcgtggccagccaaagcggcatcttctaactacaggttggagtgtctttgtaagtgcaaagagactcgttgctggcgactctgtcctttttatctggaatgacaataaccagcttctgctgggaattcgtcgtgcaaatcggccacaaactgtcatgccatcttcagtcttatcaagcgatagcatgcatatcggtcttcttgctgcagctgctcatgctgcttcgacaaatagccgatttacaattttttacaacccaagttgcttttgcagggcaagcccttcagagtttgtcataccactcgtaaagtatgttaaggctgtgtatcatacccgcatatctgtggggatgcgattcaggatgctttttgagacagaagagtctagcgttaggagatacatggggacaattaccggaatctgtgatcttgattctgttcggtggccaaattcacactggcgttctgttaaggttggctgggatgagtcaactgctggtgagcgacaaccaagggtgtcactatgggagattgaacccctgacaactttcccaatgtatccatctccttttccgctcaggctcaagcgtccatggccaacaggcttgccttctctgcatggtgggaaggatgatgacctggctaactctctcatgtggcttcgagataccgcaaatcctggttttcagtcgttaaattttggtggacttggtatgagcccttggatgcagccaaggctggatgctaccttacttggtctgcaacctgacatgtatcaggcgatggccacagctgcttttcaggatgcaacaaagcaggcatcgcccacaatgctgcagttccagcagccccagaacatagctggccgggcttccccgcttctttcaagtcagattttgcagcaagcacatcatcaatttcagcagcaaccgtaccttcaaaacatctctgagagcacaatccaagcacagggtcagtctgagttcctcaagcagcagatccaacgcagccagtcattcaatgagcagaagccccagatgcaacaccagcaagaatcacagcagcagcagcaaccacagtgtctgccagtcccccaacatcagcaaatgcaacaacagaatatgaccaactaccagtctatatctaatgcattatcaccgttttctcagctgtcgccagtttctcagtcttcacctatggcgctgcagactatattaccgttctcgcaggcacagagcttcacagacacgaatgtaggttcattgtctccatccaatggtaacaccatgcaaaacacactgaggccgttctcatcagaagcagtttctcacctcagtatgccgaggcccactgcgatacctgtcgcagacccatggtcgtcgaagcgtgtcgcggtggagtctctgcttccttctcggcctcaggtttcatcccagatggaacaattggaccctgcaccagctagtatacctcatagctctgcgttggcaccacttcccggaagagggtgcttggttgaccaagatgtgaactctgatcctcaaaatcatctcttgttcggtgttagtatagactcgcagtcactgctaatgcaagggggcattcctggtctccaaaacgggaatgattcagctgctataccttattccacttccaatttcctcagcccttctcagaatgactttcctctggaccatacactaaattcttcaggctgcttagatgattctgggtacgtcccgccatgttcagataattctgacaaagtgaaccgaccaccagcgaccttcgtgaaggtttacaaatctggaacctacgggaggtcgcttgatatcactaggtttagcagctatcacgagctccgtagggaactggggcgcctatttggccttgagggccagttggaagacccattgagatcaggctggcagcttgtattcgtcgaccgtgaggaggacgtccttctcgtgggcgacgacccttggcaggaattcgtgagcacggtgtcctgcataaagatcctctccccgcaggaggtgcagcagatggggaagcagggcctggagctcctgagctcggcccccgcgcggaggctcggtagcagctgtgacgactacgtcagcaggcaggagtcgagaagcctgagcaccgggatcgcgtccgtcggttcggtcgagttgggatgagcagcaagatagcgcgcacgcagcagcagcagcagcaggttacgcatcctcagcctcagggtaggtaggggactgaagggttggtctgcgacttgatgacccacgagctcctcgttgcgcgcttcgttcgcctccatgcgatggatagaagttcagcgcagaccaagccttagctctgcgagctatgtaccatctaataattctgtccgtgtcgtaccatgtcaactcctaagtagaagaattgaagaaactaccagcagccgctgtctggtatacacgctgaaacattttttttcttgtatggagaaatactaatcatctggatgtagccaggcctatgctctctaatggttgatcgggtaatacagcccctcgcacacagcaaactcacaagagaaacttccagttgctacattaagtttgggcagtaataaaaggtccgtcaaaaattaacttttttttttctcggcagcaacaagaagtccatacaaaattaacttattttttagtggctaaacggaggaggctgaaaatattttttttgttttggcggtatgtactaagacgttgtatttagtcattgaaaatagattgattttcgg

SEQ ID NO: 48740 - DNA, 4353 bp, Zea Mays
cacagagccactgaaccagtagccgtactctacagaagcaaggacatagagaattgacaagaaaaatcacgcaagggaggagagagagaaggggggagcatagcataggcatagcaagagcaaagctgaaaaagaggagcaccactcgtggggggttaaaaccccgagaacaaacttgggagtagcagcggccagccggaagcgagcggagaccgaggggagagggggtgaagaagcaacgagacgcagcgagcaagcgaaagcataccagagcaccaagcatagggacgcgcgcgcttctccagttctccctccctgccctgcaaggcggctgcaactgttccagctagcccctctcccagcctctgcgtcgtagacgtggtagtagcagccgcagcagcagaagcggcggcgagcatgctcttggcacccctccccggcgccgggcggatctgccggagggcggcggccggggcgcttggagcgcggcgctaaccgcgttcgaaggacctcgggatctgacgccgcgcctcccctaatcgatcgactccatcggtggcggcggcggccgaggcggcagcagccgggtctctcggctccgggacaagataagcttttgctctgcgcattcgcgctgctcaaacatcgtagccagccacaccaagcaactgacttgtgctcctctgattgtacaagggaaagattgcgcttgcgcttgcttgggcgccggccgcgccggtggcggtaatcttcgagagccgcggtcgcggcgcgcggtgaagagaaaaaaaggtgtgtgtgtgtgagagagagaggaggctccctgccctctcgcggtgacttggcgaggagggggagggactgggaaagcgaatggttttcgggaaggcgctgtgatttggcctggaaaggaggaacctttccttcctcttcccgtcctttgccggctcttgtaccgccctcagatcggcgacccggttgtttcttcggcaacgggcggaaatgaggctctcgtcgtcgtccggcagcgtcctgccggctcagccgggctcgccggaagctgtggaggagcacaagtgcctgaactcggagttgtggcatgcttgtgccggcccgcttgtttccttgcccgcggtgggtagccgagttgtgtacttccctcagggccacagcgagcaggtagcagcatcaacaaacaaggaaatagagtctcagatccccaactatcctaatctgccgccacagcttatatgccaacttcataatgtgacgatgcatgctgatgcagagacagatgaggtatatgcacagatgacactacaaccactcaacccgcaagaactgaaggacccatatttacctgcagaattaggttcggccaataaacagccaacaaactatttctgcaaaacattaacagcaagtgataccagtacccatggtgggttctccgttccccgtcgagcagctgagaaagtgtttcctccactggatttcacccagcaacccccatgccaggagttgatggcaaaagatcttcatggcaatgagtggaaattccgtcacatctttcgtggccagccaaagcggcatcttctaactacaggttggagtgtctttgtaagtgcaaagagactcgttgctggcgactctgtcctttttatctggaatgacaataaccagcttctgctgggaattcgtcgtgcaaatcggccacaaactgtcatgccatcttcagtcttatcaagcgatagcatgcatatcggtcttcttgctgcagctgctcatgctgcttcgacaaatagccgatttacaattttttacaacccaagggcaagcccttcagagtttgtcataccactcgtaaagtatgttaaggctgtgtatcatacccgcatatctgtggggatgcgattcaggatgctttttgagacagaagagtctagcgttaggagatacatggggacaattaccggaatctgtgatcttgattctgttcggtggccaaattcacactggcgttctgttaaggttggctgggatgagtcaactgctggtgagcgacaaccaagggtgtcactatgggagattgaacccctgacaactttcccaatgtatccatctccttttccgctcaggctcaagcgtccatggccaacaggcttgccttctctgcatggtatgaggtgggaaggatgatgacctggctaactctctcatgtggcttcgagataccgcaaatcctggttttcagtcgttaaattttggtggacttggtatgagcccttggatgcagccaaggctggatgctaccttacttggtctgcaacctgacatgtatcaggcgatggccacagctgcttttcaggatgcaacaaagcaggcatcgcccacaatgctgcagttccagcagccccagaacatagctggccgggcttccccgcttctttcaagtcagattttgcagcaagcacatcatcaatttcagcagcaaccgtaccttcaaaacatctctgagagcacaatccaagcacagggtcagtctgagttcctcaagcagcagatccaacgcagccagtcattcaatgagcagaagccccagatgcaacaccagcaagaatcacagcagcagcagcaaccacagtgtctgccagtcccccaacatcagcaaatgcaacaacagaatatgaccaactaccagtctatatctaatgcattatcaccgttttctcagctgtcgccagtttctcagtcttcacctatggcgctgcagactatattaccgttctcgcaggcacagagcttcacagacacgaatgtaggttcattgtctccatccaatggtaacaccatgcaaaacacactgaggccgttctcatcagaagcagtttctcacctcagtatgccgaggcccactgcgatacctgtcgcagacccatggtcgtcgaagcgtgtcgcggtggagtctctgcttccttctcggcctcaggtttcatcccagatggaacaattggaccctgcaccagctagtatacctcatagctctgcgttggcaccacttcccggaagagggtgcttggttgaccaagatgtgaactctgatcctcaaaatcatctcttgttcggtgttagtatagactcgcagtcactgctaatgcaagggggcattcctggtctccaaaacgggaatgattcagctgctataccttattccacttccaatttcctcagcccttctcagaatgactttcctctggaccatacactaaattcttcaggctgcttagatgattctgggtacgtcccgccatgttcagataattctgacaaagtgaaccgaccaccagcgaccttcgtgaaggtttacaaatctggaacctacgggaggtcgcttgatatcactaggtttagcagctatcacgagctccgtagggaactggggcgcctatttggccttgagggccagttggaagacccattgagatcaggctggcagcttgtattcgtcgaccgtgaggaggacgtccttctcgtgggcgacgacccttggcaggaattcgtgagcacggtgtcctgcataaagatcctctccccgcaggaggtgcagcagatggggaagcagggcctggagctcctgagctcggcccccgcgcggaggctcggtagcagctgtgacgactacgtcagcaggcaggagtcgagaagcctgagcaccgggatcgcgtccgtcggttcggtcgagttgggatgagcagcaagatagcgcgcacgcagcagcagcagcagcaggttacgcatcctcagcctcagggtaggtaggggactgaagggttggtctgcgacttgatgacccacgagctcctcgttgcgcgcttcgttcgcctccatgcgatggatagaagttcagcgcagaccaagccttagctctgcgagctatgtaccatctaataattctgtccgtgtcgtaccatgtcaactcctaagtagaagaattgaagaaactaccagcagccgctgtctggtatacacgctgaaacattttttttcttgtatggagaaatactaatcatctggatgtagccaggcctatgctctctaatggttgatcgggtaatacagcccctcgcacacagcaaactcacaagagaaacttccagttgctacattaagtttgggcagtaataaaaggtccgtcaaaaattaacttttttttttctcggcagcaacaagaagtccatacaaaattaacttattttttagtggctaaacggaggaggctgaaaatattttttttgttttggcggtatgtactaagacgttgtatttagtcattgaaaatagattgattttcgg

SEQ ID NO: 48741 - DNA, 3341 bp, Zea Mays
gacgtgtttgatttgcgaggtttatctggatttgttttgatggtttcttttgaagctgtggaggagcacaagtgcctgaactcggagttgtggcatgcttgtgccggcccgcttgtttccttgcccgcggtgggtagccgagttgtgtacttccctcagggccacagcgagcaggtagcagcatcaacaaacaaggaaatagagtctcagatccccaactatcctaatctgccgccacagcttatatgccaacttcataatgtgacgatgcatgctgatgcagagacagatgaggtatatgcacagatgacactacaaccactcaacccgcaagaactgaaggacccatatttacctgcagaattaggttcggccaataaacagccaacaaactatttctgcaaaacattaacagcaagtgataccagtacccatggtgggttctccgttccccgtcgagcagctgagaaagtgtttcctccactggatttcacccagcaacccccatgccaggagttgatggcaaaagatcttcatggcaatgagtggaaattccgtcacatctttcgtggccagccaaagcggcatcttctaactacaggttggagtgtctttgtaagtgcaaagagactcgttgctggcgactctgtcctttttatctggaatgacaataaccagcttctgctgggaattcgtcgtgcaaatcggccacaaactgtcatgccatcttcagtcttatcaagcgatagcatgcatatcggtcttcttgctgcagctgctcatgctgcttcgacaaatagccgatttacaattttttacaacccaagggcaagcccttcagagtttgtcataccactcgtaaagtatgttaaggctgtgtatcatacccgcatatctgtggggatgcgattcaggatgctttttgagacagaagagtctagcgttaggagatacatggggacaattaccggaatctgtgatcttgattctgttcggtggccaaattcacactggcgttctgttaaggttggctgggatgagtcaactgctggtgagcgacaaccaagggtgtcactatgggagattgaacccctgacaactttcccaatgtatccatctccttttccgctcaggctcaagcgtccatggccaacaggcttgccttctctgcatggtgggaaggatgatgacctggctaactctctcatgtggcttcgagataccgcaaatcctggttttcagtcgttaaattttggtggacttggtatgagcccttggatgcagccaaggctggatgctaccttacttggtctgcaacctgacatgtatcaggcgatggccacagctgcttttcaggatgcaacaaagcaggcatcgcccacaatgctgcagttccagcagccccagaacatagctggccgggcttccccgcttctttcaagtcagattttgcagcaagcacatcatcaatttcagcagcaaccgtaccttcaaaacatctctgagagcacaatccaagcacagggtcagtctgagttcctcaagcagcagatccaacgcagccagtcattcaatgagcagaagccccagatgcaacaccagcaagaatcacagcagcagcagcaaccacagtgtctgccagtcccccaacatcagcaaatgcaacaacagaatatgaccaactaccagtctatatctaatgcattatcaccgttttctcagctgtcgccagtttctcagtcttcacctatggcgctgcagactatattaccgttctcgcaggcacagagcttcacagacacgaatgtaggttcattgtctccatccaatggtaacaccatgcaaaacacactgaggccgttctcatcagaagcagtttctcacctcagtatgccgaggcccactgcgatacctgtcgcagacccatggtcgtcgaagcgtgtcgcggtggagtctctgcttccttctcggcctcaggtttcatcccagatggaacaattggaccctgcaccagctagtatacctcatagctctgcgttggcaccacttcccggaagagggtgcttggttgaccaagatgtgaactctgatcctcaaaatcatctcttgttcggtgttagtatagactcgcagtcactgctaatgcaagggggcattcctggtctccaaaacgggaatgattcagctgctataccttattccacttccaatttcctcagcccttctcagaatgactttcctctggaccatacactaaattcttcaggctgcttagatgattctgggtacgtcccgccatgttcagataattctgacaaagtgaaccgaccaccagcgaccttcgtgaaggtttacaaatctggaacctacgggaggtcgcttgatatcactaggtttagcagctatcacgagctccgtagggaactggggcgcctatttggccttgagggccagttggaagacccattgagatcaggctggcagcttgtattcgtcgaccgtgaggaggacgtccttctcgtgggcgacgacccttggcaggaattcgtgagcacggtgtcctgcataaagatcctctccccgcaggaggtgcagcagatggggaagcagggcctggagctcctgagctcggcccccgcgcggaggctcggtagcagctgtgacgactacgtcagcaggcaggagtcgagaagcctgagcaccgggatcgcgtccgtcggttcggtcgagttgggatgagcagcaagatagcgcgcacgcagcagcagcagcagcaggttacgcatcctcagcctcagggtaggtaggggactgaagggttggtctgcgacttgatgacccacgagctcctcgttgcgcgcttcgttcgcctccatgcgatggatagaagttcagcgcagaccaagccttagctctgcgagctatgtaccatctaataattctgtccgtgtcgtaccatgtcaactcctaagtagaagaattgaagaaactaccagcagccgctgtctggtatacacgctgaaacattttttttcttgtatggagaaatactaatcatctggatgtagccaggcctatgctctctaatggttgatcgggtaatacagcccctcgcacacagcaaactcacaagagaaacttccagttgctacattaagtttgggcagtaataaaaggtccgtcaaaaattaacttttttttttctcggcagcaacaagaagtccatacaaaattaacttattttttagtggctaaacggaggaggctgaaaatattttttttgttttggcggtatgtactaagacgttgtatttagtcattgaaaatagattgattttcgg

SEQ ID NO: 48742 - DNA, 2201 bp, Zea Mays
tctccagctaattttagccactaactattagctctaatgcattcaagattaaacaccccccaaatcctagctgtcagttgtagttgcaatggactaggttgatatgcctgcttaagaaaacagcaaggtaatgagaatattaaaaacaagataaataggcagtaaaatgcataacctaccgtgagttcactgtctggctccagataaagcagagaagccaactgctcaccaacgaaaggttctagttcctggcaatctctgctgatctgcagtaatcagaagtgaactcaaaaattaaattctggaaaaaaaatcgagaatgcagatatatatattaaaaaagtatacgatttcaacaatctagtcaatcatcagtgtgtgcatagcactagaatttttgttacttttctttctggcctacattaattttgaatatccttccggcaagattacattttcagctagtgttttaatcatcatataaagtgtacaaaagtttgatatttaatttttttctcaaaaacgagcaggagagctgcgcccctttatattatatattaagaagataggaaaaaaggtctaaagtagaccaaacatcagcaggcctcctcacaggggccagaaaatagcatacaaaaaagaactcatcatgtgaaaggaacaaacaacacaccaccctagggagcagctgcagaagcagccagagaacataggcccttcgccctagctgcctcccaacgacttctctcctcatctgcccaagcaaggatataggtgaggcaaggagacaatccatcgaagacaattttgttccgatgaatccaaatagtccaagcacccaggataataagggagttaaggccttttctggtgacacctgagaccacctctgaaacctcctcccaccaattcaagaagaggtgaccgccggctggggggctagggagtgaagcccaaatttccggaaaagctggtaccaaaagactctcgagaaggagcaagccaccagaagatgatcaagagtttcttcagcttagtcacatagcagacatttctcatggtggtttaggcatttcttagctaatcgatctgctgtcttgtcctgcatctattatgggcagcaagccagatgaaaaaacgacacttcggcggagccaaacgtaaaaaatattataacctctgatgaaatataaatcgagactaaggatgaacagcatatgcgtggttcaaggttattaaggtgtagctttagcgtcgctaaagcgacgcctaagtggtaaggcgagtgcggaggcgtaaggtgtcctgtcgccttgactgcgagagcaaggcgcagccccgcagggaagaagaggtggtggcgcggcggcgacgcacagcgcagcacgtagttcgcggcggcgcacagagcataggttgtgggggagcggcaggcgcacagcgagtaggccatggcgacgcggcggcgcacagcgcgtaggtcacgccaagggaggagagctgcaagtagggggagcgggagaggagcgggagagggagaagctgctgctgtcggctgagggagaatctgctgctgccggctgaggaaggtaaccctaaaattgttaggctgggatgactggttatgggcttctttttctttttgttttttcttttacttttttctgtttctctcttctactaggctgaaatggacctactaggggtgaaaacgggacagatactgccggatactagctcatccccgtatcctaccctaatataattttctcggatatagaatcgggtactgatagttaaaactcaggacagatacaggacgagatcgggtaataattctggcgggtaagaaacggataccagatattactcgggtagataacagatatttgtcggatagtttgtcccgataatattaattatcaaaatgttcaacaaatcaataaaagaaggaatatataagcatgtatatgatgtggtctgctgcttctcttgggagtatgcaggggagagacaagagatggagcgtaaggcgtggggggatcaccgccgccggcctggctgtgatggtcagtcaggacgacctccctacctggagatctttattccttcaatacctaatacaaactaaaggcaaattcccttatagactgggactgccacaccaaccaataggataacaattatctgctataaaatag

SEQ ID NO: 48743 - DNA, 973 bp, Zea Mays
ctccgtctcagtcgctggcgcataggacctactggccaggttatctcccacagcgcgcggcgtcggactcggaaccgggaactccgttgctcgcgcggatctcgccaagctattgcccggggccatctggtcctctggctgggcatataaatgccgatgccccacgcccctgacgcacttgaatgcacctgggtggtgggcgccattgtcgacattggtggagggctatctgccgtcgctggcaatttggttctacgccgtcattctggtcccgacaggtggtgtgggagcttcgtgtgtgctcgcgcatggtgtgcatcgtcgtattgatccgagaccttcatcgggtgagggtgaattgctcgttgtcgactgggtttcgccgcggattgtctggttccgtggccgggggggggtcttcggcgccactaccggtaagtcatccatcctcgttttcatcatcatgtctgcatcacatcaacgctagcgggctcggggatagtgtccctaggcgaagaactagggttcaccgatgttgccgccgtcgtggctaatgtcgcggttgccgcagacttgttggggggagaagaagcaccagcaccgtcgatctttaatgtagtggccaagattagatccatggatggggatacctcggccatcggttttcggatggacgaatgagatttggcgcggggtaatgattcgggtgatctaagcaagggcgtcagatcgggatcgaacggtcctaagtccgtaccggttcagatgtgtggtcttctaatccgagcccctgattctcgatctgacggcacacagtttgccataccccttcggctagcgtgttttgtgaaagagaccctgaagaacatggaaaacaacccgccgtccaggttatgggtaaaatcattactgtggggtcctagcatttacaaaagtgacccagaacttatttaaaattgaggccaaatacctt

SEQ ID NO: 48744 - DNA, 491 bp, Zea Mays
ctccgtctcagtcgctggcgcataggacctactggccaggttatctcccacagcgcgcggcgtcggactcggaaccgggaactccgttgctcgcgcggatctcgccaagctattgcccggggccatctggtcctctggctgggcatataaatgccgatgccccacgcccctgacgcacttgaatgcacctgggtggtgggcgccattgtcgacattggtggagggctatctgccgtcgctggcaatttggttctacgccgtcattctggtcccgacaggtggtgtgggagcttcgtgtgtgctcgcgcatggtgtgcatcgtcgtattgatccgagaccttcatcgggtgagggtgaattgctcgttgtcgactgggtttcgccgcggattgtctggttccgtggccgggggggggtcttcggcgccactaccgcggtgagatcacgagaatctgaagatcatcctggtacctggaatcttgagtctcagg

SEQ ID NO: 48745 - DNA, 2088 bp, Zea Mays
atggacccgggcaacaaactggcctttgcaaaagcgcccttcagctcccggaccgcttcccctgagctgctgcccaagaacttcgacaccacttgcccaccctccctggattcttgcggctcttcctcgagctcatcgaatccttcatggagagcgccgagggaccgtccccgtactccggtgatcgagcgactccggcggacatacgggatattgtcactccatttgttcataaagcttgatgaggcaccggttcaggatggcaatggccaaactacacctgggcataattcgcgaaggccaaacctttctttgcaaataccagctaggaccttggataccaatataccttcatcgacaagagttactatatcctgcagccccagttcaacgagagtgggtttgccaccgagacctaattcgacgagaacaaaatcatctatcaagaacatgaatcctcagcacagtttcagagcaaggagttcagcccaggaaggtgatcgagtggtccttctaaatcctgggacgtcatctgaagggcagcaggataatccaagcacagcaagatcattttcttttagaaaggtcattaactcattatcggcaaaaaggacccattctcttccagtaacgcctgtaggaactactgacaaggctgcatctcctccaaatcaattagataccctgccaactacaactaatgaaggagttgaagcaaaaattaggcgctcactttcagtacctggaaatcgcaaaaacagaagtttgaggagggcagattcattaggtgtcatccgtgtgattccaacaaccccaagacctgtcccagtcgaagcaaccacatcaagcgatataattgaagaaacaatcgatgtccctgaagatggaggcgaagatattcctgaagaagaggcagtctgcagaatttgttttgttgaactcaacgaaggaggtgaaacacttaaaatggagtgcagctgcaaaggagaacttgcacttgcacaccaagactgtgctgtcaaatggtttagcatcaagggaaacaagatatgtgatgtctgtaaacaagaagttcagaatctgccagtgatgttactgagaataccaactcaaactgcaaacaggcgggtagcaaatgctgctcagcagagagcagctcaacaatacagattttggcaggacattccaattctggtgatggttagcatgcttgcgtacttctgtttcttggaacaactcctggttactgatttgcagtcacgtgcactggcaatttcgttgcctttctcgtgtgtgttaggcctcctttcttcaatgatagcatcaactatggtgtcgaagagctatctatgggcgtatgcttcattccagtttgctatcgttatcctgtttgctcatatcttctacaatgtgtacgaactctctactagtagagtatttgaggtggagagctaggaggaatcagcgtttggctcagcaggctgccaatgctgcacagcaccaagaatctggaaatgatggtggaaatgacaacgatgacgctcagcaagggcacgatccaaattctgggaacaatgctgtgtgatgattcaggttcttggtgcaaaaatccagcaccaaaaaaaagattatgaaatggtatgggtgtgaacagctgttttttttatctgtacagcaagtatagctcattcaacgcggcaccagtcacaagctgaaacctggaaaaacatatcttcatatgccacgtggagggcgctcacggatatcattatacatcacgcagagatgaagcaaaacacgatatgtttgtgtattagtccggtagtttgacttcaaatgtatctgttattcattttaagcttaatagatctaatgcattatagaagtacttcggtaagtgtgtgcagcttatagttgtgagttgcgagtatagccccatatagatatacatcaatgaaatgtacctttccagtatattgaggtttgctagccggcacggaacggaagaaatcctcagattgaattgtgatacaattgtctcaactgagaactacagaattgtatgcaatgcgagcgattgaaataccc

SEQ ID NO: 48746 - DNA, 2153 bp, Zea Mays
atggacccgggcaacaaactggcctttgcaaaagcgcccttcagctcccggaccgcttcccctgagctgctgcccaagaacttcgacaccacttgcccaccctccctggattcttgcggctcttcctcgagctcatcgaatccttcatggagagcgccgagggaccgtccccgtactccggtgatcgagcgactccggcggacatacgggatattgtcactccatttgttcataaagcttgatgaggcaccggttcaggatggcaatggccaaactacacctgggcataattcgcgaaggccaaacctttctttgcaaataccagctaggaccttggataccaatataccttcatcgacaagagttactatatcctgcagccccagttcaacgagagtgggtttgccaccgagacctaattcgacgagaacaaaatcatctatcaagaacatgaatcctcagcacagtttcagagcaaggagttcagcccaggaaggtgatcgagtggtccttctaaatcctgggacgtcatctgaagggcagcaggataatccaagcacagcaagatcattttcttttagaaaggtcattaactcattatcggcaaaaaggacccattctcttccagtaacgcctgtaggaactactgacaaggctgcatctcctccaaatcaattagataccctgccaactacaactaatgaaggagttgaagcaaaaattaggcgctcactttcagtacctggaaatcgcaaaaacagaagtttgaggagggcagattcattaggtgtcatccgtgtgattccaacaaccccaagacctgtcccagtcgaagcaaccacatcaagcgatataattgaagaaacaatcgatgtccctgaagatggaggcgaagatattcctgaagaagaggcagtctgcagaatttgttttgttgaactcaacgaaggaggtgaaacacttaaaatggagtgcagctgcaaaggagaacttgcacttgcacaccaagactgtgctgtcaaatggtttagcatcaagggaaacaagatatgtgatgtctgtaaacaagaagttcagaatctgccagtgatgttactgagaataccaactcaaactgcaaacaggcgggtagcaaatgctgctcagcagagagcagctcaacaatacagattttggcaggacattccaattctggtgatggttagcatgcttgcgtacttctgtttcttggaacaactcctggttactgatttgcagtcacgtgcactggcaatttcgttgcctttctcgtgtgtgttaggcctcctttcttcaatgatagcatcaactatggtgtcgaagagctatctatgggcgtatgcttcattccagtttgctatcgttatcctgtttgctcatatcttctacaatgtgttgaaagtgaatccagtccttgcagtcttactctcctcattcactgggtttggtattgctattagtacgaactctctactagtagagtatttgaggtggagagctaggaggaatcagcgtttggctcagcaggctgccaatgctgcacagcaccaagaatctggaaatgatggtggaaatgacaacgatgacgctcagcaagggcacgatccaaattctgggaacaatgctgtgtgatgattcaggttcttggtgcaaaaatccagcaccaaaaaaaagattatgaaatggtatgggtgtgaacagctgttttttttatctgtacagcaagtatagctcattcaacgcggcaccagtcacaagctgaaacctggaaaaacatatcttcatatgccacgtggagggcgctcacggatatcattatacatcacgcagagatgaagcaaaacacgatatgtttgtgtattagtccggtagtttgacttcaaatgtatctgttattcattttaagcttaatagatctaatgcattatagaagtacttcggtaagtgtgtgcagcttatagttgtgagttgcgagtatagccccatatagatatacatcaatgaaatgtacctttccagtatattgaggtttgctagccggcacggaacggaagaaatcctcagattgaattgtgatacaattgtctcaactgagaactacagaattgtatgcaatgcgagcgattgaaataccc

SEQ ID NO: 48747 - DNA, 2064 bp, Zea Mays
atggacccgggcaacaaactggcctttgcaaaagcgcccttcagctcccggaccgcttcccctgagctgctgcccaagaacttcgacaccacttgcccaccctccctggattcttgcggctcttcctcgagctcatcgaatccttcatggagagcgccgagggaccgtccccgtactccggtgatcgagcggcaccggttcaggatggcaatggccaaactacacctgggcataattcgcgaaggccaaacctttctttgcaaataccagctaggaccttggataccaatataccttcatcgacaagagttactatatcctgcagccccagttcaacgagagtgggtttgccaccgagacctaattcgacgagaacaaaatcatctatcaagaacatgaatcctcagcacagtttcagagcaaggagttcagcccaggaaggtgatcgagtggtccttctaaatcctgggacgtcatctgaagggcagcaggataatccaagcacagcaagatcattttcttttagaaaggtcattaactcattatcggcaaaaaggacccattctcttccagtaacgcctgtaggaactactgacaaggctgcatctcctccaaatcaattagataccctgccaactacaactaatgaaggagttgaagcaaaaattaggcgctcactttcagtacctggaaatcgcaaaaacagaagtttgaggagggcagattcattaggtgtcatccgtgtgattccaacaaccccaagacctgtcccagtcgaagcaaccacatcaagcgatataattgaagaaacaatcgatgtccctgaagatggaggcgaagatattcctgaagaagaggcagtctgcagaatttgttttgttgaactcaacgaaggaggtgaaacacttaaaatggagtgcagctgcaaaggagaacttgcacttgcacaccaagactgtgctgtcaaatggtttagcatcaagggaaacaagatatgtgatgtctgtaaacaagaagttcagaatctgccagtgatgttactgagaataccaactcaaactgcaaacaggcgggtagcaaatgctgctcagcagagagcagctcaacaatacagattttggcaggacattccaattctggtgatggttagcatgcttgcgtacttctgtttcttggaacaactcctggttactgatttgcagtcacgtgcactggcaatttcgttgcctttctcgtgtgtgttaggcctcctttcttcaatgatagcatcaactatggtgtcgaagagctatctatgggcgtatgcttcattccagtttgctatcgttatcctgtttgctcatatcttctacaatgtgttgaaagtgaatccagtccttgcagtcttactctcctcattcactgggtttggtattgctattagtacgaactctctactagtagagtatttgaggtggagagctaggaggaatcagcgtttggctcagcaggctgccaatgctgcacagcaccaagaatctggaaatgatggtggaaatgacaacgatgacgctcagcaagggcacgatccaaattctgggaacaatgctgtgtgatgattcagattatgaaatggtatgggtgtgaacagctgttttttttatctgtacagcaagtatagctcattcaacgcggcaccagtcacaagctgaaacctggaaaaacatatcttcatatgccacgtggagggcgctcacggatatcattatacatcacgcagagatgaagcaaaacacgatatgtttgtgtattagtccggtagtttgacttcaaatgtatctgttattcattttaagcttaatagatctaatgcattatagaagtacttcggtaagtgtgtgcagcttatagttgtgagttgcgagtatagccccatatagatatacatcaatgaaatgtacctttccagtatattgaggtttgctagccggcacggaacggaagaaatcctcagattgaattgtgatacaattgtctcaactgagaactacagaattgtatgcaatgcgagcgattgaaataccc

SEQ ID NO: 48748 - DNA, 3132 bp, Zea Mays
agagtcccgcagcgcacaacggccgcacaagcaaaggcgggggagagagctccgtgcagtcaccgtcgtgttcggaacgagcgagagagcgggagacgagtcgcggcgcctctgctgtgctgtcttcttctccccctctgctctgcttcggctcctcacgcggcctcgccgagacccgcagggggttcagacttcttggtgagagcgatatgagtgtcccaggtcaatgctcatcccagccacaatttatcaccagcgttgggaggagtaaccgctccaatggccccggcactcctcttatcgaaagcatagatgttgatcaaattgttattccagagaaaaacagttggaagaacttattctcatacatagggcctggatttctcgtctcaattgcatatattgatcctggaaactttgagacggatctacaggctggagcacagtacaaatatgagcttctttggatcatacttgttgcatcctgtgctgctcttattattcaatcacttgcagccaggctaggggttgtgacagggaaacatcttgcagagcattgcagggctgagtatcccaaggtcacaaattttgtcttatggattcttgcagaacttgctgttgttgcatgtgacattcctgaagtaattggaactgcttttgctctaaacatgctgttcagaatcccagtatggtgtggtgttctaataactggactcagcactctaatgctcttattgctgcagcaatatggggtccgtaagctagaatttctgattgcatttctggtgttcttaatagcaacatgtttcttagttgaacttgggtattctaaaccaaatgctccagaagttgttaggggcctttttgttcctgaacttaaaggaaatggagctacaggccttgctatctcattacttggtgctatggtgatgccgcacaatctttttctgcactcagcattagtattgtcaagaaaagtgccacggtctgttcatgggattaaggaggcctgcagattctatacgattgaaagtgcatttgcccttacagttgcttttctcatcaacatatctatcatatctgtcagtggttctgtctgtggttcaggtaatttaaacccagaagatcaagcaaattgcagtgatctggacctaaataaggcttcatttttgttaaagaatgtccttggaaactggagctcaaagttgtttgcagttgctttgttggcatctggtcagagttctacaattacggggacatatgctggacaatatgtcatgcaggtttttggaacttataccttatttcagttctagttcgcaagttgaatggcaggttgttttatgatgcatattactcgaggcatttgatgttgatcagaagtaatcaagcatttgcttgcttgcaacattagtttgtttagctgttagatatgaaaagtacagaaaataaattagtacataactcttagatttgcaatgaacaagcttgggcttatgagtttcagtgccaacctccaaggttctcttggtcagctagattgcagagaaaaaggacagatacggggtaagcttaggtcaccaccattattaatgtctcccattatttaatacagtacgctgctaattgtcttcccttgtctcaaataacgcgttgaatcattttaattatttttattgttttgcctaaaggaaaactaagtaatcaaccaagcattttggacttgtgaaacttcatttgctatatactaacatttactcacctaatctaggggtttttagatcttcggatgaaaccctggatacgcaatcttgtcacgaggtccttggctatcctgccaagtttgatcgtgtcaattattggtggttcttcagcagctggccagttgattatcattgcatcgatgatactgtcatttgaactcccttttgctttagttccactccttaaattcaccagcagcaaaacaaagatggggcagcatacaaattcaatattcactgctgtgctgacatggatgatcggctcgtttattgttgtcatcaacacctactttctgataacaagctttgtgaaattgctcgtccagagcgggctgaccaccatttctcaagtattttccggtattttcgggtttttgggcatgctgatttacatagttgcgatcctatacctcgtctttaggaggaacaggaagtccacccagccattgctggagagcgatgctgagcttgcagtatcgggtagcagtgctgatgccggagcagaatgctcgctgggccatttgccccgtgaggacatctccagcatgcaacttccgcagcagcgttcagcttctgatctagattagataacagctgccaggaaaataaatgttttttttgttttttatatagtatagtaattacagaatagggtacgtcaggtattggcttctgttcatcctactgatgatgcttaaggaatgtatacaagaggacggatatctatgctgccaaacaaaaaaatggggcacaaaagaatttagtgcctgtttttgggaagtgatgtgaactgaatcctggaaggggcaaaaaaaaaaaatgttggaatccaattgttgaaaattcttcattctaaacatgaggccgttggtaaaaaatgtctacatgctgtaaacatactatattttgacattattatcacagttaatatatactggacatgctgttttatgtgttgtgcattccagtggctgcaggccttgctcagagctagtttggtgattagagaaatggagaagttctatgtaccctttatttttctggccactaaattagcccttatagtgccgatattttctgaatagaatcaggtgaatccacccttctagttctgctgctgacaagcaggtgaccaagccctgtgaatggagctcatgccaaagacaactgctaaatgcgccttcgtttttcaaggtagcagaatagcagctgagaaacctttttcggcgacagtctaacagtctcatcctaccctaacttttaaaatatggaccataagcacgtctctactaatataaaaggagtttgtctatgtgtgtcgctcctcttccggcccctttctactttttacagaaaaaaataagataaa

SEQ ID NO: 48749 - DNA, 2932 bp, Zea Mays
agagtcccgcagcgcacaacggccgcacaagcaaaggcgggggagagagctccgtgcagtcaccgtcgtgttcggaacgagcgagagagcgggagacgagtcgcggcgcctctgctgtgctgtcttcttctccccctctgctctgcttcggctcctcacgcggcctcgccgagacccgcagaacagggggttcagacttcttggtgagagcgatatgagtgtcccaggtcaatgctcatcccagccacaatttatcaccagcgttgggaggagtaaccgctccaatggccccggcactcctcttatcgaaagcatagatgttgatcaaattgttattccagagaaaaacagttggaagaacttattctcatacatagggcctggatttctcgtctcaattgcatatattgatcctggaaactttgagacggatctacaggctggagcacagtacaaatatgagcttctttggatcatacttgttgcatcctgtgctgctcttattattcaatcacttgcagccaggctaggggttgtgacagggaaacatcttgcagagcattgcagggctgagtatcccaaggtcacaaattttgtcttatggattcttgcagaacttgctgttgttgcatgtgacattcctgaagtaattggaactgcttttgctctaaacatgctgttcagaatcccagtatggtgtggtgttctaataactggactcagcactctaatgctcttattgctgcagcaatatggggtccgtaagctagaatttctgattgcatttctggtgttcttaatagcaacatgtttcttagttgaacttgggtattctaaaccaaatgctccagaagttgttaggggcctttttgttcctgaacttaaaggaaatggagctacaggccttgctatctcattacttggtgctatggtgatgccgcacaatctttttctgcactcagcattagtattgtcaagaaaagtgccacggtctgttcatgggattaaggaggcctgcagattctatacgattgaaagtgcatttgcccttacagttgcttttctcatcaacatatctatcatatctgtcagtggttctgtctgtggttcaggtaatttaaacccagaagatcaagcaaattgcagtgatctggacctaaataaggcttcatttttgttaaagaatgtccttggaaactggagctcaaagttgtttgcagttgctttgttggcatctggtcagagttctacaattacggggacatatgctggacaatatgtcatgcaggtttttggaacttataccttatttcagttctagttcgcaagttgaatggcaggttgttttatgatgcatattactcgaggcatttgatgttgatcagaagtaatcaagcatttgcttgcttgcaacattagtttgtttagctgttagatatgaaaagtacagaaaataaattagtacataactcttagatttgcaatgaacaagcttgggcttatgagtttcagtgccaacctccaaggttctcttggtcagctagattgcagagaaaaaggacagatacggggggtttttagatcttcggatgaaaccctggatacgcaatcttgtcacgaggtccttggctatcctgccaagtttgatcgtgtcaattattggtggttcttcagcagctggccagttgattatcattgcatcgatgatactgtcatttgaactcccttttgctttagttccactccttaaattcaccagcagcaaaacaaagatggggcagcatacaaattcaatattcactgctgtgctgacatggatgatcggctcgtttattgttgtcatcaacacctactttctgataacaagctttgtgaaattgctcgtccagagcgggctgaccaccatttctcaagtattttccggtattttcgggtttttgggcatgctgatttacatagttgcgatcctatacctcgtctttaggaggaacaggaagtccacccagccattgctggagagcgatgctgagcttgcagtatcgggtagcagtgctgatgccggagcagaatgctcgctgggccatttgccccgtgaggacatctccagcatgcaacttccgcagcagcgttcagcttctgatctagattagataacagctgccaggaaaataaatgttttttttgttttttatatagtatagtaattacagaatagggtacgtcaggtattggcttctgttcatcctactgatgatgcttaaggaatgtatacaagaggacggatatctatgctgccaaacaaaaaaatggggcacaaaagaatttagtgcctgtttttgggaagtgatgtgaactgaatcctggaaggggcaaaaaaaaaaaatgttggaatccaattgttgaaaattcttcattctaaacatgaggccgttggtaaaaaatgtctacatgctgtaaacatactatattttgacattattatcacagttaatatatactggacatgctgttttatgtgttgtgcattccagtggctgcaggccttgctcagagctagtttggtgattagagaaatggagaagttctatgtaccctttatttttctggccactaaattagcccttatagtgccgatattttctgaatagaatcaggtgaatccacccttctagttctgctgctgacaagcaggtgaccaagccctgtgaatggagctcatgccaaagacaactgctaaatgcgccttcgtttttcaaggtagcagaatagcagctgagaaacctttttcggcgacagtctaacagtctcatcctaccctaacttttaaaatatggaccataagcacgtctctactaatataaaaggagtttgtctatgtgtgtcgctcctcttccggcccctttctactttttacagaaaaaaataagataaa

SEQ ID NO: 48750 - DNA, 3108 bp, Zea Mays
gcacaagcaaaggcgggggagagagctccgtgcagtcaccgtcgtgttcggaacgagcgagagagcgggagacgagtcgcggcgcctctgctgtgctgtcttcttctccccctctgctctgcttcggctcctcacgcggcctcgccgagacccgcagaacagggggttcagacttcttggtgagagcgatatgagtgtcccaggtcaatgctcatcccagccacaatttatcaccagcgttgggaggagtaaccgctccaatggccccggcactcctcttatcgaaagcatagatgttgatcaaattgttattccagagaaaaacagttggaagaacttattctcatacatagggcctggatttctcgtctcaattgcatatattgatcctggaaactttgagacggatctacaggctggagcacagtacaaatatgaggtgcctgctgcttcagtcttatgttcccacttcttctttggatcatacttgttgcatcctgtgctgctcttattattcaatcacttgcagccaggctaggggttgtgacagggaaacatcttgcagagcattgcagggctgagtatcccaaggtcacaaattttgtcttatggattcttgcagaacttgctgttgttgcatgtgacattcctgaagaatcccagtatggtgtggtgttctaataactggactcagcactctaatgctcttattgctgcagcaatatggggtccgtaagctagaatttctgattgcatttctggtgttcttaatagcaacatgtttcttagttgaacttgggtattctaaaccaaatgctccagaagttgttaggggcctttttgttcctgaacttaaaggaaatggagctacaggccttgctatctcattacttggtgctatggtgatgccgcacaatctttttctgcactcagcattagtattgtcaagaaaagtgccacggtctgttcatgggattaaggaggcctgcagattctatacgattgaaagtgcatttgcccttacagttgcttttctcatcaacatatctatcatatctgtcagtggttctgtctgtggttcaggtaatttaaacccagaagatcaagcaaattgcagtgatctggacctaaataaggcttcatttttgttaaagaatgtccttggaaactggagctcaaagttgtttgcagttgctttgttggcatctggtcagagttctacaattacggggacatatgctggacaatatgtcatgcaggtttttggaacttataccttatttcagttctagttcgcaagttgaatggcaggttgttttatgatgcatattactcgaggcatttgatgttgatcagaagtaatcaagcatttgcttgcttgcaacattagtttgtttagctgttagatatgaaaagtacagaaaataaattagtacataactcttagatttgcaatgaacaagcttgggcttatgagtttcagtgccaacctccaaggttctcttggtcagctagattgcagagaaaaaggacagatacggggtaagcttaggtcaccaccattattaatgtctcccattatttaatacagtacgctgctaattgtcttcccttgtctcaaataacgcgttgaatcattttaattatttttattgttttgcctaaaggaaaactaagtaatcaaccaagcattttggacttgtgaaacttcatttgctatatactaacatttactcacctaatctaggggtttttagatcttcggatgaaaccctggatacgcaatcttgtcacgaggtccttggctatcctgccaagtttgatcgtgtcaattattggtggttcttcagcagctggccagttgattatcattgcatcgatgatactgtcatttgaactcccttttgctttagttccactccttaaattcaccagcagcaaaacaaagatggggcagcatacaaattcaatattcactgctgtgctgacatggatgatcggctcgtttattgttgtcatcaacacctactttctgataacaagctttgtgaaattgctcgtccagagcgggctgaccaccatttctcaagtattttccggtattttcgggtttttgggcatgctgatttacatagttgcgatcctatacctcgtctttaggaggaacaggaagtccacccagccattgctggagagcgatgctgagcttgcagtatcgggtagcagtgctgatgccggagcagaatgctcgctgggccatttgccccgtgaggacatctccagcatgcaacttccgcagcagcgttcagcttctgatctagattagataacagctgccaggaaaataaatgttttttttgttttttatatagtatagtaattacagaatagggtacgtcaggtattggcttctgttcatcctactgatgatgcttaaggaatgtatacaagaggacggatatctatgctgccaaacaaaaaaatggggcacaaaagaatttagtgcctgtttttgggaagtgatgtgaactgaatcctggaaggggcaaaaaaaaaaaatgttggaatccaattgttgaaaattcttcattctaaacatgaggccgttggtaaaaaatgtctacatgctgtaaacatactatattttgacattattatcacagttaatatatactggacatgctgttttatgtgttgtgcattccagtggctgcaggccttgctcagagctagtttggtgattagagaaatggagaagttctatgtaccctttatttttctggccactaaattagcccttatagtgccgatattttctgaatagaatcaggtgaatccacccttctagttctgctgctgacaagcaggtgaccaagccctgtgaatggagctcatgccaaagacaactgctaaatgcgccttcgtttttcaaggtagcagaatagcagctgagaaacctttttcggcgacagtctaacagtctcatcctaccctaacttttaaaatatggaccataagcacgtctctactaatataaaaggagtttgtctatgtgtgtcgctcctcttccggcccctttctactttttacagaaaaaaataagataaa

SEQ ID NO: 48751 - DNA, 3145 bp, Zea Mays
gcacaagcaaaggcgggggagagagctccgtgcagtcaccgtcgtgttcggaacgagcgagagagcgggagacgagtcgcggcgcctctgctgtgctgtcttcttctccccctctgctctgcttcggctcctcacgcggcctcgccgagacccgcagaacagggggttcagacttcttggtgagagcgatatgagtgtcccaggtcaatgctcatcccagccacaatttatcaccagcgttgggaggagtaaccgctccaatggccccggcactcctcttatcgaaagcatagatgttgatcaaattgttattccagagaaaaacagttggaagaacttattctcatacatagggcctggatttctcgtctcaattgcatatattgatcctggaaactttgagacggatctacaggctggagcacagtacaaatatgaggtgcctgctgcttcagtcttatgttcccacttcttctttggatcatacttgttgcatcctgtgctgctcttattattcaatcacttgcagccaggctaggggttgtgacagggaaacatcttgcagagcattgcagggctgagtatcccaaggtcacaaattttgtcttatggattcttgcagaacttgctgttgttgcatgtgacattcctgaagtaattggaactgcttttgctctaaacatgctgttcagaatcccagtatggtgtggtgttctaataactggactcagcactctaatgctcttattgctgcagcaatatggggtccgtaagctagaatttctgattgcatttctggtgttcttaatagcaacatgtttcttagttgaacttgggtattctaaaccaaatgctccagaagttgttaggggcctttttgttcctgaacttaaaggaaatggagctacaggccttgctatctcattacttggtgctatggtgatgccgcacaatctttttctgcactcagcattagtattgtcaagaaaagtgccacggtctgttcatgggattaaggaggcctgcagattctatacgattgaaagtgcatttgcccttacagttgcttttctcatcaacatatctatcatatctgtcagtggttctgtctgtggttcaggtaatttaaacccagaagatcaagcaaattgcagtgatctggacctaaataaggcttcatttttgttaaagaatgtccttggaaactggagctcaaagttgtttgcagttgctttgttggcatctggtcagagttctacaattacggggacatatgctggacaatatgtcatgcaggtttttggaacttataccttatttcagttctagttcgcaagttgaatggcaggttgttttatgatgcatattactcgaggcatttgatgttgatcagaagtaatcaagcatttgcttgcttgcaacattagtttgtttagctgttagatatgaaaagtacagaaaataaattagtacataactcttagatttgcaatgaacaagcttgggcttatgagtttcagtgccaacctccaaggttctcttggtcagctagattgcagagaaaaaggacagatacggggtaagcttaggtcaccaccattattaatgtctcccattatttaatacagtacgctgctaattgtcttcccttgtctcaaataacgcgttgaatcattttaattatttttattgttttgcctaaaggaaaactaagtaatcaaccaagcattttggacttgtgaaacttcatttgctatatactaacatttactcacctaatctaggggtttttagatcttcggatgaaaccctggatacgcaatcttgtcacgaggtccttggctatcctgccaagtttgatcgtgtcaattattggtggttcttcagcagctggccagttgattatcattgcatcgatgatactgtcatttgaactcccttttgctttagttccactccttaaattcaccagcagcaaaacaaagatggggcagcatacaaattcaatattcactgctgtgctgacatggatgatcggctcgtttattgttgtcatcaacacctactttctgataacaagctttgtgaaattgctcgtccagagcgggctgaccaccatttctcaagtattttccggtattttcgggtttttgggcatgctgatttacatagttgcgatcctatacctcgtctttaggaggaacaggaagtccacccagccattgctggagagcgatgctgagcttgcagtatcgggtagcagtgctgatgccggagcagaatgctcgctgggccatttgccccgtgaggacatctccagcatgcaacttccgcagcagcgttcagcttctgatctagattagataacagctgccaggaaaataaatgttttttttgttttttatatagtatagtaattacagaatagggtacgtcaggtattggcttctgttcatcctactgatgatgcttaaggaatgtatacaagaggacggatatctatgctgccaaacaaaaaaatggggcacaaaagaatttagtgcctgtttttgggaagtgatgtgaactgaatcctggaaggggcaaaaaaaaaaaatgttggaatccaattgttgaaaattcttcattctaaacatgaggccgttggtaaaaaatgtctacatgctgtaaacatactatattttgacattattatcacagttaatatatactggacatgctgttttatgtgttgtgcattccagtggctgcaggccttgctcagagctagtttggtgattagagaaatggagaagttctatgtaccctttatttttctggccactaaattagcccttatagtgccgatattttctgaatagaatcaggtgaatccacccttctagttctgctgctgacaagcaggtgaccaagccctgtgaatggagctcatgccaaagacaactgctaaatgcgccttcgtttttcaaggtagcagaatagcagctgagaaacctttttcggcgacagtctaacagtctcatcctaccctaacttttaaaatatggaccataagcacgtctctactaatataaaaggagtttgtctatgtgtgtcgctcctcttccggcccctttctactttttacagaaaaaaataagataaa

SEQ ID NO: 48752 - DNA, 2949 bp, Zea Mays
gcacaagcaaaggcgggggagagagctccgtgcagtcaccgtcgtgttcggaacgagcgagagagcgggagacgagtcgcggcgcctctgctgtgctgtcttcttctccccctctgctctgcttcggctcctcacgcggcctcgccgagacccgcagggggttcagacttcttggtgagagcgatatgagtgtcccaggtcaatgctcatcccagccacaatttatcaccagcgttgggaggagtaaccgctccaatggccccggcactcctcttatcgaaagcatagatgttgatcaaattgttattccagagaaaaacagttggaagaacttattctcatacatagggcctggatttctcgtctcaattgcatatattgatcctggaaactttgagacggatctacaggctggagcacagtacaaatatgagcttctttggatcatacttgttgcatcctgtgctgctcttattattcaatcacttgcagccaggctaggggttgtgacagggaaacatcttgcagagcattgcagggctgagtatcccaaggtcacaaattttgtcttatggattcttgcagaacttgctgttgttgcatgtgacattcctgaagaatcccagtatggtgtggtgttctaataactggactcagcactctaatgctcttattgctgcagcaatatggggtccgtaagctagaatttctgattgcatttctggtgttcttaatagcaacatgtttcttagttgaacttgggtattctaaaccaaatgctccagaagttgttaggggcctttttgttcctgaacttaaaggaaatggagctacaggccttgctatctcattacttggtgctatggtgatgccgcacaatctttttctgcactcagcattagtattgtcaagaaaagtgccacggtaatttaaacccagaagatcaagcaaattgcagtgatctggacctaaataaggcttcatttttgttaaagaatgtccttggaaactggagctcaaagttgtttgcagttgctttgttggcatctggtcagagttctacaattacggggacatatgctggacaatatgtcatgcaggtttttggaacttataccttatttcagttctagttcgcaagttgaatggcaggttgttttatgatgcatattactcgaggcatttgatgttgatcagaagtaatcaagcatttgcttgcttgcaacattagtttgtttagctgttagatatgaaaagtacagaaaataaattagtacataactcttagatttgcaatgaacaagcttgggcttatgagtttcagtgccaacctccaaggttctcttggtcagctagattgcagagaaaaaggacagatacggggtaagcttaggtcaccaccattattaatgtctcccattatttaatacagtacgctgctaattgtcttcccttgtctcaaataacgcgttgaatcattttaattatttttattgttttgcctaaaggaaaactaagtaatcaaccaagcattttggacttgtgaaacttcatttgctatatactaacatttactcacctaatctaggggtttttagatcttcggatgaaaccctggatacgcaatcttgtcacgaggtccttggctatcctgccaagtttgatcgtgtcaattattggtggttcttcagcagctggccagttgattatcattgcatcgatgatactgtcatttgaactcccttttgctttagttccactccttaaattcaccagcagcaaaacaaagatggggcagcatacaaattcaatattcactgctgtgctgacatggatgatcggctcgtttattgttgtcatcaacacctactttctgataacaagctttgtgaaattgctcgtccagagcgggctgaccaccatttctcaagtattttccggtattttcgggtttttgggcatgctgatttacatagttgcgatcctatacctcgtctttaggaggaacaggaagtccacccagccattgctggagagcgatgctgagcttgcagtatcgggtagcagtgctgatgccggagcagaatgctcgctgggccatttgccccgtgaggacatctccagcatgcaacttccgcagcagcgttcagcttctgatctagattagataacagctgccaggaaaataaatgttttttttgttttttatatagtatagtaattacagaatagggtacgtcaggtattggcttctgttcatcctactgatgatgcttaaggaatgtatacaagaggacggatatctatgctgccaaacaaaaaaatggggcacaaaagaatttagtgcctgtttttgggaagtgatgtgaactgaatcctggaaggggcaaaaaaaaaaaatgttggaatccaattgttgaaaattcttcattctaaacatgaggccgttggtaaaaaatgtctacatgctgtaaacatactatattttgacattattatcacagttaatatatactggacatgctgttttatgtgttgtgcattccagtggctgcaggccttgctcagagctagtttggtgattagagaaatggagaagttctatgtaccctttatttttctggccactaaattagcccttatagtgccgatattttctgaatagaatcaggtgaatccacccttctagttctgctgctgacaagcaggtgaccaagccctgtgaatggagctcatgccaaagacaactgctaaatgcgccttcgtttttcaaggtagcagaatagcagctgagaaacctttttcggcgacagtctaacagtctcatcctaccctaacttttaaaatatggaccataagcacgtctctactaatataaaaggagtttgtctatgtgtgtcgctcctcttccggcccctttctactttttacagaaaaaaataagataaa

SEQ ID NO: 48753 - DNA, 3007 bp, Zea Mays
gcacaagcaaaggcgggggagagagctccgtgcagtcaccgtcgtgttcggaacgagcgagagagcgggagacgagtcgcggcgcctctgctgtgctgtcttcttctccccctctgctctgcttcggctcctcacgcggcctcgccgagacccgcagggggttcagacttcttggtgagagcgatatgagtgtcccaggtcaatgctcatcccagccacaatttatcaccagcgttgggaggagtaaccgctccaatggccccggcactcctcttatcgaaagcatagatgttgatcaaattgttattccagagaaaaacagttggaagaacttattctcatacatagggcctggatttctcgtctcaattgcatatattgatcctggaaactttgagacggatctacaggctggagcacagtacaaatatgagcttctttggatcatacttgttgcatcctgtgctgctcttattattcaatcacttgcagccaggctaggggttgtgacagggaaacatcttgcagagcattgcagggctgagtatcccaagaatcccagtatggtgtggtgttctaataactggactcagcactctaatgctcttattgctgcagcaatatggggtccgtaagctagaatttctgattgcatttctggtgttcttaatagcaacatgtttcttagttgaacttgggtattctaaaccaaatgctccagaagttgttaggggcctttttgttcctgaacttaaaggaaatggagctacaggccttgctatctcattacttggtgctatggtgatgccgcacaatctttttctgcactcagcattagtattgtcaagaaaagtgccacggtctgttcatgggattaaggaggcctgcagattctatacgattgaaagtgcatttgcccttacagttgcttttctcatcaacatatctatcatatctgtcagtggttctgtctgtggttcaggtaatttaaacccagaagatcaagcaaattgcagtgatctggacctaaataaggcttcatttttgttaaagaatgtccttggaaactggagctcaaagttgtttgcagttgctttgttggcatctggtcagagttctacaattacggggacatatgctggacaatatgtcatgcaggtttttggaacttataccttatttcagttctagttcgcaagttgaatggcaggttgttttatgatgcatattactcgaggcatttgatgttgatcagaagtaatcaagcatttgcttgcttgcaacattagtttgtttagctgttagatatgaaaagtacagaaaataaattagtacataactcttagatttgcaatgaacaagcttgggcttatgagtttcagtgccaacctccaaggttctcttggtcagctagattgcagagaaaaaggacagatacggggtaagcttaggtcaccaccattattaatgtctcccattatttaatacagtacgctgctaattgtcttcccttgtctcaaataacgcgttgaatcattttaattatttttattgttttgcctaaaggaaaactaagtaatcaaccaagcattttggacttgtgaaacttcatttgctatatactaacatttactcacctaatctaggggtttttagatcttcggatgaaaccctggatacgcaatcttgtcacgaggtccttggctatcctgccaagtttgatcgtgtcaattattggtggttcttcagcagctggccagttgattatcattgcatcgatgatactgtcatttgaactcccttttgctttagttccactccttaaattcaccagcagcaaaacaaagatggggcagcatacaaattcaatattcactgctgtgctgacatggatgatcggctcgtttattgttgtcatcaacacctactttctgataacaagctttgtgaaattgctcgtccagagcgggctgaccaccatttctcaagtattttccggtattttcgggtttttgggcatgctgatttacatagttgcgatcctatacctcgtctttaggaggaacaggaagtccacccagccattgctggagagcgatgctgagcttgcagtatcgggtagcagtgctgatgccggagcagaatgctcgctgggccatttgccccgtgaggacatctccagcatgcaacttccgcagcagcgttcagcttctgatctagattagataacagctgccaggaaaataaatgttttttttgttttttatatagtatagtaattacagaatagggtacgtcaggtattggcttctgttcatcctactgatgatgcttaaggaatgtatacaagaggacggatatctatgctgccaaacaaaaaaatggggcacaaaagaatttagtgcctgtttttgggaagtgatgtgaactgaatcctggaaggggcaaaaaaaaaaaatgttggaatccaattgttgaaaattcttcattctaaacatgaggccgttggtaaaaaatgtctacatgctgtaaacatactatattttgacattattatcacagttaatatatactggacatgctgttttatgtgttgtgcattccagtggctgcaggccttgctcagagctagtttggtgattagagaaatggagaagttctatgtaccctttatttttctggccactaaattagcccttatagtgccgatattttctgaatagaatcaggtgaatccacccttctagttctgctgctgacaagcaggtgaccaagccctgtgaatggagctcatgccaaagacaactgctaaatgcgccttcgtttttcaaggtagcagaatagcagctgagaaacctttttcggcgacagtctaacagtctcatcctaccctaacttttaaaatatggaccataagcacgtctctactaatataaaaggagtttgtctatgtgtgtcgctcctcttccggcccctttctactttttacagaaaaaaataagataaa

SEQ ID NO: 48754 - DNA, 2898 bp, Zea Mays
gcacaagcaaaggcgggggagagagctccgtgcagtcaccgtcgtgttcggaacgagcgagagagcgggagacgagtcgcggcgcctctgctgtgctgtcttcttctccccctctgctctgcttcggctcctcacgcggcctcgccgagacccgcagaacagggggttcagacttcttggtgagagcgatatgagtgtcccaggtcaatgctcatcccagccacaatttatcaccagcgttgggaggagtaaccgctccaatggccccggcactcctcttatcgaaagcatagatgttgatcaaattgttattccagagaaaaacagttggaagaacttattctcatacatagggcctggatttctcgtctcaattgcatatattgatcctggaaactttgagacggatctacaggctggagcacagtacaaatatgagcttctttggatcatacttgttgcatcctgtgctgctcttattattcaatcacttgcagccaggctaggggttgtgacagggaaacatcttgcagagcattgcagggctgagtatcccaaggtcacaaattttgtcttatggattcttgcagaacttgctgttgttgcatgtgacattcctgaagtaattggaactgcttttgctctaaacatgctgttcagaatcccagtatggtgtggtgttctaataactggactcagcactctaatgctcttattgctgcagcaatatggggtccgtaagctagaatttctgattgcatttctggtgttcttaatagcaacatgtttcttagttgaacttgggtattctaaaccaaatgctccagaagttgttaggggcctttttgttcctgaacttaaaggaaatggagctacaggccttgctatctcattacttggtgctatggtgatgccgcacaatctttttctgcactcagcattagtattgtcaagaaaagtgccacggtctgttcatgggattaaggaggcctgcagattctatacgattgaaagtgcatttgcccttacagttgcttttctcatcaacatatctatcatatctgtcagtggttctgtctgtggttcaggtaatttaaacccagaagatcaagcaaattgcagtgatctggacctaaataaggcttcatttttgttaaagaatgtccttggaaactggagctcaaagttgtttgcagttgctttgttggcatctggtcagagttctacaattacggggacatatgctggacaatatgtcatgcaggtttttggaacttataccttatttcagttctagttcgcaagttgaatggcaggttgttttatgatgcatattactcgaggcatttgatgttgatcagaagtaatcaagcatttgcttgcttgcaacattagtttgtttagctgttagatatgaaaagtacagaaaataaattagtacataactcttagatttgcaatgaacaagcttgggcttatgagtttcagtgccaacctccaaggttctcttggtcagctagattgcagagaaaaaggacagatacgggatcttcggatgaaaccctggatacgcaatcttgtcacgaggtccttggctatcctgccaagtttgatcgtgtcaattattggtggttcttcagcagctggccagttgattatcattgcatcgatgatactgtcatttgaactcccttttgctttagttccactccttaaattcaccagcagcaaaacaaagatggggcagcatacaaattcaatattcactgctgtgctgacatggatgatcggctcgtttattgttgtcatcaacacctactttctgataacaagctttgtgaaattgctcgtccagagcgggctgaccaccatttctcaagtattttccggtattttcgggtttttgggcatgctgatttacatagttgcgatcctatacctcgtctttaggaggaacaggaagtccacccagccattgctggagagcgatgctgagcttgcagtatcgggtagcagtgctgatgccggagcagaatgctcgctgggccatttgccccgtgaggacatctccagcatgcaacttccgcagcagcgttcagcttctgatctagattagataacagctgccaggaaaataaatgttttttttgttttttatatagtatagtaattacagaatagggtacgtcaggtattggcttctgttcatcctactgatgatgcttaaggaatgtatacaagaggacggatatctatgctgccaaacaaaaaaatggggcacaaaagaatttagtgcctgtttttgggaagtgatgtgaactgaatcctggaaggggcaaaaaaaaaaaatgttggaatccaattgttgaaaattcttcattctaaacatgaggccgttggtaaaaaatgtctacatgctgtaaacatactatattttgacattattatcacagttaatatatactggacatgctgttttatgtgttgtgcattccagtggctgcaggccttgctcagagctagtttggtgattagagaaatggagaagttctatgtaccctttatttttctggccactaaattagcccttatagtgccgatattttctgaatagaatcaggtgaatccacccttctagttctgctgctgacaagcaggtgaccaagccctgtgaatggagctcatgccaaagacaactgctaaatgcgccttcgtttttcaaggtagcagaatagcagctgagaaacctttttcggcgacagtctaacagtctcatcctaccctaacttttaaaatatggaccataagcacgtctctactaatataaaaggagtttgtctatgtgtgtcgctcctcttccggcccctttctactttttacagaaaaaaataagataaa

SEQ ID NO: 48755 - DNA, 3113 bp, Zea Mays
gcacaagcaaaggcgggggagagagctccgtgcagtcaccgtcgtgttcggaacgagcgagagagcgggagacgagtcgcggcgcctctgctgtgctgtcttcttctccccctctgctctgcttcggctcctcacgcggcctcgccgagacccgcagaacagggggttcagacttcttggtgagagcgatatgagtgtcccaggtcaatgctcatcccagccacaatttatcaccagcgttgggaggagtaaccgctccaatggccccggcactcctcttatcgaaagcatagatgttgatcaaattgttattccagagaaaaacagttggaagaacttattctcatacatagggcctggatttctcgtctcaattgcatatattgatcctggaaactttgagacggatctacaggctggagcacagtacaaatatgagcttctttggatcatacttgttgcatcctgtgctgctcttattattcaatcacttgcagccaggctaggggttgtgacagggaaacatcttgcagagcattgcagggctgagtatcccaaggtcacaaattttgtcttatggattcttgcagaacttgctgttgttgcatgtgacattcctgaagtaattggaactgcttttgctctaaacatgctgttcagaatcccagtatggtgtggtgttctaataactggactcagcactctaatgctcttattgctgcagcaatatggggtccgtaagctagaatttctgattgcatttctggtgttcttaatagcaacatgtttcttagttgaacttgggtattctaaaccaaatgctccagaagttgttaggggcctttttgttcctgaacttaaaggaaatggagctacaggccttgctatctcattacttggtgctatggtgatgccgcacaatctttttctgcactcagcattagtattgtcaagaaaagtgccacggtctgttcatgggattaaggaggcctgcagattctatacgattgaaagtgcatttgcccttacagttgcttttctcatcaacatatctatcatatctgtcagtggttctgtctgtggttcaggtaatttaaacccagaagatcaagcaaattgcagtgatctggacctaaataaggcttcatttttgttaaagaatgtccttggaaactggagctcaaagttgtttgcagttgctttgttggcatctggtcagagttctacaattacggggacatatgctggacaatatgtcatgcaggtttttggaacttataccttatttcagttctagttcgcaagttgaatggcaggttgttttatgatgcatattactcgaggcatttgatgttgatcagaagtaatcaagcatttgcttgcttgcaacattagtttgtttagctgttagatatgaaaagtacagaaaataaattagtacataactcttagatttgcaatgaacaagcttgggcttatgagtttcagtgccaacctccaaggttctcttggtcagctagattgcagagaaaaaggacagatacggggtaagcttaggtcaccaccattattaatgtctcccattatttaatacagtacgctgctaattgtcttcccttgtctcaaataacgcgttgaatcattttaattatttttattgttttgcctaaaggaaaactaagtaatcaaccaagcattttggacttgtgaaacttcatttgctatatactaacatttactcacctaatctaggggtttttagatcttcggatgaaaccctggatacgcaatcttgtcacgaggtccttggctatcctgccaagtttgatcgtgtcaattattggtggttcttcagcagctggccagttgattatcattgcatcgatgatactgtcatttgaactcccttttgctttagttccactccttaaattcaccagcagcaaaacaaagatggggcagcatacaaattcaatattcactgctgtgctgacatggatgatcggctcgtttattgttgtcatcaacacctactttctgataacaagctttgtgaaattgctcgtccagagcgggctgaccaccatttctcaagtattttccggtattttcgggtttttgggcatgctgatttacatagttgcgatcctatacctcgtctttaggaggaacaggaagtccacccagccattgctggagagcgatgctgagcttgcagtatcgggtagcagtgctgatgccggagcagaatgctcgctgggccatttgccccgtgaggacatctccagcatgcaacttccgcagcagcgttcagcttctgatctagattagataacagctgccaggaaaataaatgttttttttgttttttatatagtatagtaattacagaatagggtacgtcaggtattggcttctgttcatcctactgatgatgcttaaggaatgtatacaagaggacggatatctatgctgccaaacaaaaaaatggggcacaaaagaatttagtgcctgtttttgggaagtgatgtgaactgaatcctggaaggggcaaaaaaaaaaaatgttggaatccaattgttgaaaattcttcattctaaacatgaggccgttggtaaaaaatgtctacatgctgtaaacatactatattttgacattattatcacagttaatatatactggacatgctgttttatgtgttgtgcattccagtggctgcaggccttgctcagagctagtttggtgattagagaaatggagaagttctatgtaccctttatttttctggccactaaattagcccttatagtgccgatattttctgaatagaatcaggtgaatccacccttctagttctgctgctgacaagcaggtgaccaagccctgtgaatggagctcatgccaaagacaactgctaaatgcgccttcgtttttcaaggtagcagaatagcagctgagaaacctttttcggcgacagtctaacagtctcatcctaccctaacttttaaaatatggaccataagcacgtctctactaatataaaaggagtttgtctatgtgtgtcgctcctcttccggcccctttctactttttacagaaaaaaataagataaa

SEQ ID NO: 48756 - DNA, 2683 bp, Zea Mays
gcacaagcaaaggcgggggagagagctccgtgcagtcaccgtcgtgttcggaacgagcgagagagcgggagacgagtcgcggcgcctctgctgtgctgtcttcttctccccctctgctctgcttcggctcctcacgcggcctcgccgagacccgcagaacagggggttcagacttcttggtgagagcgatatgagtgtcccaggtcaatgctcatcccagccacaatttatcaccagcgttgggaggagtaaccgctccaatggccccggcactcctcttatcgaaagcatagatgttgatcaaattgttattccagagaaaaacagttggaagaacttattctcatacatagggcctggatttctcgtctcaattgcatatattgatcctggaaactttgagacggatctacaggctggagcacagtacaaatatgagcttctttggatcatacttgttgcatcctgtgctgctcttattattcaatcacttgcagccaggctaggggttgtgacagggaaacatcttgcagagcattgcagggctgagtatcccaaggtcacaaattttgtcttatggattcttgcagaacttgctgttgttgcatgtgacattcctgaagaatcccagtatggtgtggtgttctaataactggactcagcactctaatgctcttattgctgcagcaatatggggtccgtaagctagaatttctgattgcatttctggtgttcttaatagcaacatgtttcttagttgaacttgggtattctaaaccaaatgctccagaagttgttaggggcctttttgttcctgaacttaaaggaaatggagctacaggccttgctatctcattacttggtgctatggtgatgccgcacaatctttttctgcactcagcattagtattgtcaagaaaagtgccacggtctgttcatgggattaaggaggcctgcagattctatacgattgaaagtgcatttgcccttacagttgcttttctcatcaacatatctatcatatctgtcagtggttctgtctgtggttcaggtaatttaaacccagaagatcaagcaaattgcagtgatctggacctaaataaggcttcatttttgttaaagaatgtccttggaaactggagctcaaagttgtttgcagttgctttgttggcatctggtcagagttctacaattacggggacatatgctggacaatatgtcatgcagatttgcaatgaacaagcttgggcttatgagtttcagtgccaacctccaaggttctcttggtcagctagattgcagagaaaaaggacagatacggggggtttttagatcttcggatgaaaccctggatacgcaatcttgtcacgaggtccttggctatcctgccaagtttgatcgtgtcaattattggtggttcttcagcagctggccagttgattatcattgcatcgatgatactgtcatttgaactcccttttgctttagttccactccttaaattcaccagcagcaaaacaaagatggggcagcatacaaattcaatattcactgctgtgctgacatggatgatcggctcgtttattgttgtcatcaacacctactttctgataacaagctttgtgaaattgctcgtccagagcgggctgaccaccatttctcaagtattttccggtattttcgggtttttgggcatgctgatttacatagttgcgatcctatacctcgtctttaggaggaacaggaagtccacccagccattgctggagagcgatgctgagcttgcagtatcgggtagcagtgctgatgccggagcagaatgctcgctgggccatttgccccgtgaggacatctccagcatgcaacttccgcagcagcgttcagcttctgatctagattagataacagctgccaggaaaataaatgttttttttgttttttatatagtatagtaattacagaatagggtacgtcaggtattggcttctgttcatcctactgatgatgcttaaggaatgtatacaagaggacggatatctatgctgccaaacaaaaaaatggggcacaaaagaatttagtgcctgtttttgggaagtgatgtgaactgaatcctggaaggggcaaaaaaaaaaaatgttggaatccaattgttgaaaattcttcattctaaacatgaggccgttggtaaaaaatgtctacatgctgtaaacatactatattttgacattattatcacagttaatatatactggacatgctgttttatgtgttgtgcattccagtggctgcaggccttgctcagagctagtttggtgattagagaaatggagaagttctatgtaccctttatttttctggccactaaattagcccttatagtgccgatattttctgaatagaatcaggtgaatccacccttctagttctgctgctgacaagcaggtgaccaagccctgtgaatggagctcatgccaaagacaactgctaaatgcgccttcgtttttcaaggtagcagaatagcagctgagaaacctttttcggcgacagtctaacagtctcatcctaccctaacttttaaaatatggaccataagcacgtctctactaatataaaaggagtttgtctatgtgtgtcgctcctcttccggcccctttctactttttacagaaaaaaataagataaa

SEQ ID NO: 48757 - DNA, 3105 bp, Zea Mays
gcacaagcaaaggcgggggagagagctccgtgcagtcaccgtcgtgttcggaacgagcgagagagcgggagacgagtcgcggcgcctctgctgtgctgtcttcttctccccctctgctctgcttcggctcctcacgcggcctcgccgagacccgcagaacagggggttcagacttcttggtgagagcgatatgagtgtcccaggtcaatgctcatcccagccacaatttatcaccagcgttgggaggagtaaccgctccaatggccccggcactcctcttatcgaaagcatagatgttgatcaaattgttattccagagaaaaacagttggaagaacttattctcatacatagggcctggatttctcgtctcaattgcatatattgatcctggaaactttgagacggatctacaggctggagcacagtacaaatatgagcttctttggatcatacttgttgcatcctgtgctgctcttattattcaatcacttgcagccaggctaggggttgtgacagggaaacatcttgcagagcattgcagggctgagtatcccaaggtcacaaattttgtcttatggattcttgcagaacttgctgttgttgcatgtgacattcctgaagtaattggaactgcttttgctctaaacatgctgttcagaatcccagtatggtgtggtgttctaataactggactcagcactctaatgctcttattgctgcagcaatatggggtccgtaagctagaatttctgattgcatttctggtgttcttaatagcaacatgtttcttagttgaacttgggtattctaaaccaaatgctccagaagttgttaggggcctttttgttcctgaacttaaaggaaatggagctacaggccttgctatctcattacttggtgctatggcacaatctttttctgcactcagcattagtattgtcaagaaaagtgccacggtctgttcatgggattaaggaggcctgcagattctatacgattgaaagtgcatttgcccttacagttgcttttctcatcaacatatctatcatatctgtcagtggttctgtctgtggttcaggtaatttaaacccagaagatcaagcaaattgcagtgatctggacctaaataaggcttcatttttgttaaagaatgtccttggaaactggagctcaaagttgtttgcagttgctttgttggcatctggtcagagttctacaattacggggacatatgctggacaatatgtcatgcaggtttttggaacttataccttatttcagttctagttcgcaagttgaatggcaggttgttttatgatgcatattactcgaggcatttgatgttgatcagaagtaatcaagcatttgcttgcttgcaacattagtttgtttagctgttagatatgaaaagtacagaaaataaattagtacataactcttagatttgcaatgaacaagcttgggcttatgagtttcagtgccaacctccaaggttctcttggtcagctagattgcagagaaaaaggacagatacggggtaagcttaggtcaccaccattattaatgtctcccattatttaatacagtacgctgctaattgtcttcccttgtctcaaataacgcgttgaatcattttaattatttttattgttttgcctaaaggaaaactaagtaatcaaccaagcattttggacttgtgaaacttcatttgctatatactaacatttactcacctaatctaggggtttttagatcttcggatgaaaccctggatacgcaatcttgtcacgaggtccttggctatcctgccaagtttgatcgtgtcaattattggtggttcttcagcagctggccagttgattatcattgcatcgatgatactgtcatttgaactcccttttgctttagttccactccttaaattcaccagcagcaaaacaaagatggggcagcatacaaattcaatattcactgctgtgctgacatggatgatcggctcgtttattgttgtcatcaacacctactttctgataacaagctttgtgaaattgctcgtccagagcgggctgaccaccatttctcaagtattttccggtattttcgggtttttgggcatgctgatttacatagttgcgatcctatacctcgtctttaggaggaacaggaagtccacccagccattgctggagagcgatgctgagcttgcagtatcgggtagcagtgctgatgccggagcagaatgctcgctgggccatttgccccgtgaggacatctccagcatgcaacttccgcagcagcgttcagcttctgatctagattagataacagctgccaggaaaataaatgttttttttgttttttatatagtatagtaattacagaatagggtacgtcaggtattggcttctgttcatcctactgatgatgcttaaggaatgtatacaagaggacggatatctatgctgccaaacaaaaaaatggggcacaaaagaatttagtgcctgtttttgggaagtgatgtgaactgaatcctggaaggggcaaaaaaaaaaaatgttggaatccaattgttgaaaattcttcattctaaacatgaggccgttggtaaaaaatgtctacatgctgtaaacatactatattttgacattattatcacagttaatatatactggacatgctgttttatgtgttgtgcattccagtggctgcaggccttgctcagagctagtttggtgattagagaaatggagaagttctatgtaccctttatttttctggccactaaattagcccttatagtgccgatattttctgaatagaatcaggtgaatccacccttctagttctgctgctgacaagcaggtgaccaagccctgtgaatggagctcatgccaaagacaactgctaaatgcgccttcgtttttcaaggtagcagaatagcagctgagaaacctttttcggcgacagtctaacagtctcatcctaccctaacttttaaaatatggaccataagcacgtctctactaatataaaaggagtttgtctatgtgtgtcgctcctcttccggcccctttctactttttacagaaaaaaataagataaa

SEQ ID NO: 48758 - DNA, 2883 bp, Zea Mays
gcacaagcaaaggcgggggagagagctccgtgcagtcaccgtcgtgttcggaacgagcgagagagcgggagacgagtcgcggcgcctctgctgtgctgtcttcttctccccctctgctctgcttcggctcctcacgcggcctcgccgagacccgcagggggttcagacttcttggtgagagcgatatgagtgtcccaggtcaatgctcatcccagccacaatttatcaccagcgttgggaggagtaaccgctccaatggccccggcactcctcttatcgaaagcatagatgttgatcaaattgttattccagagaaaaacagttggaagaacttattctcatacatagggcctggatttctcgtctcaattgcatatattgatcctggaaactttgagacggatctacaggctggagcacagtacaaatatgagcttctttggatcatacttgttgcatcctgtgctgctcttattattcaatcacttgcagccaggctaggggttgtgacagggaaacatcttgcagagcattgcagggctgagtatcccaaggtcacaaattttgtcttatggattcttgcagaacttgctgttgttgcatgtgacattcctgaagaatcccagtatggtgtggtgttctaataactggactcagcactctaatgctcttattgctgcagcaatatggggtccgtaagctagaatttctgattgcatttctggtgttcttaatagcaacatgtttcttagttgaacttgggtattctaaaccaaatgctccagaagttgttaggggcctttttgttcctgaacttaaaggaaatggagctacaggccttgctatctcattacttggtgctatggtgatgccgcacaatctttttctgcactcagcattagtattgtcaagaaaagtgccacggtctgttcatgggattaaggaggcctgcagattctatacgattgaaagtgcatttgcccttacagttgcttttctcatcaacatatctatcatatctgtcagtggttctgtctgtggttcaggtaatttaaacccagaagatcaagcaaattgcagtgatctggacctaaataaggcttcatttttgttaaagaatgtccttggaaactggagctcaaagttgtttgcagttgctttgttggcatctggtcagagttctacaattacggggacatatgctggacaatatgtcatgcagatttgcaatgaacaagcttgggcttatgagtttcagtgccaacctccaaggttctcttggtcagctagattgcagagaaaaaggacagatacggggtaagcttaggtcaccaccattattaatgtctcccattatttaatacagtacgctgctaattgtcttcccttgtctcaaataacgcgttgaatcattttaattatttttattgttttgcctaaaggaaaactaagtaatcaaccaagcattttggacttgtgaaacttcatttgctatatactaacatttactcacctaatctaggggtttttagatcttcggatgaaaccctggatacgcaatcttgtcacgaggtccttggctatcctgccaagtttgatcgtgtcaattattggtggttcttcagcagctggccagttgattatcattgcatcgatgatactgtcatttgaactcccttttgctttagttccactccttaaattcaccagcagcaaaacaaagatggggcagcatacaaattcaatattcactgctgtgctgacatggatgatcggctcgtttattgttgtcatcaacacctactttctgataacaagctttgtgaaattgctcgtccagagcgggctgaccaccatttctcaagtattttccggtattttcgggtttttgggcatgctgatttacatagttgcgatcctatacctcgtctttaggaggaacaggaagtccacccagccattgctggagagcgatgctgagcttgcagtatcgggtagcagtgctgatgccggagcagaatgctcgctgggccatttgccccgtgaggacatctccagcatgcaacttccgcagcagcgttcagcttctgatctagattagataacagctgccaggaaaataaatgttttttttgttttttatatagtatagtaattacagaatagggtacgtcaggtattggcttctgttcatcctactgatgatgcttaaggaatgtatacaagaggacggatatctatgctgccaaacaaaaaaatggggcacaaaagaatttagtgcctgtttttgggaagtgatgtgaactgaatcctggaaggggcaaaaaaaaaaaatgttggaatccaattgttgaaaattcttcattctaaacatgaggccgttggtaaaaaatgtctacatgctgtaaacatactatattttgacattattatcacagttaatatatactggacatgctgttttatgtgttgtgcattccagtggctgcaggccttgctcagagctagtttggtgattagagaaatggagaagttctatgtaccctttatttttctggccactaaattagcccttatagtgccgatattttctgaatagaatcaggtgaatccacccttctagttctgctgctgacaagcaggtgaccaagccctgtgaatggagctcatgccaaagacaactgctaaatgcgccttcgtttttcaaggtagcagaatagcagctgagaaacctttttcggcgacagtctaacagtctcatcctaccctaacttttaaaatatggaccataagcacgtctctactaatataaaaggagtttgtctatgtgtgtcgctcctcttccggcccctttctactttttacagaaaaaaataagataaa

SEQ ID NO: 48759 - DNA, 2914 bp, Zea Mays
gcacaagcaaaggcgggggagagagctccgtgcagtcaccgtcgtgttcggaacgagcgagagagcgggagacgagtcgcggcgcctctgctgtgctgtcttcttctccccctctgctctgcttcggctcctcacgcggcctcgccgagacccgcagaaaaacagttggaagaacttattctcatacatagggcctggatttctcgtctcaattgcatatattgatcctggaaactttgagacggatctacaggctggagcacagtacaaatatgagcttctttggatcatacttgttgcatcctgtgctgctcttattattcaatcacttgcagccaggctaggggttgtgacagggaaacatcttgcagagcattgcagggctgagtatcccaaggtcacaaattttgtcttatggattcttgcagaacttgctgttgttgcatgtgacattcctgaagaatcccagtatggtgtggtgttctaataactggactcagcactctaatgctcttattgctgcagcaatatggggtccgtaagctagaatttctgattgcatttctggtgttcttaatagcaacatgtttcttagttgaacttgggtattctaaaccaaatgctccagaagttgttaggggcctttttgttcctgaacttaaaggaaatggagctacaggccttgctatctcattacttggtgctatggtgatgccgcacaatctttttctgcactcagcattagtattgtcaagaaaagtgccacggtctgttcatgggattaaggaggcctgcagattctatacgattgaaagtgcatttgcccttacagttgcttttctcatcaacatatctatcatatctgtcagtggttctgtctgtggttcaggtaatttaaacccagaagatcaagcaaattgcagtgatctggacctaaataaggcttcatttttgttaaagaatgtccttggaaactggagctcaaagttgtttgcagttgctttgttggcatctggtcagagttctacaattacggggacatatgctggacaatatgtcatgcaggtttttggaacttataccttatttcagttctagttcgcaagttgaatggcaggttgttttatgatgcatattactcgaggcatttgatgttgatcagaagtaatcaagcatttgcttgcttgcaacattagtttgtttagctgttagatatgaaaagtacagaaaataaattagtacataactcttagatttgcaatgaacaagcttgggcttatgagtttcagtgccaacctccaaggttctcttggtcagctagattgcagagaaaaaggacagatacggggtaagcttaggtcaccaccattattaatgtctcccattatttaatacagtacgctgctaattgtcttcccttgtctcaaataacgcgttgaatcattttaattatttttattgttttgcctaaaggaaaactaagtaatcaaccaagcattttggacttgtgaaacttcatttgctatatactaacatttactcacctaatctaggggtttttagatcttcggatgaaaccctggatacgcaatcttgtcacgaggtccttggctatcctgccaagtttgatcgtgtcaattattggtggttcttcagcagctggccagttgattatcattgcatcgatgatactgtcatttgaactcccttttgctttagttccactccttaaattcaccagcagcaaaacaaagatggggcagcatacaaattcaatattcactgctgtgctgacatggatgatcggctcgtttattgttgtcatcaacacctactttctgataacaagctttgtgaaattgctcgtccagagcgggctgaccaccatttctcaagtattttccggtattttcgggtttttgggcatgctgatttacatagttgcgatcctatacctcgtctttaggaggaacaggaagtccacccagccattgctggagagcgatgctgagcttgcagtatcgggtagcagtgctgatgccggagcagaatgctcgctgggccatttgccccgtgaggacatctccagcatgcaacttccgcagcagcgttcagcttctgatctagattagataacagctgccaggaaaataaatgttttttttgttttttatatagtatagtaattacagaatagggtacgtcaggtattggcttctgttcatcctactgatgatgcttaaggaatgtatacaagaggacggatatctatgctgccaaacaaaaaaatggggcacaaaagaatttagtgcctgtttttgggaagtgatgtgaactgaatcctggaaggggcaaaaaaaaaaaatgttggaatccaattgttgaaaattcttcattctaaacatgaggccgttggtaaaaaatgtctacatgctgtaaacatactatattttgacattattatcacagttaatatatactggacatgctgttttatgtgttgtgcattccagtggctgcaggccttgctcagagctagtttggtgattagagaaatggagaagttctatgtaccctttatttttctggccactaaattagcccttatagtgccgatattttctgaatagaatcaggtgaatccacccttctagttctgctgctgacaagcaggtgaccaagccctgtgaatggagctcatgccaaagacaactgctaaatgcgccttcgtttttcaaggtagcagaatagcagctgagaaacctttttcggcgacagtctaacagtctcatcctaccctaacttttaaaatatggaccataagcacgtctctactaatataaaaggagtttgtctatgtgtgtcgctcctcttccggcccctttctactttttacagaaaaaaataagataaa

SEQ ID NO: 48760 - DNA, 3076 bp, Zea Mays
gcacaagcaaaggcgggggagagagctccgtgcagtcaccgtcgtgttcggaacgagcgagagagcgggagacgagtcgcggcgcctctgctgtgctgtcttcttctccccctctgctctgcttcggctcctcacgcggcctcgccgagacccgcagaacagggggttcagacttcttggtgagagcgatatgagtgtcccaggtcaatgctcatcccagccacaatttatcaccagcgttgggaggagtaaccgctccaatggccccggcactcctcttatcgaaagcatagatgttgatcaaattgttattccagagaaaaacagttggaagaacttattctcatacatagggcctggatttctcgtctcaattgcatatattgatcctggaaactttgagacggatctacaggctggagcacagtacaaatatgagcttctttggatcatacttgttgcatcctgtgctgctcttattattcaatcacttgcagccaggctaggggttgtgacagggaaacatcttgcagagcattgcagggctgagtatcccaaggtcacaaattttgtcttatggattcttgcagaacttgctgttgttgcatgtgacattcctgaagaatcccagtatggtgtggtgttctaataactggactcagcactctaatgctcttattgctgcagcaatatggggtccgtaagctagaatttctgattgcatttctggtgttcttaatagcaacatgtttcttagttgaacttgggtattctaaaccaaatgctccagaagttgttaggggcctttttgttcctgaacttaaaggaaatggagctacaggccttgctatctcattacttggtgctatggtgatgccgcacaatctttttctgcactcagcattagtattgtcaagaaaagtgccacggtctgttcatgggattaaggaggcctgcagattctatacgattgaaagtgcatttgcccttacagttgcttttctcatcaacatatctatcatatctgtcagtggttctgtctgtggttcaggtaatttaaacccagaagatcaagcaaattgcagtgatctggacctaaataaggcttcatttttgttaaagaatgtccttggaaactggagctcaaagttgtttgcagttgctttgttggcatctggtcagagttctacaattacggggacatatgctggacaatatgtcatgcaggtttttggaacttataccttatttcagttctagttcgcaagttgaatggcaggttgttttatgatgcatattactcgaggcatttgatgttgatcagaagtaatcaagcatttgcttgcttgcaacattagtttgtttagctgttagatatgaaaagtacagaaaataaattagtacataactcttagatttgcaatgaacaagcttgggcttatgagtttcagtgccaacctccaaggttctcttggtcagctagattgcagagaaaaaggacagatacggggtaagcttaggtcaccaccattattaatgtctcccattatttaatacagtacgctgctaattgtcttcccttgtctcaaataacgcgttgaatcattttaattatttttattgttttgcctaaaggaaaactaagtaatcaaccaagcattttggacttgtgaaacttcatttgctatatactaacatttactcacctaatctaggggtttttagatcttcggatgaaaccctggatacgcaatcttgtcacgaggtccttggctatcctgccaagtttgatcgtgtcaattattggtggttcttcagcagctggccagttgattatcattgcatcgatgatactgtcatttgaactcccttttgctttagttccactccttaaattcaccagcagcaaaacaaagatggggcagcatacaaattcaatattcactgctgtgctgacatggatgatcggctcgtttattgttgtcatcaacacctactttctgataacaagctttgtgaaattgctcgtccagagcgggctgaccaccatttctcaagtattttccggtattttcgggtttttgggcatgctgatttacatagttgcgatcctatacctcgtctttaggaggaacaggaagtccacccagccattgctggagagcgatgctgagcttgcagtatcgggtagcagtgctgatgccggagcagaatgctcgctgggccatttgccccgtgaggacatctccagcatgcaacttccgcagcagcgttcagcttctgatctagattagataacagctgccaggaaaataaatgttttttttgttttttatatagtatagtaattacagaatagggtacgtcaggtattggcttctgttcatcctactgatgatgcttaaggaatgtatacaagaggacggatatctatgctgccaaacaaaaaaatggggcacaaaagaatttagtgcctgtttttgggaagtgatgtgaactgaatcctggaaggggcaaaaaaaaaaaatgttggaatccaattgttgaaaattcttcattctaaacatgaggccgttggtaaaaaatgtctacatgctgtaaacatactatattttgacattattatcacagttaatatatactggacatgctgttttatgtgttgtgcattccagtggctgcaggccttgctcagagctagtttggtgattagagaaatggagaagttctatgtaccctttatttttctggccactaaattagcccttatagtgccgatattttctgaatagaatcaggtgaatccacccttctagttctgctgctgacaagcaggtgaccaagccctgtgaatggagctcatgccaaagacaactgctaaatgcgccttcgtttttcaaggtagcagaatagcagctgagaaacctttttcggcgacagtctaacagtctcatcctaccctaacttttaaaatatggaccataagcacgtctctactaatataaaaggagtttgtctatgtgtgtcgctcctcttccggcccctttctactttttacagaaaaaaataagataaa

SEQ ID NO: 48761 - DNA, 2405 bp, Zea Mays
tgctgcttcagtcttatgttcccacttcttctttggatcatacttgttgcatcctgtgctgctcttattattcaatcacttgcagccaggctaggggttgtgacagggaaacatcttgcagagcattgcagggctgagtatcccaaggtcacaaattttgtcttatggattcttgcagaacttgctgttgttgcatgtgacattcctgaagaatcccagtatggtgtggtgttctaataactggactcagcactctaatgctcttattgctgcagcaatatggggtccgtaagctagaatttctgattgcatttctggtgttcttaatagcaacatgtttcttagttgaacttgggtattctaaaccaaatgctccagaagttgttaggggcctttttgttcctgaacttaaaggaaatggagctacaggccttgctatctcattacttggtgctatggtgatgccgcacaatctttttctgcactcagcattagtattgtcaagaaaagtgccacggtctgttcatgggattaaggaggcctgcagattctatacgattgaaagtgcatttgcccttacagttgcttttctcatcaacatatctatcatatctgtcagtggttctgtctgtggttcagaatgtccttggaaactggagctcaaagttgtttgcagttgctttgttggcatctggtcagagttctacaattacggggacatatgctggacaatatgtcatgcagatttgcaatgaacaagcttgggcttatgagtttcagtgccaacctccaaggttctcttggtcagctagattgcagagaaaaaggacagatacggggtaagcttaggtcaccaccattattaatgtctcccattatttaatacagtacgctgctaattgtcttcccttgtctcaaataacgcgttgaatcattttaattatttttattgttttgcctaaaggaaaactaagtaatcaaccaagcattttggacttgtgaaacttcatttgctatatactaacatttactcacctaatctaggggtttttagatcttcggatgaaaccctggatacgcaatcttgtcacgaggtccttggctatcctgccaagtttgatcgtgtcaattattggtggttcttcagcagctggccagttgattatcattgcatcgatgatactgtcatttgaactcccttttgctttagttccactccttaaattcaccagcagcaaaacaaagatggggcagcatacaaattcaatattcactgctgtgctgacatggatgatcggctcgtttattgttgtcatcaacacctactttctgataacaagctttgtgaaattgctcgtccagagcgggctgaccaccatttctcaagtattttccggtattttcgggtttttgggcatgctgatttacatagttgcgatcctatacctcgtctttaggaggaacaggaagtccacccagccattgctggagagcgatgctgagcttgcagtatcgggtagcagtgctgatgccggagcagaatgctcgctgggccatttgccccgtgaggacatctccagcatgcaacttccgcagcagcgttcagcttctgatctagattagataacagctgccaggaaaataaatgttttttttgttttttatatagtatagtaattacagaatagggtacgtcaggtattggcttctgttcatcctactgatgatgcttaaggaatgtatacaagaggacggatatctatgctgccaaacaaaaaaatggggcacaaaagaatttagtgcctgtttttgggaagtgatgtgaactgaatcctggaaggggcaaaaaaaaaaaatgttggaatccaattgttgaaaattcttcattctaaacatgaggccgttggtaaaaaatgtctacatgctgtaaacatactatattttgacattattatcacagttaatatatactggacatgctgttttatgtgttgtgcattccagtggctgcaggccttgctcagagctagtttggtgattagagaaatggagaagttctatgtaccctttatttttctggccactaaattagcccttatagtgccgatattttctgaatagaatcaggtgaatccacccttctagttctgctgctgacaagcaggtgaccaagccctgtgaatggagctcatgccaaagacaactgctaaatgcgccttcgtttttcaaggtagcagaatagcagctgagaaacctttttcggcgacagtctaacagtctcatcctaccctaacttttaaaatatggaccataagcacgtctctactaatataaaaggagtttgtctatgtgtgtcgctcctcttccggcccctttctactttttacagaaaaaaataagataaa

SEQ ID NO: 48762 - DNA, 2654 bp, Zea Mays
ctgcttcagtcttatgttcccacttcttctttggatcatacttgttgcatcctgtgctgctcttattattcaatcacttgcagccaggctaggggttgtgacagggaaacatcttgcagagcattgcagggctgagtatcccaaggtcacaaattttgtcttatggattcttgcagaacttgctgttgttgcatgtgacattcctgaagaatcccagtatggtgtggtgttctaataactggactcagcactctaatgctcttattgctgcagcaatatggggtccgtaagctagaatttctgattgcatttctggtgttcttaatagcaacatgtttcttagttgaacttgggtattctaaaccaaatgctccagaagttgttaggggcctttttgttcctgaacttaaaggaaatggagctacaggccttgctatctcattacttggtgctatggcacaatctttttctgcactcagcattagtattgtcaagaaaagtgccacggtctgttcatgggattaaggaggcctgcagattctatacgattgaaagtgcatttgcccttacagttgcttttctcatcaacatatctatcatatctgtcagtggttctgtctgtggttcaggtaatttaaacccagaagatcaagcaaattgcagtgatctggacctaaataaggcttcatttttgttaaagaatgtccttggaaactggagctcaaagttgtttgcagttgctttgttggcatctggtcagagttctacaattacggggacatatgctggacaatatgtcatgcaggtttttggaacttataccttatttcagttctagttcgcaagttgaatggcaggttgttttatgatgcatattactcgaggcatttgatgttgatcagaagtaatcaagcatttgcttgcttgcaacattagtttgtttagctgttagatatgaaaagtacagaaaataaattagtacataactcttagatttgcaatgaacaagcttgggcttatgagtttcagtgccaacctccaaggttctcttggtcagctagattgcagagaaaaaggacagatacggggtaagcttaggtcaccaccattattaatgtctcccattatttaatacagtacgctgctaattgtcttcccttgtctcaaataacgcgttgaatcattttaattatttttattgttttgcctaaaggaaaactaagtaatcaaccaagcattttggacttgtgaaacttcatttgctatatactaacatttactcacctaatctaggggtttttagatcttcggatgaaaccctggatacgcaatcttgtcacgaggtccttggctatcctgccaagtttgatcgtgtcaattattggtggttcttcagcagctggccagttgattatcattgcatcgatgatactgtcatttgaactcccttttgctttagttccactccttaaattcaccagcagcaaaacaaagatggggcagcatacaaattcaatattcactgctgtgctgacatggatgatcggctcgtttattgttgtcatcaacacctactttctgataacaagctttgtgaaattgctcgtccagagcgggctgaccaccatttctcaagtattttccggtattttcgggtttttgggcatgctgatttacatagttgcgatcctatacctcgtctttaggaggaacaggaagtccacccagccattgctggagagcgatgctgagcttgcagtatcgggtagcagtgctgatgccggagcagaatgctcgctgggccatttgccccgtgaggacatctccagcatgcaacttccgcagcagcgttcagcttctgatctagattagataacagctgccaggaaaataaatgttttttttgttttttatatagtatagtaattacagaatagggtacgtcaggtattggcttctgttcatcctactgatgatgcttaaggaatgtatacaagaggacggatatctatgctgccaaacaaaaaaatggggcacaaaagaatttagtgcctgtttttgggaagtgatgtgaactgaatcctggaaggggcaaaaaaaaaaaatgttggaatccaattgttgaaaattcttcattctaaacatgaggccgttggtaaaaaatgtctacatgctgtaaacatactatattttgacattattatcacagttaatatatactggacatgctgttttatgtgttgtgcattccagtggctgcaggccttgctcagagctagtttggtgattagagaaatggagaagttctatgtaccctttatttttctggccactaaattagcccttatagtgccgatattttctgaatagaatcaggtgaatccacccttctagttctgctgctgacaagcaggtgaccaagccctgtgaatggagctcatgccaaagacaactgctaaatgcgccttcgtttttcaaggtagcagaatagcagctgagaaacctttttcggcgacagtctaacagtctcatcctaccctaacttttaaaatatggaccataagcacgtctctactaatataaaaggagtttgtctatgtgtgtcgctcctcttccggcccctttctactttttacagaaaaaaataagataaa

SEQ ID NO: 48763 - DNA, 2491 bp, Zea Mays
cttcagtcttatgttcccacttcttctttggatcatacttgttgcatcctgtgctgctcttattattcaatcacttgcagccaggctaggggttgtgacagggaaacatcttgcagagcattgcagggctgagtatcccaaggtcacaaattttgtcttatggattcttgcagaacttgctgttgttgcatgtgacattcctgaagtaattggaactgcttttgctctaaacatgctgttcagaatcccagtatggtgtggtgttctaataactggactcagcactctaatgctcttattgctgcagcaatatggggtccgtaagctagaatttctgattgcatttctggtgttcttaatagcaacatgtttcttagttgaacttgggtattctaaaccaaatgctccagaagttgttaggggcctttttgttcctgaacttaaaggaaatggagctacaggccttgctatctcattacttggtgctatggtgatgccgcacaatctttttctgcactcagcattagtattgtcaagaaaagtgccacggtctgttcatgggattaaggaggcctgcagattctatacgattgaaagtgcatttgcccttacagttgcttttctcatcaacatatctatcatatctgtcagtggttctgtctgtggttcaggtaatttaaacccagaagatcaagcaaattgcagtgatctggacctaaataaggcttcatttttgttaaagaatgtccttggaaactggagctcaaagttgtttgcagttgctttgttggcatctggtcagagttctacaattacggggacatatgctggacaatatgtcatgcaggtttttggaacttataccttatttcagttctagttcgcaagttgaatggcaggttgttttatgatgcatattactcgaggcatttgatgttgatcagaagtaatcaagcatttgcttgcttgcaacattagtttgtttagctgttagatatgaaaagtacagaaaataaattagtacataactcttagatttgcaatgaacaagcttgggcttatgagtttcagtgccaacctccaaggttctcttggtcagctagattgcagagaaaaaggacagatacggggggtttttagatcttcggatgaaaccctggatacgcaatcttgtcacgaggtccttggctatcctgccaagtttgatcgtgtcaattattggtggttcttcagcagctggccagttgattatcattgcatcgatgatactgtcatttgaactcccttttgctttagttccactccttaaattcaccagcagcaaaacaaagatggggcagcatacaaattcaatattcactgctgtgctgacatggatgatcggctcgtttattgttgtcatcaacacctactttctgataacaagctttgtgaaattgctcgtccagagcgggctgaccaccatttctcaagtattttccggtattttcgggtttttgggcatgctgatttacatagttgcgatcctatacctcgtctttaggaggaacaggaagtccacccagccattgctggagagcgatgctgagcttgcagtatcgggtagcagtgctgatgccggagcagaatgctcgctgggccatttgccccgtgaggacatctccagcatgcaacttccgcagcagcgttcagcttctgatctagattagataacagctgccaggaaaataaatgttttttttgttttttatatagtatagtaattacagaatagggtacgtcaggtattggcttctgttcatcctactgatgatgcttaaggaatgtatacaagaggacggatatctatgctgccaaacaaaaaaatggggcacaaaagaatttagtgcctgtttttgggaagtgatgtgaactgaatcctggaaggggcaaaaaaaaaaaatgttggaatccaattgttgaaaattcttcattctaaacatgaggccgttggtaaaaaatgtctacatgctgtaaacatactatattttgacattattatcacagttaatatatactggacatgctgttttatgtgttgtgcattccagtggctgcaggccttgctcagagctagtttggtgattagagaaatggagaagttctatgtaccctttatttttctggccactaaattagcccttatagtgccgatattttctgaatagaatcaggtgaatccacccttctagttctgctgctgacaagcaggtgaccaagccctgtgaatggagctcatgccaaagacaactgctaaatgcgccttcgtttttcaaggtagcagaatagcagctgagaaacctttttcggcgacagtctaacagtctcatcctaccctaacttttaaaatatggaccataagcacgtctctactaatataaaaggagtttgtctatgtgtgtcgctcctcttccggcccctttctactttttacagaaaaaaataagataaa

SEQ ID NO: 48764 - DNA, 2073 bp, Zea Mays
ccgctgccaggcaattaccccatccgcccccggcgcctgagagcgtgctaaccggtcggcgtcctcgtcttcgtcctcctcggcggggaactcgatgcatgatcaataccaacctatagaaagataaaggagctcacaaagatatacttattggatgaggatctgacgcttgtccaggcacctcctttatatgatccattcatagtaactgaaggcactgagtcagatgaacaagacgatgagctatcatccacagtagagggctagattcacggtcttcaatatcaacatgaagcacatctgaattatcgtctctactgtcagatatatcagaaacttcttcagggttgtcagcatttaagggcatctcttcaatttgtccacaaaaatcatccaatattctatcatctgaatgactgtggtccataattatttccttattgatgtaaatgtggcaacacttgtcagtttcatgcttttactaatggagatcattgaaggatctggcaaggttgctattagagggtgattaattatcttacattattccagttccttaggagcacttaagtttttaataactaatcaggtattcacaaggtatggactccaaaagttgtttggcctagactgcttggcactcacctcagaccaaaccctaatttaccctgatcttccatctaaatatggtatgcataatcgtttttaacaagtttgagtcaaggaatttaagagaaaccagtgtggattttatatgtactaactcatgttgtcagtgatgataattttggtgtctttcttttggattctgagcattgtgttgactgtagtaaagatgcatagtcttgctgggctgttcggtagcacctccaggtgtttggttatgctggtacctggcaacactcaatggccatggaattggcaaatagagatccttgaaatggttgcccactaggaccctggtagccaatgttcttgctgcaagcataatggcagttcttgctataacatccaaagtggtagatacaaagcgatcgacaactattcgtagtggaatacaaccgacttccttggttgcttgagcacaatgtctacttttgatgctgaagtatatacaatgagaagaagtgggcagattgccagggccttcatttatgttgcatccaccttcctgctttttttctgctagcacaactctcttcatggtgcccatcgaggatgctacaggctcatcgacatctcggacaacacactaacattttgccacacagatttttatatattatagtgatatttgttgttttatattaatgttttatactaatttttaactttcgtggcaacgcacgggcacacggctagtatttatttatttattttggcggagatgagtttttttttatgtgccagcactaccagtaccagtgccgtttctggctcccttttctaaaggcacgctgcagacatgtgcacatgcacaggggcaggaggggggcaaacaaaaaaaactttcccttcgcagaaaggaccccacccccaaaggtaaataatttgtcgcggcaactttgaggcgctttgatttgagataagctcgatggaggcaggtcagggcggggcggcgcggtcgcgggcgagcgacatggatatcgcggaaagggattaagcacatgatgcgtccatgttccgtgcatgcatatatatatgcaccccctcagctagcctcatagtgtgctttgcttgccctgtccctttttgacgacatgcatgacactctccatgcatggcaggctggcttttttgcaaatgatgcagccccttgtgatgtgggtcaaatgtaaagcacacacacccacggttagttacctccttttgttatatctatctcttctggctcgacaccaatatcacatgtgggagcatcttacaccaggagacactatgtaaaaaacaaagtctaactcttggtgtcgatctgcgtgccaatcactgtgatttgtatcggtaggccacccaaagacgtctccagacgacgtagagttgaagagaggtgaagattgacgtgaacaaaaatat

SEQ ID NO: 48765 - DNA, 2183 bp, Zea Mays
ggcaattaccccatccgcccccggcgcctgagagcgtgctaaccggtcggcgtcctcgtcttcgtcctcctcggcggggaactcgatgtacagcatgatcaataccaacctatagaaagataaaggagctcacaaagatatacttattggatgaggatctgacgcttgtccaggcacctcctttatatgatccattcatagtaactgaaggcactgagtcagatgaacaagacgatgagctatcatccacagtagagggctagattcacggtcttcaatatcaacatgaagcacatctgaattatcgtctctactgtcagatatatcagaaacttcttcagggttgtcagcatttaagggcatctcttcaatttgtccacaaaaatcatccaatattctatcatctgaatgactgtggtccataattatttccttattgatgtaaatgtggcaacacttgtcagtttcatgcttttactaatggaggtcctgtactgttcaaatttagagaaatattacatttatgtttttgagcacatattgctccagcttagatgtctgccaacacaagtattgacgtgcggatgtttacttgtttagatcattgaaggatctggcaaggttgctattagagggtgattaattatcttacattattccagttccttaggagcacttaagtttttaataactaatcaggtattcacaaggtatggactccaaaagttgtttggcctagactgcttggcactcacctcagaccaaaccctaatttaccctgatcttccatctaaatatggtatgcataatcgtttttaacaagtttgagtcaaggaatttaagagaaaccagtgtggattttatatgtactaactcatgttgtcagtgatgataattttggtgtctttcttttggattctgagcattgtgttgactgtagtaaagatgcatagtcttgctgggctgttcggtagcacctccaggtgtttggttatgctggtacctggcaacactcaatggccatggaattggcaaatagagatccttgaaatggttgcccactaggaccctggtagccaatgttcttgctgcaagcataatggcagttcttgctataacatccaaagtggtagatacaaagcgatcgacaactattcgtagtggaatacaaccgacttccttggttgcttgagcacaatgtctacttttgatgctgaagtatatacaatgagaagaagtgggcagattgccagggccttcatttatgttgcatccaccttcctgctttttttctgctagcacaactctcttcatggtgcccatcgaggatgctacaggctcatcgacatctcggacaacacactaacattttgccacacagatttttatatattatagtgatatttgttgttttatattaatgttttatactaatttttaactttcgtggcaacgcacgggcacacggctagtatttatttatttattttggcggagatgagtttttttttatgtgccagcactaccagtaccagtgccgtttctggctcccttttctaaaggcacgctgcagacatgtgcacatgcacaggggcaggaggggggcaaacaaaaaaaactttcccttcgcagaaaggaccccacccccaaaggtaaataatttgtcgcggcaactttgaggcgctttgatttgagataagctcgatggaggcaggtcagggcggggcggcgcggtcgcgggcgagcgacatggatatcgcggaaagggattaagcacatgatgcgtccatgttccgtgcatgcatatatatatgcaccccctcagctagcctcatagtgtgctttgcttgccctgtccctttttgacgacatgcatgacactctccatgcatggcaggctggcttttttgcaaatgatgcagccccttgtgatgtgggtcaaatgtaaagcacacacacccacggttagttacctccttttgttatatctatctcttctggctcgacaccaatatcacatgtgggagcatcttacaccaggagacactatgtaaaaaacaaagtctaactcttggtgtcgatctgcgtgccaatcactgtgatttgtatcggtaggccacccaaagacgtctccagacgacgtagagttgaagagaggtgaagattgacgtgaacaaaaatat

SEQ ID NO: 48766 - DNA, 5085 bp, Zea Mays
gtccacttttgctcggttattaccgatggtcgaaatctcaggtgcgggcgagcgcatctgctagatgtagcccccgagcaattcatgtgaatttcttgggggtttattcatagtttagggacggaccctgctcgcgatggtcgtcatgcactgagtgtgggtctactttcgctcggttatcacagatagtcgaaatctcgagtgcgcgcgagcgcatctgctagatgtagcccccgagtcgttgagcaattcatgtgaattgcttggggtatattgcccagtttagggacggaccctgcccgcgatggacgtcgttaggcctgaaaacggtgcgaaaaaatcccgcccgtccggcaaccgtacaccggattttactgcctgttttcgttttttcgggatttacacggtatcggaagaaaacgggatagaaaaaacaggacacaggcccgaaaacggttttacacagttcctgcccgttttagcggtttcctgtttttaaacgggacaatcccgctttcataccgtcaagttcctgcaaaggccaatcctgggctcctggcacccattggagtggaggcccaaccggccaaggcccatgccgctgccagcctaatcctacagcataactatataagcataaacctagctcctagtgcagactatcaggtcccaggctcctagccgccagcctaccgcttcctgcttcgtgctcgtgcaaactgcagactcccagccgccgggtcgtcggctagttggacacccaggcgtcgtctcgcgcagtcgcgctgtcgtgctagactagtagactaccacctcgctgcctcgtgcagactcccggctgccgcccagccgacgatccgacgcccaccaccagcacgctcacgtcgagtagtcgcaactcacaagctcaaagttgcctccctcgacatggcaccaccagcaccgagtagtcctggcaaaagtatccagccatcggcgtcatctttggctcgggcagcacgattgcttttcggggaaaatgcaccaccacctattaccaacatcacgtggtccaaaggctctacgactgcagctgcaaatcttcaagtgttaggcaagagaaaacctgttgaagttaatgctcctggtggtatctcaacatcatcatcaacaccaatttccatcccatccgatgaaccaaatccaagtggaactagaacaacagctactggtactggtagtggcacaactgggactaatactgggacagatacaccacaacaaagaaaattagaagttcttgccattgatgattcgaagaaactgccatccttgatgtatgattttgaagatgttatgaatgcactagatgttgcaatgaagcatgatgttcagaatgcagcatatagcagcgaagaaagtgacccagatgctatagatgattatggggagctgtaactgtttgtgtcagttcacatgtaatagtttgttgcatagaaagtgacccagatgctatagatgattatggggagctgtaactgtttgtgtcagttcacatgtaatagtttgttgcatatagcagtgaataaagtttcatgtacaactatctgttcgtgaccatatgaattaaattgtaacttgttcatttcattcatttgatccaggagataaaagaagctacagataaggggaaaattgtgtcttctgtgaacaaaatgattatgagtagttgtagaatggcacctcgcaaaccgagacaaaactaagacagtttaaataagttattatgttttgtgaacttagcctagttgtgggctattatgctgttgttatggtatactattgatgatttatgcgaaggtccgacttgattaaccgtttaccgatcgataccgctataattctattcgtattatatcgttttcgaattttcggattttttcgatcgttttcgttaccggctatcccgttttcgtttccgtccgttgttaaaaaaacagtaacagtaacggtaaaggtgttttcccgaccgttcccgtccgttttcaggcctagacgtcgtgcactgagtgtgggtccacggcgcgccggagccgggcgcagtccttgggtgatgatcttctaggtcgatcgttccgcgagcatttgatccttgatcggcacacttctctcggaagctcccacgaggttctttccgaggggagggccgccctccaccgacctagttggcgtagggaggtcgtcgagctccaaacgggttatccaagtgagatccaaccaccctctggcagggtttgatttcggcgagtggtcccactggtggctcgactcgctaggggcatcccacttagtccttccttattcaatcctgttttagccctttggtcggtctggccgaccaaagggggcccatggctaccccgtcagccaggtttccgcagaagaatgtgaggtttgaccttggacgtggatgtgagcaaatgacctatgggccagtcacctagcttgcggctcactgggggcttgctcagtccacccctcgctctgcgtgagaagttagggtggtttaggtttttacctggttggtatgatgcagttactgctgcgaaatggtaaagggggtggtcataatgacaccgctcggcgtgggcgacttgacgaaatgcaaaacggcatgtcggcctcgtaacgctcgggtggcgtggtggcttggttaaccgcctcgctcgttactggtgtatcttctgcggcgtgccccgctggcgctctgtcccaagcggcgagaacctacaaggcacacagtcttttcttgcctgatacccaaggtggcccttggtcgaagggacaaatcctcaggtgtcgtttggggtggccctacctttcaggcgtcatccttgttccctacacttctgcagtagagggggagtgctcgggttggtatcgcttaccatattcttgcgcttgaacccttgcttcctttcttccctagaagccctctggctattgtgcctccttgcttcctcgtgcccgtccagcttgcctactacacgtatggcgtcattccacgtttccttgatctgagagagtcgtctccatggtctggataagaaggggttcccccctcgagagaggtctcagggtgtagactggagggtgagggtgaaatgcctcgtcccggggatgacgagttggtcgtacttgcgtccttctatgagcgcgagttcggcttgcccctgcatccctttgtgggcggactcccccactactatcagctggaggttcataaccttcaacccaacaatatccttcacgtggtgtgcttcatcacgctatgtgaggcgttcatggggatcgaccctcactggaagctgtggcagtatttcttcagagcgcatgtggccccgggtcgcggcggtcagttgtatgttggctcgaccaatattcagcttgtgcaggccggaaaacagagtactttaagatcccccttccttcatctatgtgatatgaaggggagtggttctttgtcaagaacgtggctaggagtgtcccgccgttcaccagtcgagagccggtatcggcggaggactggcaccacggggtggaggcgagcctcatgagtgaggtggagcatcttctgatggcgatctggacattgaagcagcgagatctcaccagcgcgcggctggtgtgcacttttatgcatcgccagattcagcccttgatggcctattagagaccgatgcaccagtactccggcgtcgacgatcctgaccgccattcctccaagcacctcgcactgacagagatcgaggcccgggtcaaggttgtcacggcgttgtcatcggaatccttcatggacgaggactcgccccttcctctctaaggatgtcgtgagcactctggtgagttccttcttcctgacgtttttcattcatttgtcttccttcgttcgttgtgtctgatgcggactctacaagggatcggacccccgacgtcgtgtcttccgcccctccctaagggcattatcgtcatggcggagcgggagagagacgcgggggagaccttggcagcacgctcgaagcgcctccaagcgaagaaagagaagagggcctcccgccctgctcgcgcagaaccaaggggggtgtcccttcttcctctgattcggaggatatgacctccactgcctaaggggggatggaggtcctagcggcagtgggtggtccatctcattatggcgatgttgaggccagctccaacgtccccgcctagacggacgggttggcccatgacgttgcagcacctacggtatgctcaaagtgtcgcgtggaattcgcttggacctgggggtggcgagggagcaatggcgcaggtggtgtcacacccctcggtgtcatcggtgttgctagggcatcacgcgggaaagagctcgtgggaactccctcctccgtggttgaagtggcgtcacggatggcgcttcaagcggtgccgccacctccggcaccttcaacggttgctcggaagaaagtgaccacccggaaacgctcctcgtggtatgttgttgttgggtcctcttgctcttgtcttcggttttggtcttcgtttcgtattttttctcttatttccttggtcagcatgtatgtgtcgcgcaagttggtgaaggacgcggcttcagcggcgaggggggcttacgactccttcggacctcccgcctctgtcgttggagggaacggctcctttgaccgacgtggccgtcccgccagccgacgttgttgccagcggctatgggtgggagggaggggaaggaaaatgagatctagcactataccatgttggaaaccttccctgactagggttgggacttgtatatatagactaagagttggtgggtctgacccattacacaagggtaaaacagtaattacaaggggctaactcaaaaaccctaagcagggctctagcaagatgcattgttgctttgtggattgcaattttttaaagcacagaagggcagacccagtgccggatgctcccacgtgagtgaggtctaggaaagggataaaccgagactcttccttcccccgtaaatgaggagagactgattcgaac

SEQ ID NO: 48767 - DNA, 6310 bp, Zea Mays
caccaccagcacgctcacgtcgagtagtcgcaactcacaagctcaaagttgcctccctcgacatggcaccaccagcaccgagtagtcctggcaaaagtatccagccatcggcgtcatctttggctcgggcagcacgattgcttttcggggaaaatgcaccaccacctattaccaacatcacgtggtccaaaggctctacgactgcagctgcaaatcttcaagtgttaggcaagagaaaacctgttgaagttaatgctcctggtggtatctcaacatcatcatcaacaccaatttccatcccatccgatgaaccaaatccaagtggaactagaacaacagctactggtactggtagtggcacaactgggactaatactgggacagatacaccacaacaaagaaaattagaagttcttgccattgatggtgtggatgtccaagactctgcagataggaagaggacaaagaaattgacatctgatgtctggcagtacttcactaaaaatgagaaggtagtagaggttggtggaaagaaatatatccagatgtggggatattgcaactttcctaattgcagggcgaaatacagagctgagagcaactatggaacaactggctttcggaaccatttgaaatcgacccatagcatagtaaaggggcagctacaactcaaaacagaaaaggaccatggcaaagatatcactgttatcgagccctacaagtatgatcaggaagtaagtttaaagaagctttacttagcaatagtcatgcatgagtatccttttaatatggtagagcatgactattttgttgagttcatcaagtctttgcgtccttcgttcccacttaagtcacgtgtgactgttaggaaagatatcatggacatttttttggaacaaaaagagaaattatattcatacttgaaaactgttcagtgccggtttagtacaacaatggacatgtggacttcttgtcaaaacaaatcctatatgtgtgttactattcattgggtagatgaggaatggtgtatgcagaaaagaattataggattttttcatgttgaagggcgtcacacaggtcaaaagttgtcacaaaccttttcagaattgatggttaagtggtatattgaaaagaagttgttttccttaactttggacaatgctagtgcaaatgaggtggctgtgaaagatgtaattgctgatctacaagaaagtaatggaaatttggtttgtggcggcatgttttttcatgtgaggtgtgcttgccatatactaaatctggttgctagggatggtatgagtgttatttctagcacaatagacaagataaaagcaattgtgttagttgcaaaaggatctcctcttcaaatggaagaacttatgaaacgtgctaccgagtgtgggctagatacaacaaaaggtctctcaatagatgtatcaacaaggtggaactcaacttatctaatgttgagggatgcattgtattacaagccagcatttttgaggctcaagtcgtctgatcggcgtaggttagtttcattcatgatacctttcagtttcaatctgctaacactactctgaatttgtgtataaatattaatttcattttcctttgtaggtatgatcacatctgtcctagtccttttgagtggagcatggcatcaaccatttttcaatgcttgaagaagttttatgatctcactgagttgctctccggtacttcatatcccacagcaaatttattttatagaggtttttgtgagataaaagagcttcttgataaatggcgtattagtgaagaacccactattaaaataatggcaatggctatgattgccaaatttgaaaagtattggaagaagtctagtactgttttagctgtcgccagcttctttgatcctagatacaagagaagattgattgaattctacttgaaaaaattttatggtgatatgtaccaacagcagatagaagactttctcagtgtgcttaagaaactatatcagttttatgctaatttagccccttctcttgaaaagaacaatagtgatgaggtaggaactagtaacacagttgacgatctcatggaaactcagaatgatgaactggactgctacctctatgacacaaatgttgctgatctaaacaacttaaatgagctggaaaagtatatggcagatcctttgttgaagcatagtggatcattcgacattttatcttggtggagaggcaagacaaaagagtaccccattctaacacaaattgctcgagatgttttagcagtacaggtttcgacagtagcttccgaatctgcctttagttctggtggtcgtgttattgatccctatcgtagttcacttaaacctgaaatggtagaagctttaatatgcaccaaggattggatattagcatagagaaaaggtaacatatgcatgctatgttgatgtctttagtttaataatgctcatgtctttaatttaatcatgctcatggctttatttgtaattgtttttcaagattcgaagaaactgccatccttgatgtatgattttgaagatgttatgaatgcactagatgttgcaatgaagcatgatgttcagaatgcagcatatagcagcgaagaaagtgacccagatgctatagatgattatggggagctgtaactgtttgtgtcagttcacatgtaatagtttgttgcatagaaagtgacccagatgctatagatgattatggggagctgtaactgtttgtgtcagttcacatgtaatagtttgttgcatatagcagtgaataaagtttcatgtacaactatctgttcgtgaccatatgaattaaattgtaacttgttcatttcattcatttgatccaggagataaaagaagctacagataaggggaaaattgtgtcttctgtgaacaaaatgattatgagtagttgtagaatggcacctcgcaaaccgagacaaaactaagacagtttaaataagttattatgttttgtgaacttagcctagttgtgggctattatgctgttgttatggtatactattgatgatttatgcgaaggtccgacttgattaaccgtttaccgatcgataccgctataattctattcgtattatatcgttttcgaattttcggattttttcgatcgttttcgttaccggctatcccgttttcgtttccgtccgttgttaaaaaaacagtaacagtaacggtaaaggtgttttcccgaccgttcccgtccgttttcaggcctagacgtcgtgcactgagtgtgggtccacggcgcgccggagccgggcgcagtccttgggtgatgatcttctaggtcgatcgttccgcgagcatttgatccttgatcggcacacttctctcggaagctcccacgaggttctttccgaggggagggccgccctccaccgacctagttggcgtagggaggtcgtcgagctccaaacgggttatccaagtgagatccaaccaccctctggcagggtttgatttcggcgagtggtcccactggtggctcgactcgctaggggcatcccacttagtccttccttattcaatcctgttttagccctttggtcggtctggccgaccaaagggggcccatggctaccccgtcagccaggtttccgcagaagaatgtgaggtttgaccttggacgtggatgtgagcaaatgacctatgggccagtcacctagcttgcggctcactgggggcttgctcagtccacccctcgctctgcgtgagaagttagggtggtttaggtttttacctggttggtatgatgcagttactgctgcgaaatggtaaagggggtggtcataatgacaccgctcggcgtgggcgacttgacgaaatgcaaaacggcatgtcggcctcgtaacgctcgggtggcgtggtggcttggttaaccgcctcgctcgttactggtgtatcttctgcggcgtgccccgctggcgctctgtcccaagcggcgagaacctacaaggcacacagtcttttcttgcctgatacccaaggtggcccttggtcgaagggacaaatcctcaggtgtcgtttggggtggccctacctttcaggcgtcatccttgttccctacacttctgcagtagagggggagtgctcgggttggtatcgcttaccatattcttgcgcttgaacccttgcttcctttcttccctagaagccctctggctattgtgcctccttgcttcctcgtgcccgtccagcttgcctactacacgtatggcgtcattccacgtttccttgatctgagagagtcgtctccatggtctggataagaaggggttcccccctcgagagaggtctcagggtgtagactggagggtgagggtgaaatgcctcgtcccggggatgacgagttggtcgtacttgcgtccttctatgagcgcgagttcggcttgcccctgcatccctttgtgggcggactcccccactactatcagctggaggttcataaccttcaacccaacaatatccttcacgtggtgtgcttcatcacgctatgtgaggcgttcatggggatcgaccctcactggaagctgtggcagtatttcttcagagcgcatgtggccccgggtcgcggcggtcagttgtatgttggctcgaccaatattcagcttgtgcaggccggaaaacagagtactttaagatcccccttccttcatctatgtgatatgaaggggagtggttctttgtcaagaacgtggctaggagtgtcccgccgttcaccagtcgagagccggtatcggcggaggactggcaccacggggtggaggcgagcctcatgagtgaggtggagcatcttctgatggcgatctggacattgaagcagcgagatctcaccagcgcgcggctggtgtgcacttttatgcatcgccagattcagcccttgatggcctattagagaccgatgcaccagtactccggcgtcgacgatcctgaccgccattcctccaagcacctcgcactgacagagatcgaggcccgggtcaaggttgtcacggcgttgtcatcggaatccttcatggacgaggactcgccccttcctctctaaggatgtcgtgagcactctggtgagttccttcttcctgacgtttttcattcatttgtcttccttcgttcgttgtgtctgatgcggactctacaagggatcggacccccgacgtcgtgtcttccgcccctccctaagggcattatcgtcatggcggagcgggagagagacgcgggggagaccttggcagcacgctcgaagcgcctccaagcgaagaaagagaagagggcctcccgccctgctcgcgcagaaccaaggggggtgtcccttcttcctctgattcggaggatatgacctccactgcctaaggggggatggaggtcctagcggcagtgggtggtccatctcattatggcgatgttgaggccagctccaacgtccccgcctagacggacgggttggcccatgacgttgcagcacctacggtatgctcaaagtgtcgcgtggaattcgcttggacctgggggtggcgagggagcaatggcgcaggtggtgtcacacccctcggtgtcatcggtgttgctagggcatcacgcgggaaagagctcgtgggaactccctcctccgtggttgaagtggcgtcacggatggcgcttcaagcggtgccgccacctccggcaccttcaacggttgctcggaagaaagtgaccacccggaaacgctcctcgtggtatgttgttgttgggtcctcttgctcttgtcttcggttttggtcttcgtttcgtattttttctcttatttccttggtcagcatgtatgtgtcgcgcaagttggtgaaggacgcggcttcagcggcgaggggggcttacgactccttcggacctcccgcctctgtcgttggagggaacggctcctttgaccgacgtggccgtcccgccagccgacgttgttgccagcggctatgggtgggagggaggggaaggaaaatgagatctagcactataccatgttggaaaccttccctgactagggttgggacttgtatatatagactaagagttggtgggtctgacccattacacaagggtaaaacagtaattacaaggggctaactcaaaaaccctaagcagggctctagcaagatgcattgttgctttgtggattgcaattttttaaagcacagaagggcagacccagtgccggatgctcccacgtgagtgaggtctaggaaagggataaaccgagactcttccttcccccgtaaatgaggagagactgattcgaac

SEQ ID NO: 48768 - DNA, 4420 bp, Zea Mays
ccagcactgcaaccagtaggtgctgttggcgaaccaatctcacctcccagccccaagagggcacttaattctagttctacttgtagcagcagcacgggtaccttcctcctcgtgatgattaattaaaacgcacgagcaaggatgacgatgcactatagaggcatagagccacagtgtaccgcagctcgcgacgagccagccagccaacgaccgctctcaccttcttcgtcctcgcagccggagatggagcagtgtagcacgtaggagtagttcgggaacgaggaattcgctttgccgtcggcgacgggagacgacggacggacgctgcttcctctggcctgggcgtctggcggcctgcacacctgacacctcgcctcccacagccctttcggccgccttttggctttgcaggctttttgtgcctcctgctgcttccccgtccctccccctccgcctcccaccggcacccccactctccacttctccagtcggccgggcactcctcccttgccccggcctcacaccaccacacgtccacaatgctgccgtcctccagatcgagatctgggccgaacgagtcccccatcagcaggggcaggccgagcacggcgtcctccaaccaccgcccctccacgccgtcctccaaccaccgcccctccacgccctcctccaaccaccgcccgtccacgccctcctccagccaccgcccctccacgccgggcggcaccaggaggagcagcgtcggcacgccgtccacgccgcgctcccgcagcaacggcgcgggccccttcaagtccgagcccaactcgccgccatcggccgccgcacagaagccccgcctctcgttcgaccgctccccgagatccgtggacaccaagcccgtcgtcgagcgccgggtgcccaagatcggcaccactcctgaaaagcagctccggagggaggccgaactgcaggcacagcttgagtccacccatgaggacctgaagaaggccaaggatcaactggcattcatcctcggagagagggaccgtcttgtcggggagctcaacgaggccaagagagtcgctgatgagactcacgagaagctccaggatgccctcatggccaagaggtgggccgaggaggccactgagatcgagaagttccgcgcggatgagctggagcaggcaggcatcgatgaggcacagaggcgggaggaggagtggcagagggagattgagtgcgtgcatggccagcacgccgcggacttggagacgttggtcaacacaacggaggagctggagaggctcagacgtgatctttccatggtgaacgacgccaagaaagctgcacttggccatgcagatgatgcaatgaagatcgctgaggccaatgcggagaaggtggagatcctctcaaatgaagctgctcgcttgaaaggcttgcttgattcgagtgctgccagcgaagagagtaaaagccgtgaagctgagcttcttgttaagaatctgaggtccgaggtttcatctctgaaaggcaaacttgagaaggcaatagtccttgaagagaggttggctgaagcagaaaaaatcattgaggagcttaaatcagagatagctgatgcgcagaaggtcaaagctgacatctgtctgcagttagaagaatggaaggagaagtcaggatcacttgagatgaaattggtgggagttactctatctgagaagttaaaaagtgactcacttgcctccacgactgaagagctggacaaggtcaagtcgatattgcaagatagagaattggaaattgatgttcttaaaggaaagataactgccatggaaattgaggtggcaaggcttttagcggatgtaactgattcaaatgagcatctggatgcatcacagcaagaggtgtttgggctgcagactacaatagatgttctgaggaacaagcttgatgctgcagaactagctgcctcagaggctttggacaatgagaggactgctatcacaaagattgaaggcctagctgaggagaaaatcaaactcattagtgagctggatgatgctagagacagagaggagagagagaaaatggcaattgaggatcttactgctgcattggataaggcatcttgtgaagcacaggaagcacatgataggtttcagaagaaagaagatgattatgaacatgctcttgcgcagataggtgatctgaagatgtccgcgaagactatggaagagtgttatagtgtaatgcttgatgaggcaaaacacgacataactggcctacgggaaactgtggagaagctagaagctgaagtgagcaagtgcagagaagaatgtgaatgtaaggagcttgaccttatcacggctagcaagcagtctgaacaagaaattgctgctcttaaagaagaagcccagcatttatctgcatcactgcaagttgcagagcacgagcttgaagcagtcaatgaagagagagaaaggtttcaggagaaactggcgtgcacagaatcagcagttgctgaagccaaccacgctgtgcaggaggcaaaggccgagaaggagaggcttcaagagaagcttgcacacacggaatcagaggttgctgtggccaacatggctgcacatgaatctaagattgagttcgacaggcttcaagagaaacttacatacacagagttggtggttgctgaagccaacaaggctgtgcaggaggcaaaggctgagagttcgcatctgaaggagcggttacttgacaaagagaatgcattgcagagcataacccaggagaatgatgaattcaggatgcgagaagctgacgccatgaagaaaatagacgagctgtctgctctgcttgctgaagccatgacaaagaagcatcctgaggaggaagaaaagctggtggttgttgatgaggcacacaattctatgcgtgatgaagttatctgttctgttgcagaaaatggagatacggaagaaactgatgataaaaaaccaaagcttgaagttgaagcagtcgatatgaagtccaatggtcaatccaagcatgaagagaaagatgacagcaaggtggaacaagaggaactgaaaactgagctcagcttgcaagagagcaagaaagttagcttcgacaaggacacatggacaaaaaacaaaaaacaagaaactgaatcgcccaatgatgagttaggctcgaagaaggttagcagcagcaccgagaacgcaagcagggccattataccagaggatacggcgactaaagtgtcagcctctccaacgaaaccacagcatcagaaaaagaataagcctctgctgaagaagtttgggagcttactgaaaaagaaaaacagcaagtagccgaacagtgaccgtactattagtgttgttttggatttcttcttatccttttgtttgacgaggtgttgtgcttcctatgcgtttgatcccagtgcctatatttgtggtgattggagaagtttgtgggtgtcgtgatttttttctctctcactttcttaacttggggcctatatggtgttggctgctatctacacgtttatggctgtgtaaatggagttcctcctgatcagaatggatattcgtttctgaaactgtgcagctccttgattgattgtaggttaatgtgatgtaaggcgcccgtgacctaacctggatataatatttattaactagaggactttgagcatagaatgttatctgcaatccagttgataccataatgttgaagcttgtgattgcctttgcgagttgtagcctcctaatctgttctggttgcttgccatcgatcagatcaggtgcagaaaaaggtgcagcaggtgtgattggattggaatccctcgttggggttggccatcgcttcttaccacactgacatcagagggttggccatcgcttcttgctacactgacagcagaggaagtatcatttcatttctgccaacacacaggattgttttaatccactcgaggcttcgtatatcttgtccgatgcattatcctcttgtgcgtgtcctgagtcctaacggtacggcaccgctgtgtcgcttatgggtccaaccacgtgctgttccaagcgcaaacgacatatgaatacctctgttggatggtttgagtcgtcgacttcgaatatgggtgctgccttgggggcgcagccgaatgtcatgcggatgatatcgtggtggtccctcaacatgttctgaattgaaggcggtgggaagcatctgagagaggccataatcccaacaccatttacgtgtagagaaagctcacgactttatacgaagttacctatccaagctgtttggttctcgtgtggctaccctttacatagggacaataataaggattagtaagaaccttctgtgatttttgatactttggtaaaaatacgggtgcgtcattaggagtttgcattctctacca

SEQ ID NO: 48769 - DNA, 4066 bp, Zea Mays
ctctctctctctcttatttttatttgctcgcgctcttgttccgcctgtcggttttctcttcttttcttcaatggcagatctagtagtatccagtaatccagctagacccgacgcttcatttggtgtttttttcttggctctcttcttcgccgatttccctgcgccgtagttgcttttcatcgtcaaatgtggtgtaccgtctcgtctgatctgggccgaacgagtcccccatcagcaggggcaggccgagcacggcgtcctccaaccaccgcccctccacgccgtcctccaaccaccgcccctccacgccctcctccaaccaccgcccgtccacgccctcctccagccaccgcccctccacgccgggcggcaccaggaggagcagcgtcggcacgccgtccacgccgcgctcccgcagcaacggcgcgggccccttcaagtccgagcccaactcgccgccatcggccgccgcacagaagccccgcctctcgttcgaccgctccccgagatccgtggacaccaagcccgtcgtcgagcgccgggtgcccaagatcggcaccactcctgaaaagcagctccggagggaggccgaactgcaggcacagcttgagtccacccatgaggacctgaagaaggccaaggatcaactggcattcatcctcggagagagggaccgtcttgtcggggagctcaacgaggccaagagagtcgctgatgagactcacgagaagctccaggatgccctcatggccaagaggtgggccgaggaggccactgagatcgagaagttccgcgcggatgagctggagcaggcaggcatcgatgaggcacagaggcgggaggaggagtggcagagggagattgagtgcgtgcatggccagcacgccgcggacttggagacgttggtcaacacaacggaggagctggagaggctcagacgtgatctttccatggtgaacgacgccaagaaagctgcacttggccatgcagatgatgcaatgaagatcgctgaggccaatgcggagaaggtggagatcctctcaaatgaagctgctcgcttgaaaggcttgcttgattcgagtgctgccagcgaagagagtaaaagccgtgaagctgagcttcttgttaagaatctgaggtccgaggtttcatctctgaaaggcaaacttgagaaggcaatagtccttgaagagaggttggctgaagcagaaaaaatcattgaggagcttaaatcagagatagctgatgcgcagaaggtcaaagctgacatctgtctgcagttagaagaatggaaggagaagtcaggatcacttgagatgaaattggtgggagttactctatctgagaagttaaaaagtgactcacttgcctccacgactgaagagctggacaaggtcaagtcgatattgcaagatagagaattggaaattgatgttcttaaaggaaagataactgccatggaaattgaggtggcaaggcttttagcggatgtaactgattcaaatgagcatctggatgcatcacagcaagaggtgtttgggctgcagactacaatagatgttctgaggaacaagcttgatgctgcagaactagctgcctcagaggctttggacaatgagaggactgctatcacaaagattgaaggcctagctgaggagaaaatcaaactcattagtgagctggatgatgctagagacagagaggagagagagaaaatggcaattgaggatcttactgctgcattggataaggcatcttgtgaagcacaggaagcacatgataggtttcagaagaaagaagatgattatgaacatgctcttgcgcagataggtgatctgaagatgtccgcgaagactatggaagagtgttatagtgtaatgcttgatgaggcaaaacacgacataactggcctacgggaaactgtggagaagctagaagctgaagtgagcaagtgcagagaagaatgtgaatgtaaggagcttgaccttatcacggctagcaagcagtctgaacaagaaattgctgctcttaaagaagaagcccagcatttatctgcatcactgcaagttgcagagcacgagcttgaagcagtcaatgaagagagagaaaggtttcaggagaaactggcgtgcacagaatcagcagttgctgaagccaaccacgctgtgcaggaggcaaaggccgagaaggagaggcttcaagagaagcttgcacacacggaatcagaggttgctgtggccaacatggctgcacatgaatctaagattgagttcgacaggcttcaagagaaacttacatacacagagttggtggttgctgaagccaacaaggctgtgcaggaggcaaaggctgagagttcgcatctgaaggagcggttacttgacaaagagaatgcattgcagagcataacccaggagaatgatgaattcaggatgcgagaagctgacgccatgaagaaaatagacgagctgtctgctctgcttgctgaagccatgacaaagaagcatcctgaggaggaagaaaagctggtggttgttgatgaggcacacaattctatgcgtgatgaagttatctgttctgttgcagaaaatggagatacggaagaaactgatgataaaaaaccaaagcttgaagttgaagcagtcgatatgaagtccaatggtcaatccaagcatgaagagaaagatgacagcaaggtggaacaagaggaactgaaaactgagctcagcttgcaagagagcaagaaagttagcttcgacaaggacacatggacaaaaaacaaaaaacaagaaactgaatcgcccaatgatgagttaggctcgaagaaggttagcagcagcaccgagaacgcaagcagggccattataccagaggatacggcgactaaagtgtcagcctctccaacgaaaccacagcatcagaaaaagaataagcctctgctgaagaagtttgggagcttactgaaaaagaaaaacagcaagtagccgaacagtgaccgtactattagtgttgttttggatttcttcttatccttttgtttgacgaggtgttgtgcttcctatgcgtttgatcccagtgcctatatttgtggtgattggagaagtttgtgggtgtcgtgatttttttctctctcactttcttaacttggggcctatatggtgttggctgctatctacacgtttatggctgtgtaaatggagttcctcctgatcagaatggatattcgtttctgaaactgtgcagctccttgattgattgtaggttaatgtgatgtaaggcgcccgtgacctaacctggatataatatttattaactagaggactttgagcatagaatgttatctgcaatccagttgataccataatgttgaagcttgtgattgcctttgcgagttgtagcctcctaatctgttctggttgcttgccatcgatcagatcaggtgcagaaaaaggtgcagcaggtgtgattggattggaatccctcgttggggttggccatcgcttcttaccacactgacatcagagggttggccatcgcttcttgctacactgacagcagaggaagtatcatttcatttctgccaacacacaggattgttttaatccactcgaggcttcgtatatcttgtccgatgcattatcctcttgtgcgtgtcctgagtcctaacggtacggcaccgctgtgtcgcttatgggtccaaccacgtgctgttccaagcgcaaacgacatatgaatacctctgttggatggtttgagtcgtcgacttcgaatatgggtgctgccttgggggcgcagccgaatgtcatgcggatgatatcgtggtggtccctcaacatgttctgaattgaaggcggtgggaagcatctgagagaggccataatcccaacaccatttacgtgtagagaaagctcacgactttatacgaagttacctatccaagctgtttggttctcgtgtggctaccctttacatagggacaataataaggattagtaagaaccttctgtgatttttgatactttggtaaaaatacgggtgcgtcattaggagtttgcattctctacca

SEQ ID NO: 48770 - DNA, 749 bp, Zea Mays
cctcatcaggcgcagcatcttcctcactgtgatcttctcctgtaacaaactcgtcacgctgtaaccatctccacggaacccagagtccgttgctcgcagcctagaatcgaccttcgtagggctataaagccatataccgggcgccaccaattgtgcacccacctgacgacatcgtgccaccaccgagagaggacaatagagagggagagagagagcatggagctgtcgcggctattcttcctcggagatgcgaatgggttccagtgaagagggcatgagagtctacagggcacatggaagctacggctcccaccaatttgacgagcatggcttcagagccggggtaattgctcgccgtcgtcgtggagccatatcttgccgcgggcagtgtggtcatcgtctctgatttcggtactacaagatggatcatgaaggatgctacaatgagttcggagaggtctagctcgtcttctcccagtcaactatggttgcagaggatcgttgtcgtcaatcgtcatatgatgtaattattttagctattttgtatagaacccctattttataataaatatgtgacattgatttctgtatcatgagtcatcatatgtgtgaaacttgatcctagcacacatttgattcgtgcccgggtttgcccttaaatccgggtgtgacagtatggtatgccgatgaattcacatctagagcaaattccaccatcgttgtccctgcttaatagatcagtgactctg

SEQ ID NO: 48771 - DNA, 760 bp, Zea Mays
cctcatcaggcgcagcatcttcctcactgtgatcttctcctgtaacaaactcgtcacgctgtaaccatctccacggaacccagagtccgttgctcgcagcctagaatcgaccttcgtagggctataaagccatataccgggcgccaccaattgtgcacccacctgacgacatcgtgccaccaccgagagaggacaatagagagggagagagagagcatggagctgtcgcggctattcttcctcggagatgcgaatgggttccagtgaagagggcatgagagtctacagggcacatggaagctacggctcccaccaatttgacgagcatggcttcagagccggggtaattgctcgccgtcgtcgtggagccatatcttgccgcgggcagtgtggtcatcgtctctgatttcggtcaagaacaggtactacaagatggatcatgaaggatgctacaatgagttcggagaggtctagctcgtcttctcccagtcaactatggttgcagaggatcgttgtcgtcaatcgtcatatgatgtaattattttagctattttgtatagaacccctattttataataaatatgtgacattgatttctgtatcatgagtcatcatatgtgtgaaacttgatcctagcacacatttgattcgtgcccgggtttgcccttaaatccgggtgtgacagtatggtatgccgatgaattcacatctagagcaaattccaccatcgttgtccctgcttaatagatcagtgactctg

SEQ ID NO: 48772 - DNA, 786 bp, Zea Mays
gggttctctcatctagtgaaactttgtaaaagccttgcagtggatccctagtcattcaccttgtaagtgtctaagggtcttgcaaaccctggctaaacaggaaacacgtcttgtgggtaaagatgtgcaacctctgcagagtgtaaaactggtatatcatccgtgctcgcagtcaagagcgactcaggactctcacatgattaacttatagaattaaatttaatttggcatatgcattacattgtgggattattattaattgtgatcaattatttatttgggttggtatacacttgtacttagtaattgctaataaaagtttgaccaacttattaaaagcaatgctcaaccttaactatttttcttggtaagtcttacacttcacatgagcccccactttaagtgagctcatacacattattccctacaacttgttgagcgatcaacatatgtgagttcatccttattgtactcacacctaggtcaagaacaggtactacaagatggatcatgaaggatgctacaatgagttcggagaggtctagctcgtcttctcccagtcaactatggttgcagaggatcgttgtcgtcaatcgtcatatgatgtaattattttagctattttgtatagaacccctattttataataaatatgtgacattgatttctgtatcatgagtcatcatatgtgtgaaacttgatcctagcacacatttgattcgtgcccgggtttgcccttaaatccgggtgtgacagtatggtatgccgatgaattcacatctagag

SEQ ID NO: 48773 - DNA, 3078 bp, Zea Mays
gttcaaaggaggccacggggcgggcgctagtgctcgagcccgagcagagtcatcgcagccgcgtttcgccttcccctctcgctcgcctgcggttcggttggttagctcggcagctggagcgttttccccgctggtggttcgtctttcggttgctccacctccaaccgaacctccctcctccccaccacaaatatactagtgctagcaaccaccaccacctgcgtcttcccagctccgttccgtcctcgcccgccggccaccaccggtggggcccactgccctacgctccgattgcttgcctggcccttcccaccgcctctgtgcggcgtcgcgcgggaaacacaccaacgtccaaggggaggtagagagagaggaacgggaggcgcctcggatccccggcctccaccgcgcgccgggggacctccggagtgaaatgtgggacccgtgccgccgggaatttctctagaggcttgtccgcaccaccgccgagcgacacgatatggtggagggtaggagctatctccctgcagaggtcaggagcggcctcgagaccctgaagcagaggaggctcgagagaatgcgtttgagtgctcagaatgaagagggcggcaatcctgcgttggctgcgagaagcggtggtgatgccttgcggagccccactaactgcagggtcagattgcatcccgacaacaatacaggaggtttacctggagatgtccagggcaagaatccttttgcaaagcgcaaggtggagaagtttgatatgtccaaccttgagtggataaacaagataccagagtgccctgtgtattgtcccaccaaggtggaattcgaggatcccattgcttatatacaaatgatttcacccgaggctgctaaatacggtatttgtaaaatcgtctctcctgtatgtgcgtctgttcctgccggtgttgtgctgatgaaggaacagcccagctttaagttcatgactagagttcagccccttcgtcttgctgaatgggctgaggatgatacggtcactttcttcatgagtggaagaaagtacaccttccgggactacgagaaaatggcaaacaaagtgttctctaagagatattccagctctagttgtcttccaggtaggtatgtggaggaggagttctggcgtgaaattgcttttggcaaaatggatttcgtagaatatgcttgtgatgttgatgggagtgccttctcttcttctccccatgatcaacttgggaaaagcaactggaacctcaagaatttttcacggctccccggttcagttctaagacttcttcagacaccaattccaggagtgacagatccaatgctttatattgggatgctcttcagcatgtttgcgtggcatgtggaagatcattatttgtacagcatcaattaccatcactgtggggcatctaagacatggtatgggataccaggcgatgcggctcctgggtttgaaagggttgcaagccaatacgtatataacaaggacattttgattggtgatggagaggatgcagcgtttgatgttctactgggcaagacgacaatgttccctccaaatgtcttgctagatcacaatgttcctgtctataaagctgtacaaagacctggagagtttgttataacgtttcctcgttcttaccacgcaggcttcagtcatgaacaagaactgcggagctgcccttgtaagtccagtcgtgttgtctatgttagagaagacatactggagctagaggctctatcaagaaaatttgagcatgatgtctacttgtataaggaaagaagttccattagatcatgtaaggaggctgagatctctgatgctaatgttgaacacgtcccaaatcttggtattactctggattttgctaatagtaaagctggtagctctggctttataactgtcgatggaggaaacagttcttctgcagtatcaattttgacatcttctgcgcatcatgaggcactcatgcattcagaagcaagggttcatgcaacacaaactgaccagatttattccactgccaagcaggcaataaatacatcagtgaccaaaggaacttgcactacagatgagagttcatccggcatggattgtgcttgtaatgaacatggttcatgtaatgcttcagtcatggaatgcagtgatgattccggttcagagaatgaaattttccgagtcaagcgcaggtccaccttatttgacaaacctacttctgaaacaaagacatcaaccttgtctgaacagcaggttctgaggcggctgaagaaggtacgtcctggagtacagcaggtcagtaagcgtccagaagaatctggtaatggttcagttcgctctacccatatgagcccgagctcaaatcatgcctcttcggatgatgaaatagacatggctcccctattcttgaggataaagcggcggcagttggaaaaccaagatgttacaagtcgtggcgcgagatcacagtcatacccatcttccagtggttctcgagaagagtttgtggaaagaagtagagatgctgcagcagagctccgtccaaaacgagtgaaaatccggctaccttctagtgccagtaggcagattgagcagcagcgcagttcggggcagcgatttgcaagggaggacaagttgccgcttgcattttagggaatcacagggcctccaatttgaggcctctgggggcacgcttaggagacacacacgtgacaatattctcgttgctcgaggttctgtgtcactgccggtggctctttgatgcctggttatcagtgacagaaattgaggagaacctcgctacttcgatttctctgcaagtgtttagagcatgtagctagcttagctgtatatctctcactgtacctacggtctttcctattttttttgtaatttcctgtaaacaggcatagctgctacagtatggctaactctctattcttttgttggtttagcctggcgctgcttagcattttcaattaaatcgagattcgtttccttttcggatggttggtatatgttctggtgttgctgctctcaattgtgtggaatgttctgttatgttggca

SEQ ID NO: 48774 - DNA, 3580 bp, Zea Mays
agtcatcgcagccgcgtttcgccttcccctctcgctcgcctgcggttcggttggttagctcggcagctggagcgttttccccgctggtggttcgtctttcggttgctccacctccaaccgaacctccctcctccccaccacaaatatactagtgctagcaaccaccaccacctgcgtcttcccagctccgttccgtcctcgcccgccggccaccaccggtggggcccactgccctacgctccgattgcttgcctggcccttcccaccgcctctgtgcggcgtcgcgcgggaaacacaccaacgtccaaggggaggtagagagagaggaacgggaggcgcctcggatccccggcctccaccgcgcgccgggggacctccggagtgaaatgtgggacccgtgccgccgggaatttctctagaggcttgtccgcaccaccgccgagcgacacgatatggtggagggtaggagctatctccctgcagaggtcaggagcggcctcgagaccctgaagcagaggaggctcgagagaatgcgtttgagtgctcagaatgaagagggcggcaatcctgcgttggctgcgagaagcggtggtgatgccttgcggagccccactaactgcagggtcagattgcatcccgacaacaatacaggaggtttacctggagatgtccagggcaagaatccttttgcaaagcgcaaggtggagaagtttgatatgtccaaccttgagtggataaacaagataccagagtgccctgtgtattgtcccaccaaggtggaattcgaggatcccattgcttatatacaaatgatttcacccgaggctgctaaatacggtatttgtaaaatcgtctctcctgtatgtgcgtctgttcctgccggtgttgtgctgatgaaggaacagcccagctttaagttcatgactagagttcagccccttcgtcttgctgaatgggctgaggatgatacggtcactttcttcatgagtggaagaaagtacaccttccgggactacgagaaaatggcaaacaaagtgttctctaagagatattccagctctagttgtcttccaggtaggtatgtggaggaggagttctggcgtgaaattgcttttggcaaaatggatttcgtagaatatgcttgtgatgttgatgggagtgccttctcttcttctccccatgatcaacttgggaaaagcaactggaacctcaagaatttttcacggctccccggttcagttctaagacttcttcagacaccaattccaggagtgacagatccaatgctttatattgggatgctcttcagcatgtttgcgtggcatgtggaagatcattatttgtacagcatcaattaccatcactgtggggcatctaagacatggtatgggataccaggcgatgcggctcctgggtttgaaagggttgcaagccaatacgtatataacaaggacattttgattggtgatggagaggatgcagcgtttgatgttctactgggcaagacgacaatgttccctccaaatgtcttgctagatcacaatgttcctgtctataaagctgtacaaagacctggagagtttgttataacgtttcctcgttcttaccacgcaggcttcagtcatggcttcaattgtggagaggctgttaattttgctgttggcgattggttccctcttggttctttggctagcaagcgctacgcgcttctgaacagaactccattgcttgcacatgaggagctactttgtcgttctgctatgcttctgtcccaaaagctgttaaactgtgacccaagatccttggacaagttggaacatccatgttcccagtattctgtgaaatcctgctttgtgcggttgataaaattccagcgacgtgcacgtgacctacttgctaaaatgggttctgaaatatgctataagccaaagacatctccaaatctatcctgtagcatttgccggcgtggttgctatatcacacatgtgttgtgtggatgtaactttgatcctgtctgcctacatcatgaacaagaactgcggagctgcccttgtaagtccagtcgtgttgtctatgttagagaagacatactggagctagaggctctatcaagaaaatttgagcatgatgtctacttgtataaggaaagaagttccattagatcatgtaaggaggctgagatctctgatgctaatgttgaacacgtcccaaatcttggtattactctggattttgctaatagtaaagctggtagctctggctttataactgtcgatggaggaaacagttcttctgcagtatcaattttgacatcttctgcgcatcatgaggcactcatgcattcagaagcaagggcaataaatacatcagtgaccaaaggaacttgcactacagatgagagttcatccggcatggattgtgcttgtaatgaacatggttcatgtaatgcttcagtcatggaatgcagtgatgattccggttcagagaatgaaattttccgagtcaagcgcaggtccaccttatttgacaaacctacttctgaaacaaagacatcaaccttgtctgaacagcaggttctgaggcggctgaagaaggtacgtcctggagtacagcaggtcagtaagcgtccagaagaatctggtaatggttcagttcgctctacccatatgagcccgagctcaaatcatgcctcttcggatgatgaaatagacatggctcccctattcttgaggataaagcggcggcagttggaaaaccaagatgttacaagtcgtggcgcgagatcacagtcatacccatcttccagtggttctcgagaagagtttgtggaaagaagtagagatgctgcagcagagctccgtccaaaacgagtgaaaatccggctaccttctagtgccagtaggcagattgagcagcagcgcagttcggggcagcgatttgcaagggaggacaagttgccgcttgcattttagggaatcacaggtactaacctctactgggcagacgaattctttgtttaagtgcattgttaactacaaaacgaggtggcagaagagagtgggagggatcaggttgtgattgtggcagagctgatttggttagcacaggtgcagactgactttagaattggcagcaaagggaagtggctggctaatcgattcttttgtgcagcagggcctccaatttgaggcctctgggggcacgcttaggagacacacacgtgacaatattctcgttgctcgaggttctgtgtcactgccggtggctctttgatgcctggttatcagtgacagaaattgaggagaacctcgctacttcgatttctctgcaagtgtttagagcatgtagctagcttagctgtatatctctcactgtacctacggtctttcctattttttttgtaatttcctgtaaacaggcatagctgctacagtatggctaactctctattcttttgttggtttagcctggcgctgcttagcattttcaattaaatcgagattcgtttccttttcggatggttggtatatgttctggtgttgctgctctcaattgtgtggaatgttctgttatgttggca

SEQ ID NO: 48775 - DNA, 3422 bp, Zea Mays
ccgcgtttcgccttcccctctcgctcgcctgcggttcggttggttagctcggcagctggagcgttttccccgctggtggttcgtctttcggttgctccacctccaaccgaacctccctcctccccaccacaaatatactagtgctagcaaccaccaccacctgcgtcttcccagctccgttccgtcctcgcccgccggccaccaccggtggggcccactgccctacgctccgattgcttgcctggcccttcccaccgcctctgtgcggcgtcgcgcgggaaacacaccaacgtccaaggggaggtagagagagaggaacgggaggcgcctcggatccccggcctccaccgcgcgccgggggacctccggagtgaaatgtgggacccgtgccgccgggaatttctctagaggcttgtccgcaccaccgccgagcgacacgatatggtggagggtaggagctatctccctgcagaggtcaggagcggcctcgagaccctgaagcagaggaggctcgagagaatgcgtttgagtgctcagaatgaagagggcggcaatcctgcgttggctgcgagaagcggtggtgatgccttgcggagccccactaactgcagggtcagattgcatcccgacaacaatacaggaggtttacctggagatgtccagggcaagaatccttttgcaaagcgcaaggtggagaagtttgatatgtccaaccttgagtggataaacaagataccagagtgccctgtgtattgtcccaccaaggtggaattcgaggatcccattgcttatatacaaatgatttcacccgaggctgctaaatacggtatttgtaaaatcgtctctcctgtatgtgcgtctgttcctgccggtgttgtgctgatgaaggaacagcccagctttaagttcatgactagagttcagccccttcgtcttgctgaatgggctgaggatgatacggtcactttcttcatgagtggaagaaagtacaccttccgggactacgagaaaatggcaaacaaagtgttctctaagagatattccagctctagttgtcttccaggtaggtatgtggaggaggagttctggcgtgaaattgcttttggcaaaatggatttcgtagaatatgcttgtgatgttgatgggagtgccttctcttcttctccccatgatcaacttgggaaaagcaactggaacctcaagaatttttcacggctccccggttcagttctaagacttcttcagacaccaattccaggagtgacagatccaatgctttatattgggatgctcttcagcatgtttgcgtggcatgtggaagatcattatttgtacagcatcaattaccatcactgtggggcatctaagacatggtatgggataccaggcgatgcggctcctgggtttgaaagggttgcaagccaatacgtatataacaaggacattttgattggtgatggagaggatgcagcgtttgatgttctactgggcaagacgacaatgttccctccaaatgtcttgctagatcacaatgttcctgtctataaagctgtacaaagacctggagagtttgttataacgtttcctcgttcttaccacgcaggcttcagtcatggcttcaattgtggagaggctgttaattttgctgttggcgattggttccctcttggttctttggctagcaagcgctacgcgcttctgaacagaactccattgcttgcacatgaggagctactttgtcgttctgctatgcttctgtcccaaaagctgttaaactgtgacccaagatccttggacaagttggaacatccatgttcccagtattctgtgaaatcctgctttgtgcggttgataaaattccagcgacgtgcacgtgacctacttgctaaaatgggttctgaaatatgctataagccaaagacatctccaaatctatcctgtagcatttgccggcgtggttgctatatcacacatgtgttgtgtggatgtaactttgatcctgtctgcctacatcatgaacaagaactgcggagctgcccttgtaagtccagtcgtgttgtctatgttagagaagacatactggagctagaggctctatcaagaaaatttgagcatgatgtctacttgtataaggaaagaagttccattagatcatgtaaggaggctgagatctctgatgctaatgttgaacacgtcccaaatcttggtattactctggattttgctaatagtaaagctggtagctctggctttataactgtcgatggaggaaacagttcttctgcagtatcaattttgacatcttctgcgcatcatgaggcactcatgcattcagaagcaagggttcatgcaacacaaactgaccagatttattccactgccaagcaggcaataaatacatcagtgaccaaaggaacttgcactacagatgagagttcatccggcatggattgtgcttgtaatgaacatggttcatgtaatgcttcagtcatggaatgcagtgatgattccggttcagagaatgaaattttccgagtcaagcgcaggtccaccttatttgacaaacctacttctgaaacaaagacatcaaccttgtctgaacagcaggttctgaggcggctgaagaaggtacgtcctggagtacagcaggtcagtaagcgtccagaagaatctggtaatggttcagttcgctctacccatatgagcccgagctcaaatcatgcctcttcggatgatgaaatagacatggctcccctattcttgaggataaagcggcggcagttggaaaaccaagatgttacaagtcgtggcgcgagatcacagtcatacccatcttccagtggttctcgagaagagtttgtggaaagaagtagagatgctgcagcagagctccgtccaaaacgagtgaaaatccggctaccttctagtgccagtaggcagattgagcagcagcgcagttcggggcagcgatttgcaagggaggacaagttgccgcttgcattttagggaatcacagggcctccaatttgaggcctctgggggcacgcttaggagacacacacgtgacaatattctcgttgctcgaggttctgtgtcactgccggtggctctttgatgcctggttatcagtgacagaaattgaggagaacctcgctacttcgatttctctgcaagtgtttagagcatgtagctagcttagctgtatatctctcactgtacctacggtctttcctattttttttgtaatttcctgtaaacaggcatagctgctacagtatggctaactctctattcttttgttggtttagcctggcgctgcttagcattttcaattaaatcgagattcgtttccttttcggatggttggtatatgttctggtgttgctgctctcaattgtgtggaatgttctgttatgttggca

SEQ ID NO: 48776 - DNA, 3622 bp, Zea Mays
gttcggttggttagctcggcagctggagcgttttccccgctggtggttcgtctttcggttgctccacctccaaccgaacctccctcctccccaccacaaatatactagtgctagcaaccaccaccacctgcgtcttcccagctccgttccgtcctcgcccgccggccaccaccggtggggcccactgccctacgctccgattgcttgcctggcccttcccaccgcctctgtgcggcgtcgcgcgggaaacacaccaacgtccaaggggaggtagagagagaggaacgggaggcgcctcggatccccggcctccaccgcgcgccgggggacctccggagtgaaatgtgggacccgtgccgccgggaatttctctagaggcttgtccgcaccaccgccgagcgacacgatatgggaaacaacctcagaatatcagtgtgccgtgtttgattccagcacctacagctttcttgacttggttgccgagttgctgctctttggtggagggtaggagctatctccctgcagaggtcaggagcggcctcgagaccctgaagcagaggaggctcgagagaatgcgtttgagtgctcagaatgaagagggcggcaatcctgcgttggctgcgagaagcggtggtgatgccttgcggagccccactaactgcagggtcagattgcatcccgacaacaatacaggaggtttacctggagatgtccagggcaagaatccttttgcaaagcgcaaggtggagaagtttgatatgtccaaccttgagtggataaacaagataccagagtgccctgtgtattgtcccaccaaggtggaattcgaggatcccattgcttatatacaaatgatttcacccgaggctgctaaatacggtatttgtaaaatcgtctctcctgtatgtgcgtctgttcctgccggtgttgtgctgatgaaggaacagcccagctttaagttcatgactagagttcagccccttcgtcttgctgaatgggctgaggatgatacggtcactttcttcatgagtggaagaaagtacaccttccgggactacgagaaaatggcaaacaaagtgttctctaagagatattccagctctagttgtcttccaggtaggtatgtggaggaggagttctggcgtgaaattgcttttggcaaaatggatttcgtagaatatgcttgtgatgttgatgggagtgccttctcttcttctccccatgatcaacttgggaaaagcaactggaacctcaagaatttttcacggctccccggttcagttctaagacttcttcagacaccaattccaggagtgacagatccaatgctttatattgggatgctcttcagcatgtttgcgtggcatgtggaagatcattatttgtacagcatcaattaccatcactgtggggcatctaagacatggtatgggataccaggcgatgcggctcctgggtttgaaagggttgcaagccaatacgtatataacaaggacattttgattggtgatggagaggatgcagcgtttgatgttctactgggcaagacgacaatgttccctccaaatgtcttgctagatcacaatgttcctgtctataaagctgtacaaagacctggagagtttgttataacgtttcctcgttcttaccacgcaggcttcagtcatggcttcaattgtggagaggctgttaattttgctgttggcgattggttccctcttggttctttggctagcaagcgctacgcgcttctgaacagaactccattgcttgcacatgaggagctactttgtcgttctgctatgcttctgtcccaaaagctgttaaactgtgacccaagatccttggacaagttggaacatccatgttcccagtattctgtgaaatcctgctttgtgcggttgataaaattccagcgacgtgcacgtgacctacttgctaaaatgggttctgaaatatgctataagccaaagacatctccaaatctatcctgtagcatttgccggcgtggttgctatatcacacatgtgttgtgtggatgtaactttgatcctgtctgcctacatcatgaacaagaactgcggagctgcccttgtaagtccagtcgtgttgtctatgttagagaagacatactggagctagaggctctatcaagaaaatttgagcatgatgtctacttgtataaggaaagaagttccattagatcatgtaaggaggctgagatctctgatgctaatgttgaacacgtcccaaatcttggtattactctggattttgctaatagtaaagctggtagctctggctttataactgtcgatggaggaaacagttcttctgcagtatcaattttgacatcttctgcgcatcatgaggcactcatgcattcagaagcaagggcaataaatacatcagtgaccaaaggaacttgcactacagatgagagttcatccggcatggattgtgcttgtaatgaacatggttcatgtaatgcttcagtcatggaatgcagtgatgattccggttcagagaatgaaattttccgagtcaagcgcaggtccaccttatttgacaaacctacttctgaaacaaagacatcaaccttgtctgaacagcaggttctgaggcggctgaagaaggtacgtcctggagtacagcaggtcagtaagcgtccagaagaatctggtaatggttcagttcgctctacccatatgagcccgagctcaaatcatgcctcttcggatgatgaaatagacatggctcccctattcttgaggataaagcggcggcagttggaaaaccaagatgttacaagtcgtggcgcgagatcacagtcatacccatcttccagtggttctcgagaagagtttgtggaaagaagtagagatgctgcagcagagctccgtccaaaacgagtgaaaatccggctaccttctagtgccagtaggcagattgagcagcagcgcagttcggggcagcgatttgcaagggaggacaagttgccgcttgcattttagggaatcacaggtactaacctctactgggcagacgaattctttgtttaagtgcattgttaactacaaaacgaggtggcagaagagagtgggagggatcaggttgtgattgtggcagagctgatttggttagcacaggtgcagactgactttagaattggcagcaaagggaagtggctggctaatcgattcttttgtgcagcagggcctccaatttgaggcctctgggggcacgcttaggagacacacacgtgacaatattctcgttgctcgaggttctgtgtcactgccggtggctctttgatgcctggttatcagtgacagaaattgaggagaacctcgctacttcgatttctctgcaagtgtttagagcatgtagctagcttagctgtatatctctcactgtacctacggtctttcctattttttttgtaatttcctgtaaacaggcatagctgctacagtatggctaactctctattcttttgttggtttagcctggcgctgcttagcattttcaattaaatcgagattcgtttccttttcggatggttggtatatgttctggtgttgctgctctcaattgtgtggaatgttctgttatgttggca

SEQ ID NO: 48777 - DNA, 2500 bp, Zea Mays
ctccaaccgaacctccctcctccccaccacaaatatactagtgctagcaaccaccaccacctgcgtcttcccagctccgttccgtcctcgcccgccggccaccaccggtggggcccactgccctacgctccgattgcttgcctggcccttcccaccgcctctgtgcggcgtcgcgcgggaaacacaccaacgtccaaggggaggtagagagagaggaacgggaggcgcctcggatccccggcctccaccgcgcgccgggggacctccggagtgaaatgtgggacccgtgccgccgggaatttctctagaggcttgtccgcaccaccgccgagcgacacgatatggtggagggtaggagctatctccctgcagaggtcaggagcggcctcgagaccctgaagcagaggaggctcgagagaatgcgtttgagtgctcagaatgaagagggcggcaatcctgcgttggctgcgagaagcggtggtgatgccttgcggagccccactaactgcagggtcagattgcatcccgacaacaatacaggaggtttacctggagatgtccagggcaagaatccttttgcaaagcgcaaggtggagaagtttgatatgtccaaccttgagtggataaacaagataccagagtgccctgtgtattgtcccaccaaggtggaattcgaggatcccattgcttatatacaaatgatttcacccgaggctgctaaatacggtatttgtaaaatcgtctctcctgtatgtgcgtctgttcctgccggtgttgtgctgatgaaggaacagcccagctttaagttcatgactagagttcagccccttcgtcttgctgaatgggctgaggatgatacggtcactttcttcatgagtggaagaaagtacaccttccgggactacgagaaaatggcaaacaaagtgttctctaagagatattccagctctagttgtcttccaggtaggtatgtggaggaggagttctggcgtgaaattgcttttggcaaaatggatttcgtagaatatgcttgtgatgttgatgggagtgccttctcttcttctccccatgatcaacttgggaaaagcaactggaacctcaagaatttttcacggctccccggttcagttctaagacttcttcagacaccaattccaggagtgacagatccaatgctttatattgggatgctcttcagcatgtttgcgtggcatgtggaagatcattatttgtacagcatcaattaccatcactgtggggcatctaagacatggtatgggataccaggcgatgcggctcctgggtttgaaagggttgcaagccaatacgtatataacaaggacattttgattggtgatggagaggatgcagcgtttgatgttctactgggcaagacgacaatgttccctccaaatgtcttgctagatcacaatgttcctgtctataaagctgtacaaagacctggagagtttgttataacgtttcctcgttcttaccacgcaggcttcagtcatggcttcaattgtggagaggctgttaattttgctgttggcgattggttccctcttggttctttggctagcaagcgctacgcgcttctgaacagaactccattgcttgcacatgaggagctactttgtcgttctgctatgcttctgtcccaaaagctgttaaactgtgacccaagatccttggacaagttggaacatccatgttcccagtattctgtgaaatcctgctttgtgcggttgataaaattccagcgacgtgcacgtgacctacttgctaaaatgggttctgaaatatgctataagccaaagacatctccaaatctatcctgtagcatttgccggcgtggttgctatatcacacatgtgttgtgtggatgtaactttgatcctgtctgcctacatcatgaacaagaactgcggagctgcccttgtaagtccagtcgtgttgtctatgttagagaagacatactggagctagaggctctatcaagaaaatttgagcatgatgtctacttgtataaggaaagaagttccattagatcatgtaaggaggctgagatctctgatgctaatgttgaacacgtcccaaatcttggtattactctggattttgctaatagtaaagctggtagctctggctttataactgtcgatggaggaaacagttcttctgcagtatcaattttgacatcttctgcgcatcatgaggcactcatgcattcagaagcaagggcaataaatacatcagtgaccaaaggaacttgcactacagatgagagttcatccggcatggattgtgcttgtaatgaacatggttcatgtaatgcttcagtcatggaatgcagtgatgattccggttcagagaatgaaattttccgagtcaagcgcaggtccaccttatttgacaaacctacttctgaaacaaagacatcaaccttgtctgaacagcagtggccacctttttttgactgtgccatgtagaagttgcg

SEQ ID NO: 48778 - DNA, 2799 bp, Zea Mays
cttgacttggttgccgagttgctgctctttggtggagggtaggagctatctccctgcagaggtcaggagcggcctcgagaccctgaagcagaggaggctcgagagaatgcgtttgagtgctcagaatgaagagggcggcaatcctgcgttggctgcgagaagcggtggtgatgccttgcggagccccactaactgcagggtcagattgcatcccgacaacaatacaggaggtttacctggagatgtccagggcaagaatccttttgcaaagcgcaaggtggagaagtttgatatgtccaaccttgagtggataaacaagataccagagtgccctgtgtattgtcccaccaaggtggaattcgaggatcccattgcttatatacaaatgatttcacccgaggctgctaaatacggtatttgtaaaatcgtctctcctgtatgtgcgtctgttcctgccggtgttgtgctgatgaaggaacagcccagctttaagttcatgactagagttcagccccttcgtcttgctgaatgggctgaggatgatacggtcactttcttcatgagtggaagaaagtacaccttccgggactacgagaaaatggcaaacaaagtgttctctaagagatattccagctctagttgtcttccaggtaggtatgtggaggaggagttctggcgtgaaattgcttttggcaaaatggatttcgtagaatatgcttgtgatgttgatgggagtgccttctcttcttctccccatgatcaacttgggaaaagcaactggaacctcaagaatttttcacggctccccggttcagttctaagacttcttcagacaccaattccaggagtgacagatccaatgctttatattgggatgctcttcagcatgtttgcgtggcatgtggaagatcattatttgtacagcatcaattaccatcactgtggggcatctaagacatggtatgggataccaggcgatgcggctcctgggtttgaaagggttgcaagccaatacgtatataacaaggacattttgattggtgatggagaggatgcagcgtttgatgttctactgggcaagacgacaatgttccctccaaatgtcttgctagatcacaatgttcctgtctataaagctgtacaaagacctggagagtttgttataacgtttcctcgttcttaccacgcaggcttcagtcatgaacaagaactgcggagctgcccttgtaagtccagtcgtgttgtctatgttagagaagacatactggagctagaggctctatcaagaaaatttgagcatgatgtctacttgtataaggaaagaagttccattagatcatgtaaggaggctgagatctctgatgctaatgttgaacacgtcccaaatcttggtattactctggattttgctaatagtaaagctggtagctctggctttataactgtcgatggaggaaacagttcttctgcagtatcaattttgacatcttctgcgcatcatgaggcactcatgcattcagaagcaagggttcatgcaacacaaactgaccagatttattccactgccaagcaggcaataaatacatcagtgaccaaaggaacttgcactacagatgagagttcatccggcatggattgtgcttgtaatgaacatggttcatgtaatgcttcagtcatggaatgcagtgatgattccggttcagagaatgaaattttccgagtcaagcgcaggtccaccttatttgacaaacctacttctgaaacaaagacatcaaccttgtctgaacagcaggttctgaggcggctgaagaaggtacgtcctggagtacagcaggtcagtaagcgtccagaagaatctggtaatggttcagttcgctctacccatatgagcccgagctcaaatcatgcctcttcggatgatgaaatagacatggctcccctattcttgaggataaagcggcggcagttggaaaaccaagatgttacaagtcgtggcgcgagatcacagtcatacccatcttccagtggttctcgagaagagtttgtggaaagaagtagagatgctgcagcagagctccgtccaaaacgagtgaaaatccggctaccttctagtgccagtaggcagattgagcagcagcgcagttcggggcagcgatttgcaagggaggacaagttgccgcttgcattttagggaatcacaggtactaacctctactgggcagacgaattctttgtttaagtgcattgttaactacaaaacgaggtggcagaagagagtgggagggatcaggttgtgattgtggcagagctgatttggttagcacaggtgcagactgactttagaattggcagcaaagggaagtggctggctaatcgattcttttgtgcagcagggcctccaatttgaggcctctgggggcacgcttaggagacacacacgtgacaatattctcgttgctcgaggttctgtgtcactgccggtggctctttgatgcctggttatcagtgacagaaattgaggagaacctcgctacttcgatttctctgcaagtgtttagagcatgtagctagcttagctgtatatctctcactgtacctacggtctttcctattttttttgtaatttcctgtaaacaggcatagctgctacagtatggctaactctctattcttttgttggtttagcctggcgctgcttagcattttcaattaaatcgagattcgtttccttttcggatggttggtatatgttctggtgttgctgctctcaattgtgtggaatgttctgttatgttggca

SEQ ID NO: 48779 - DNA, 2600 bp, Zea Mays
aacgccctagataatatcatcccttttcttttctgtacgtgtgcaaataaacaattttttccttctattttaatttttgaagaaaaactaaacagagaagtcgaggaaaaattgctgttagcagcggacagggggtgagcgagcgggccgaggattcatctcgtgtcgacgacgccttcgccctctccgagtctccgtccgtcttccgcgtcctccgcagctggactcgtgcgctattccccaggacgctactcccactagggttttcggattaggtttctagaaccttccaccgccgcctctccatgcacgcgccgccgctggtcacgttcgcagggggcgcctgccccaccaccgcctccgcttcgccgtcgccctggttggcctcgccgcgggacgccatctttgccgcgccggcgaggcccctacggtcccgccgcgggacactccggctggaagctaaggccgcgtggagggctgccggagggggacggggcccgcgggtcccggccaagggcgctgtgctcgcctcctatatgggcgccgaggaggtggtgggaccatcgtcgctgcttgacgaggaagagttcatttctcacatcagaaaggaactggataatggaaaacttcctgcagatgttgccagtaacctggaggagctgtattataattacaggaatgcggttctgcaaaatggagatccaaatgcatatgaggtcatgctttcaaatatgatgaccttgtttgatcgtgttctactggatgtacagaatccatttaactttccaccttatcataaagctttgcgagaaccgttcgactattacatgtttggtcagaactacattaggcctctggtagatttcaggaactcctatgttggcaacatttcccttttccatgatatcgaagagaatctccaccagggccacaatgttgttttgatgtctaaccatcagtcagaagcagatccagcaattattgccttgcttcttgaaaaaaccaatccttggattagtgaaaacatagtttatgttgctggcgatagggttgttaccgatccgctttgcaagccatttagcatgggaagaaatctcatttgcgtgtactcgaaaaagcatatgaatgatttccctgagctaattgagatgaagaggagatcaaatactcgaagtctcaaggaaatggcattgcttttacgtggtggttcacagttaatttggattgcaccgagtggtggtagagaccgcccaaatccctcatcaggagaatggtacccggtaaatggtcttatttttccattttgacttagctatgcattatagttcatcttctctttcaatgtaactgcattgctaagaccgtgttcagcacacccaaaacactattttgcactgtagactgaactgttcgcagagtggagtttgaatatgagtatggggatgggtaagctctaagctgctggagatagcctaacaaacaaatgaaatgagatggtacagtaacagtgtagaggtgtgaggtgtctgacaagaatgatctgttttttttacctaagacatgcttgaaaagtccgctgcttttgtaagtatgttcccttaggtttactttatctgctacatgcaaaaacaagggcaggcaccattcgattcatctgcagtggacaatatgaggaggcttctggagcatgctggtgttcctgggcacatatatccactatcattgctgtgctatgaggttatgcctccaccacaacaggttgagaaggagattggtgagcagagggtgatatccttccatggagcaggcttgtcagtaactgaagaaataaactatggagacattactgctcataccaagaatgctgatgagggaagggagctattcacaaataccttgtacaactcagttgttaaccagtacaatgtgctcaaatctgctatctttagagatcgtggagcagctgtatcaaacaatgtcatctcactgtcacaaccatggcgatgaatgtccagtttcgttactgaagttaccttttcaaaagagcaggtgaactatcattgtgcaattttgctgggagaaactcttgaacttaaatctttttgatatcactagacttcatcaatcatggtggagcctgttattgtcatgcagatgctcgctaagaagtctgcaactgttggttggtcaagggtgattggcgattttgcacatacggatccgcagttactgctgcctcaggttgctcagcaatgtgctgctggttgggcaccgaggaatccatcaggttgcatcctttttgcccggacgtcgatttgtgcagttgaagtggtaaacgtttttttatcttgtttcgtcatcatgtatatacgtaggcttgagtcattgttggctccacattttttggagatataaatgcggtaggagttatgagatgtccacagtcggccctcccttgttgaattcctttggatgtatcctctctctttcgtacatgcactcactgaaagtcaatgcaaatatctcgtgtttctagtacgtggctccgtgaccaccctgcagctcctgtctggagctggagcgtaaagaatctatcttac

SEQ ID NO: 48780 - DNA, 2984 bp, Zea Mays
aacgccctagataatatcatcccttttcttttctgtacgtgtgcaaataaacaattttttccttctattttaatttttgaagaaaaactaaacagagaagtcgaggaaaaattgctgttagcagcggacagggggtgagcgagcgggccgaggattcatctcgtgtcgacgacgccttcgccctctccgagtctccgtccgtcttccgcgtcctccgcagctggactcgtgcgctattccccaggacgctactcccactagggttttcggattaggtttctagaaccttccaccgccgcctctccatgcacgcgccgccgctggtcacgttcgcagggggcgcctgccccaccaccgcctccgcttcgccgtcgccctggttggcctcgccgcgggacgccatctttgccgcgccggcgaggcccctacggtcccgccgcgggacactccggctggaagctaaggccgcgtggagggctgccggagggggacggggcccgcgggtcccggccaagggcgctgtgctcgcctcctatatgggcgccgaggaggtggtgggaccatcgtcgctgcttgacgaggaagagttcatttctcacatcagaaaggaactggataatggaaaacttcctgcagatgttgccagtaacctggaggagctgtattataattacaggaatgcggttctgcaaaatggagatccaaatgcatatgaggtcatgctttcaaatatgatgaccttgtttgatcgtgttctactggatgtacagaatccatttaactttccaccttatcataaagctttgcgagaaccgttcgactattacatgtttggtcagaactacattaggcctctggtagatttcaggaactcctatgttggcaacatttcccttttccatgatatcgaagagaatctccaccagggccacaatgttgttttgatgtctaaccatcagtcagaagcagatccagcaattattgccttgcttcttgaaaaaaccaatccttggattagtgaaaacatagtttatgttgctggcgatagggttgttaccgatccgctttgcaagccatttagcatgggaagaaatctcatttgcgtgtactcgaaaaagcatatgaatgatttccctgagctaattgagatgaagaggagatcaaatactcgaagtctcaaggaaatggcattgcttttacgtggtggttcacagttaatttggattgcaccgagtggtggtagagaccgcccaaatccctcatcaggagaatggtacccggtaaatggtcttatttttccattttgacttagctatgcattatagttcatcttctctttcaatgtaactgcattgctaagaccgtgttcagcacacccaaaacactattttgcactgtagactgaactgttcgcagagtggagtttgaatatgagtatggggatgggtaagctctaagctgctggagatagcctaacaaacaaatgaaatgagatggtacagtaacagtgtagaggtgtgaggtgtctgacaagaatgatctgttttttttacctaagacatgcttgaaaagtccgctgcttttgtaagtatgttcccttaggtttactttatctgctacatgcaaaaacaagggcaggcaccattcgattcatctgcagtggacaatatgaggaggcttctggagcatgctggtgttcctgggcacatatatccactatcattgctgtgctatgaggttatgcctccaccacaacaggttgagaaggagattggtgagcagagggtgatatccttccatggagcaggcttgtcagtaactgaagaaataaactatggagacattactgctcataccaagaatgctgatgagggaagggagctattcacaaataccttgtacaactcagttgttaaccagtacaatgtgctcaaatctgctatctttagagatcgtggagcagctgtatcaaacaatgtcatctcactgtcacaaccatggcgatgaatgttagctttctcagttttggtcgaccctgatctgaacttcatttcctggttcttctatttgcttgacaaatactagtatggtagggtccattaagtatgacttgaaattttgaatacttaaaaagattgcctggtgtttatgtgtaattttcatgcttaatgtctatagtggtgatcctttcttcccatctgacagttgcgcatagcatagtagcatgtaatcccatctatgtagattccatgaggttatgcttatggtaattgattcatttatatagtaagtaattttgctactatatgttaatctgtttatgttacatttgttcattgacactaactatttagatgggtgtgctaacagacgaattttgctactgcattcaggtccagtttcgttactgaagttaccttttcaaaagagcaggtgaactatcattgtgcaattttgctgggagaaactcttgaacttaaatctttttgatatcactagacttcatcaatcatggtggagcctgttattgtcatgcagatgctcgctaagaagtctgcaactgttggttggtcaagggtgattggcgattttgcacatacggatccgcagttactgctgcctcaggttgctcagcaatgtgctgctggttgggcaccgaggaatccatcaggttgcatcctttttgcccggacgtcgatttgtgcagttgaagtggtaaacgtttttttatcttgtttcgtcatcatgtatatacgtaggcttgagtcattgttggctccacattttttggagatataaatgcggtaggagttatgagatgtccacagtcggccctcccttgttgaattcctttggatgtatcctctctctttcgtacatgcactcactgaaagtcaatgcaaatatctcgtgtttctagtacgtggctccgtgaccaccctgcagctcctgtctggagctggagcgtaaagaatctatcttac

SEQ ID NO: 48781 - DNA, 2168 bp, Zea Mays
ctagataatatcatcccttttcttttctgtacgtgtgcaaataaacaattttttccttctattttaatttttgaagaaaaactaaacagagaagtcgaggaaaaattgctgttagcagcggacagggggtgagcgagcgggccgaggattcatctcgtgtcgacgacgccttcgccctctccgagtctccgtccgtcttccgcgtcctccgcagctggactcgtgcgctattccccaggacgctactcccactagggttttcggattaggtttctagaaccttccaccgccgcctctccatgcacgcgccgccgctggtcacgttcgcagggggcgcctgccccaccaccgcctccgcttcgccgtcgccctggttggcctcgccgcgggacgccatctttgccgcgccggcgaggcccctacggtcccgccgcgggacactccggctggaagctaaggccgcgtggagggctgccggagggggacggggcccgcgggtcccggccaagggcgctgtgctcgcctcctatatgggcgccgaggaggtggtgggaccatcgtcgctgcttgacgaggaagagttcatttctcacatcagaaaggaactggataatggaaaacttcctgcagatgttgccagtaacctggaggagctgtattataattacaggaatgcggttctgcaaaatggagatccaaatgcatatgaggtcatgctttcaaatatgatgaccttgtttgatcgtgttctactggatgtacagaatccatttaactttccaccttatcataaagctttgcgagaaccgttcgactattacatgtttggtcagaactacattaggcctctggtagatttcaggaactcctatgttggcaacatttcccttttccatgatatcgaagagaatctccaccagtcagaagcagatccagcaattattgccttgcttcttgaaaaaaccaatccttggattagtgaaaacatagtttatgttgctggcgatagggttgttaccgatccgctttgcaagccatttagcatgggaagaaatctcatttgcgtgtactcgaaaaagcatatgaatgatttccctgagctaattgagatgaagaggagatcaaatactcgaagtctcaaggaaatggcattgcttttacgtggtggttcacagttaatttggattgcaccgagtggtggtagagaccgcccaaatccctcatcaggagaatggtacccggcaccattcgattcatctgcagtggacaatatgaggaggcttctggagcatgctggtgttcctgggcacatatatccactatcattgctgtgctatgaggttatgcctccaccacaacaggttgagaaggagattggtgagcagagggtgatatccttccatggagcaggcttgtcagtaactgaagaaataaactatggagacattactgctcataccaagaatgctgatgagggaagggagctattcacaaataccttgtacaactcagttgttaaccagtacaatgtgctcaaatctgctatctttagagatcgtggagcagctgtatcaaacaatgtcatctcactgtcacaaccatggcgatgaatgtgaactatcattgtgcaattttgctgggagaaactcttgaacttaaatctttttgatatcactagacttcatcaatcatggtggagcctgttattgtcatgcagatgctgtaagcgctaagaagtctgcaactgttggttggtcaagggtgattggcgattttgcacatacggatccgcagttactgctgcctcaggttgctcagcaatgtgctgctggttgggcaccgaggaatccatcaggttgcatcctttttgcccggacgtcgatttgtgcagttgaagtggtaaacgtttttttatcttgtttcgtcatcatgtatatacgtaggcttgagtcattgttggctccacattttttggagatataaatgcggtaggagttatgagatgtccacagtcggccctcccttgttgaattcctttggatgtatcctctctctttcgtacatgcactcactgaaagtcaatgcaaatatctcgtgtttctagtacgtggctccgtgaccaccctgcagctcctgtctggagctggagcgtaaagaatctatcttac

SEQ ID NO: 48782 - DNA, 2629 bp, Zea Mays
caattttttccttctattttaatttttgaagaaaaactaaacagagaagtcgaggaaaaattgctgttagcagcggacagggggtgagcgagcgggccgaggattcatctcgtgtcgacgacgccttcgccctctccgagtctccgtccgtcttccgcgtcctccgcagctggactcgtgcgctattccccaggacgctactcccactagggttttcggattaggtttctagaaccttccaccgccgcctctccatgcacgcgccgccgctggtcacgttcgcagggggcgcctgccccaccaccgcctccgcttcgccgtcgccctggttggcctcgccgcgggacgccatctttgccgcgccggcgaggcccctacggtcccgccgcgggacactccggctggaagctaaggccgcgtggagggctgccggagggggacggggcccgcgggtcccggccaagggcgctgtgctcgcctcctatatgggcgccgaggaggtggtgggaccatcgtcgctgcttgacgaggaagagttcatttctcacatcagaaaggaactggataatggaaaacttcctgcagatgttgccagtaacctggaggagctgtattataattacaggaatgcggttctgcaaaatggagatccaaatgcatatgaggtcatgctttcaaatatgatgaccttgtttgatcgtgttctactggatgtacagaatccatttaactttccaccttatcataaagctttgcgagaaccgttcgactattacatgtttggtcagaactacattaggcctctggtagatttcaggaactcctatgttggcaacatttcccttttccatgatatcgaagagaatctccaccagggccacaatgttgttttgatgtctaaccatcagtcagaagcagatccagcaattattgccttgcttcttgaaaaaaccaatccttggattagtgaaaacatagtttatgttgctggcgatagggttgttaccgatccgctttgcaagccatttagcatgggaagaaatctcatttgcgtgtactcgaaaaagcatatgaatgatttccctgagctaattgagatgaagaggagatcaaatactcgaagtctcaaggaaatggcattgcttttacgtggtggttcacagttaatttggattgcaccgagtggtggtagagaccgcccaaatccctcatcaggagaatggtacccggtaaatggtcttatttttccattttgacttagctatgcattatagttcatcttctctttcaatgtaactgcattgctaagaccgtgttcagcacacccaaaacactattttgcactgtagactgaactgttcgcagagtggagtttgaatatgagtatggggatgggtaagctctaagctgctggagatagcctaacaaacaaatgaaatgagatggtacagtaacagtgtagaggtgtgaggtgtctgacaagaatgatctgttttttttacctaagacatgcttgaaaagtccgctgcttttgtaagtatgttcccttaggtttactttatctgctacatgcaaaaacaagggcaggcaccattcgattcatctgcagtggacaatatgaggaggcttctggagcatgctggtgttcctgggcacatatatccactatcattgctgtgctatgaggttatgcctccaccacaacaggttgagaaggagattggtgagcagagggtgatatccttccatggagcaggcttgtcagtaactgaagaaataaactatggagacattactgctcataccaagaatgctgatgagggaagggagctattcacaaataccttgtacaactcagttgttaaccagtacaatgtgctcaaatctgctatctttagagatcgtggagcagctgtatcaaacaatgtcatctcactgtcacaaccatggcgatgaatgttagctttctcagttttggtcgaccctgatctgaacttcatttcctggttcttctatttgcttgacaaatactagtatggtccagtttcgttactgaagttaccttttcaaaagagcaggtgaactatcattgtgcaattttgctgggagaaactcttgaacttaaatctttttgatatcactagacttcatcaatcatggtggagcctgttattgtcatgcagatgctcgctaagaagtctgcaactgttggttggtcaagggtgattggcgattttgcacatacggatccgcagttactgctgcctcaggttgctcagcaatgtgctgctggttgggcaccgaggaatccatcaggttgcatcctttttgcccggacgtcgatttgtgcagttgaagtggtaaacgtttttttatcttgtttcgtcatcatgtatatacgtaggcttgagtcattgttggctccacattttttggagatataaatgcggtaggagttatgagatgtccacagtcggccctcccttgttgaattcctttggatgtatcctctctctttcgtacatgcactcactgaaagtcaatgcaaatatctcgtgtttctagtacgtggctccgtgaccaccctgcagctcctgtctggagctggagcgtaaagaatctatcttac

SEQ ID NO: 48783 - DNA, 2573 bp, Zea Mays
caattttttccttctattttaatttttgaagaaaaactaaacagagaagtcgaggaaaaattgctgttagcagcggacagggggtgagcgagcgggccgaggattcatctcgtgtcgacgacgccttcgccctctccgagtctccgtccgtcttccgcgtcctccgcagctggactcgtgcgctattccccaggacgctactcccactagggttttcggattaggtttctagaaccttccaccgccgcctctccatgcacgcgccgccgctggtcacgttcgcagggggcgcctgccccaccaccgcctccgcttcgccgtcgccctggttggcctcgccgcgggacgccatctttgccgcgccggcgaggcccctacggtcccgccgcgggacactccggctggaagctaaggccgcgtggagggctgccggagggggacggggcccgcgggtcccggccaagggcgctgtgctcgcctcctatatgggcgccgaggaggtggtgggaccatcgtcgctgcttgacgaggaagagttcatttctcacatcagaaaggaactggataatggaaaacttcctgcagatgttgccagtaacctggaggagctgtattataattacaggaatgcggttctgcaaaatggagatccaaatgcatatgaggtcatgctttcaaatatgatgaccttgtttgatcgtgttctactggatgtacagaatccatttaactttccaccttatcataaagctttgcgagaaccgttcgactattacatgtttggtcagaactacattaggcctctggtagatttcaggaactcctatgttggcaacatttcccttttccatgatatcgaagagaatctccaccagggccacaatgttgttttgatgtctaaccatcagtcagaagcagatccagcaattattgccttgcttcttgaaaaaaccaatccttggattagtgaaaacatagtttatgttgctggcgatagggttgttaccgatccgctttgcaagccatttagcatgggaagaaatctcatttgcgtgtactcgaaaaagcatatgaatgatttccctgagctaattgagatgaagaggagatcaaatactcgaagtctcaaggaaatggcattgcttttacgtggtggttcacagttaatttggattgcaccgagtggtggtagagaccgcccaaatccctcatcaggagaatggtacccggtaaatggtcttatttttccattttgacttagctatgcattatagttcatcttctctttcaatgtaactgcattgctaagaccgtgttcagcacacccaaaacactattttgcactgtagactgaactgttcgcagagtggagtttgaatatgagtatggggatgggtaagctctaagctgctggagatagcctaacaaacaaatgaaatgagatggtacagtaacagtgtagaggtgtgaggtgtctgacaagaatgatctgttttttttacctaagacatgcttgaaaagtccgctgcttttgtaagtatgttcccttaggtttactttatctgctacatgcaaaaacaagggcaggcaccattcgattcatctgcagtggacaatatgaggaggcttctggagcatgctggtgttcctgggcacatatatccactatcattgctgtgctatgaggttatgcctccaccacaacaggttgagaaggagattggtgagcagagggtgatatccttccatggagcaggcttgtcagtaactgaagaaataaactatggagacattactgctcataccaagaatgctgatgagggaagggagctattcacaaataccttgtacaactcagttgttaaccagtacaatgtgctcaaatctgctatctttagagatcgtggagcagctgtatcaaacaatgtcatctcactgtcacaaccatggcgatgaatgttagctttctcagttttggtccagtttcgttactgaagttaccttttcaaaagagcaggtgaactatcattgtgcaattttgctgggagaaactcttgaacttaaatctttttgatatcactagacttcatcaatcatggtggagcctgttattgtcatgcagatgctgtaagcgctaagaagtctgcaactgttggttggtcaagggtgattggcgattttgcacatacggatccgcagttactgctgcctcaggttgctcagcaatgtgctgctggttgggcaccgaggaatccatcaggttgcatcctttttgcccggacgtcgatttgtgcagttgaagtggtaaacgtttttttatcttgtttcgtcatcatgtatatacgtaggcttgagtcattgttggctccacattttttggagatataaatgcggtaggagttatgagatgtccacagtcggccctcccttgttgaattcctttggatgtatcctctctctttcgtacatgcactcactgaaagtcaatgcaaatatctcgtgtttctagtacgtggctccgtgaccaccctgcagctcctgtctggagctggagcgtaaagaatctatcttac

SEQ ID NO: 48784 - DNA, 2251 bp, Zea Mays
caattttttccttctattttaatttttgaagaaaaactaaacagagaagtcgaggaaaaattgctgttagcagcggacagggggtgagcgagcgggccgaggattcatctcgtgtcgacgacgccttcgccctctccgagtctccgtccgtcttccgcgtcctccgcagctggactcgtgcgctattccccaggacgctactcccactagggttttcggattaggtttctagaaccttccaccgccgcctctccatgcacgcgccgccgctggtcacgttcgcagggggcgcctgccccaccaccgcctccgcttcgccgtcgccctggttggcctcgccgcgggacgccatctttgccgcgccggcgaggcccctacggtcccgccgcgggacactccggctggaagctaaggccgcgtggagggctgccggagggggacggggcccgcgggtcccggccaagggcgctgtgctcgcctcctatatgggcgccgaggaggtggtgggaccatcgtcgctgcttgacgaggaagagttcatttctcacatcagaaaggaactggataatggaaaacttcctgcagatgttgccagtaacctggaggagctgtattataattacaggaatgcggttctgcaaaatggagatccaaatgcatatgaggtcatgctttcaaatatgatgaccttgtttgatcgtgttctactggatgtacagaatccatttaactttccaccttatcataaagctttgcgagaaccgttcgactattacatgtttggtcagaactacattaggcctctggtagatttcaggaactcctatgttggcaacatttcccttttccatgatatcgaagagaatctccaccagggccacaatgttgttttgatgtctaaccatcagtcagaagcagatccagcaattattgccttgcttcttgaaaaaaccaatccttggattagtgaaaacataggttgttaccgatccgctttgcaagccatttagcatgggaagaaatctcatttgcgtgtactcgaaaaagcatatgaatgatttccctgagctaattgagatgaagaggagatcaaatactcgaagtctcaaggaaatggcattgcttttacgtggtggttcacagttaatttggattgcaccgagtggtggtagagaccgcccaaatccctcatcaggagaatggtacccggcaccattcgattcatctgcagtggacaatatgaggaggcttctggagcatgctggtgttcctgggcacatatatccactatcattgctgtgctatgaggttatgcctccaccacaacaggttgagaaggagattggtgagcagagggtgatatccttccatggagcaggcttgtcagtaactgaagaaataaactatggagacattactgctcataccaagaatgctgatgagggaagggagctattcacaaataccttgtacaactcagttgttaaccagtacaatgtgctcaaatctgctatctttagagatcgtggagcagctgtatcaaacaatgtcatctcactgtcacaaccatggcgatgaatgttagctttctcagttttggtcgaccctgatctgaacttcatttcctggttcttctatttgcttgacaaatactagtatggtccagtttcgttactgaagttaccttttcaaaagagcaggtgaactatcattgtgcaattttgctgggagaaactcttgaacttaaatctttttgatatcactagacttcatcaatcatggtggagcctgttattgtcatgcagatgctcgctaagaagtctgcaactgttggttggtcaagggtgattggcgattttgcacatacggatccgcagttactgctgcctcaggttgctcagcaatgtgctgctggttgggcaccgaggaatccatcaggttgcatcctttttgcccggacgtcgatttgtgcagttgaagtggtaaacgtttttttatcttgtttcgtcatcatgtatatacgtaggcttgagtcattgttggctccacattttttggagatataaatgcggtaggagttatgagatgtccacagtcggccctcccttgttgaattcctttggatgtatcctctctctttcgtacatgcactcactgaaagtcaatgcaaatatctcgtgtttctagtacgtggctccgtgaccaccctgcagctcctgtctggagctggagcgtaaagaatctatcttac

SEQ ID NO: 48785 - DNA, 2196 bp, Zea Mays
caattttttccttctattttaatttttgaagaaaaactaaacagagaagtcgaggaaaaattgctgttagcagcggacagggggtgagcgagcgggccgaggattcatctcgtgtcgacgacgccttcgccctctccgagtctccgtccgtcttccgcgtcctccgcagctggactcgtgcgctattccccaggacgctactcccactagggttttcggattaggtttctagaaccttccaccgccgcctctccatgcacgcgccgccgctggtcacgttcgcagggggcgcctgccccaccaccgcctccgcttcgccgtcgccctggttggcctcgccgcgggacgccatctttgccgcgccggcgaggcccctacggtcccgccgcgggacactccggctggaagctaaggccgcgtggagggctgccggagggggacggggcccgcgggtcccggccaagggcgctgtgctcgcctcctatatgggcgccgaggaggtggtgggaccatcgtcgctgcttgacgaggaagagttcatttctcacatcagaaaggaactggataatggaaaacttcctgcagatgttgccagtaacctggaggagctgtattataattacaggaatgcggttctgcaaaatggagatccaaatgcatatgaggtcatgctttcaaatatgatgaccttgtttgatcgtgttctactggatgtacagaatccatttaactttccaccttatcataaagctttgcgagaaccgttcgactattacatgtttggtcagaactacattaggcctctggtagatttcaggaactcctatgttggcaacatttcccttttccatgatatcgaagagaatctccaccagggccacaatgttgttttgatgtctaaccatcagtcagaagcagatccagcaattattgccttgcttcttgaaaaaaccaatccttggattagtgaaaacatagtttatgttgctggcgatagggttgttaccgatccgctttgcaagccatttagcatgggaagaaatctcatttgcgtgtactcgaaaaagcatatgaatgatttccctgagctaattgagatgaagaggagatcaaatactcgaagtctcaaggaaatggcattgcttttacgtggtggttcacagttaatttggattgcaccgagtggtggtagagaccgcccaaatccctcatcaggagaatggtacccgggcaggcaccattcgattcatctgcagtggacaatatgaggaggcttctggagcatgctggtgttcctgggcacatatatccactatcattgctgtgctatgaggttatgcctccaccacaacaggttgagaaggagattggtgagcagagggtgatatccttccatggagcaggcttgtcagtaactgaagaaataaactatggagacattactgctcataccaagaatgctgatgagggaagggagctattcacaaataccttgtacaactcagttgttaaccagtacaatgtgctcaaatctgctatctttagagatcgtggagcagctgtatcaaacaatgtcatctcactgtcacaaccatggcgatgaatgtccagtttcgttactgaagttaccttttcaaaagagcaggtgaactatcattgtgcaattttgctgggagaaactcttgaacttaaatctttttgatatcactagacttcatcaatcatggtggagcctgttattgtcatgcagatgctcgctaagaagtctgcaactgttggttggtcaagggtgattggcgattttgcacatacggatccgcagttactgctgcctcaggttgctcagcaatgtgctgctggttgggcaccgaggaatccatcaggttgcatcctttttgcccggacgtcgatttgtgcagttgaagtggtaaacgtttttttatcttgtttcgtcatcatgtatatacgtaggcttgagtcattgttggctccacattttttggagatataaatgcggtaggagttatgagatgtccacagtcggccctcccttgttgaattcctttggatgtatcctctctctttcgtacatgcactcactgaaagtcaatgcaaatatctcgtgtttctagtacgtggctccgtgaccaccctgcagctcctgtctggagctggagcgtaaagaatctatcttac

SEQ ID NO: 48786 - DNA, 2568 bp, Zea Mays
caattttttccttctattttaatttttgaagaaaaactaaacagagaagtcgaggaaaaattgctgttagcagcggacagggggtgagcgagcgggccgaggattcatctcgtgtcgacgacgccttcgccctctccgagtctccgtccgtcttccgcgtcctccgcagctggactcgtgcgctattccccaggacgctactcccactagggttttcggattaggtttctagaaccttccaccgccgcctctccatgcacgcgccgccgctggtcacgttcgcagggggcgcctgccccaccaccgcctccgcttcgccgtcgccctggttggcctcgccgcgggacgccatctttgccgcgccggcgaggcccctacggtcccgccgcgggacactccggctggaagctaaggccgcgtggagggctgccggagggggacggggcccgcgggtcccggccaagggcgctgtgctcgcctcctatatgggcgccgaggaggtggtgggaccatcgtcgctgcttgacgaggaagagttcatttctcacatcagaaaggaactggataatggaaaacttcctgcagatgttgccagtaacctggaggagctgtattataattacaggaatgcggttctgcaaaatggagatccaaatgcatatgaggtcatgctttcaaatatgatgaccttgtttgatcgtgttctactggatgtacagaatccatttaactttccaccttatcataaagctttgcgagaaccgttcgactattacatgtttggtcagaactacattaggcctctggtagatttcaggaactcctatgttggcaacatttcccttttccatgatatcgaagagaatctccaccagggccacaatgttgttttgatgtctaaccatcagtcagaagcagatccagcaattattgccttgcttcttgaaaaaaccaatccttggattagtgaaaacatagtttatgttgctggcgatagggttgttaccgatccgctttgcaagccatttagcatgggaagaaatctcatttgcgtgtactcgaaaaagcatatgaatgatttccctgagctaattgagatgaagaggagatcaaatactcgaagtctcaaggaaatggcattgcttttacgtggtggttcacagttaatttggattgcaccgagtggtggtagagaccgcccaaatccctcatcaggagaatggtacccggtaaatggtcttatttttccattttgacttagctatgcattatagttcatcttctctttcaatgtaactgcattgctaagaccgtgttcagcacacccaaaacactattttgcactgtagactgaactgttcgcagagtggagtttgaatatgagtatggggatgggtaagctctaagctgctggagatagcctaacaaacaaatgaaatgagatggtacagtaacagtgtagaggtgtgaggtgtctgacaagaatgatctgttttttttacctaagacatgcttgaaaagtccgctgcttttgtaagtatgttcccttaggtttactttatctgctacatgcaaaaacaagggcaggcaccattcgattcatctgcagtggacaatatgaggaggcttctggagcatgctggtgttcctgggcacatatatccactatcattgctgtgctatgaggttatgcctccaccacaacaggttgagaaggagattggtgagcagagggtgatatccttccatggagcaggcttgtcagtaactgaagaaataaactatggagacattactgctcataccaagaatgctgatgagggaagggagctattcacaaataccttgtacaactcagttgttaaccagtacaatgtgctcaaatctgctatctttagagatcgtggagcagctgtatcaaacaatgtcatctcactgtcacaaccatggcgatgaatgttagctttctcagttttggtccagtttcgttactgaagttaccttttcaaaagagcaggtgaactatcattgtgcaattttgctgggagaaactcttgaacttaaatctttttgatatcactagacttcatcaatcatggtggagcctgttattgtcatgcagatgctcgctaagaagtctgcaactgttggttggtcaagggtgattggcgattttgcacatacggatccgcagttactgctgcctcaggttgctcagcaatgtgctgctggttgggcaccgaggaatccatcaggttgcatcctttttgcccggacgtcgatttgtgcagttgaagtggtaaacgtttttttatcttgtttcgtcatcatgtatatacgtaggcttgagtcattgttggctccacattttttggagatataaatgcggtaggagttatgagatgtccacagtcggccctcccttgttgaattcctttggatgtatcctctctctttcgtacatgcactcactgaaagtcaatgcaaatatctcgtgtttctagtacgtggctccgtgaccaccctgcagctcctgtctggagctggagcgtaaagaatctatcttac

SEQ ID NO: 48787 - DNA, 2543 bp, Zea Mays
caattttttccttctattttaatttttgaagaaaaactaaacagagaagtcgaggaaaaattgctgttagcagcggacagggggtgagcgagcgggccgaggattcatctcgtgtcgacgacgccttcgccctctccgagtctccgtccgtcttccgcgtcctccgcagctggactcgtgcgctattccccaggacgctactcccactagggttttcggattaggtttctagaaccttccaccgccgcctctccatgcacgcgccgccgctggtcacgttcgcagggggcgcctgccccaccaccgcctccgcttcgccgtcgccctggttggcctcgccgcgggacgccatctttgccgcgccggcgaggcccctacggtcccgccgcgggacactccggctggaagctaaggccgcgtggagggctgccggagggggacggggcccgcgggtcccggccaagggcgctgtgctcgcctcctatatgggcgccgaggaggtggtgggaccatcgtcgctgcttgacgaggaagagttcatttctcacatcagaaaggaactggataatggaaaacttcctgcagatgttgccagtaacctggaggagctgtattataattacaggaatgcggttctgcaaaatggagatccaaatgcatatgaggtcatgctttcaaatatgatgaccttgtttgatcgtgttctactggatgtacagaatccatttaactttccaccttatcataaagctttgcgagaaccgttcgactattacatgtttggtcagaactacattaggcctctggtagatttcaggaactcctatgttggcaacatttcccttttccatgatatcgaagagaatctccaccagggccacaatgttgttttgatgtctaaccatcagtcagaagcagatccagcaattattgccttgcttcttgaaaaaaccaatccttggattagtgaaaacatagtttatgttgctggcgatagggttgttaccgatccgctttgcaagccatttagcatgggaagaaatctcatttgcgtgtactcgaaaaagcatatgaatgatttccctgagctaattgagatgaagaggagatcaaatactcgaagtctcaaggaaatggcattgcttttacgtggtggttcacagttaatttggattgcaccgagtggtggtagagaccgcccaaatccctcatcaggagaatggtacccggtaaatggtcttatttttccattttgacttagctatgcattatagttcatcttctctttcaatgtaactgcattgctaagaccgtgttcagcacacccaaaacactattttgcactgtagactgaactgttcgcagagtggagtttgaatatgagtatggggatgggtaagctctaagctgctggagatagcctaacaaacaaatgaaatgagatggtacagtaacagtgtagaggtgtgaggtgtctgacaagaatgatctgttttttttacctaagacatgcttgaaaagtccgctgcttttgtaagtatgttcccttaggtttactttatctgctacatgcaaaaacaagggcaggcaccattcgattcatctgcagtggacaatatgaggaggcttctggagcatgctggtgttcctgggcacatatatccactatcattgctgtgctatgaggttatgcctccaccacaacaggttgagaaggagattggtgagcagagggtgatatccttccatggagcaggcttgtcagtaactgaagaaataaactatggagacattactgctcataccaagaatgctgatgagggaagggagctattcacaaataccttgtacaactcagttgttaaccagtacaatgtgctcaaatctgctatctttagagatcgtggagcagctgtatcaaacaatgtcatctcactgtcacaaccatggcgatgaattttcgttactgaagttaccttttcaaaagagcaggtgaactatcattgtgcaattttgctgggagaaactcttgaacttaaatctttttgatatcactagacttcatcaatcatggtggagcctgttattgtcatgcagatgctcgctaagaagtctgcaactgttggttggtcaagggtgattggcgattttgcacatacggatccgcagttactgctgcctcaggttgctcagcaatgtgctgctggttgggcaccgaggaatccatcaggttgcatcctttttgcccggacgtcgatttgtgcagttgaagtggtaaacgtttttttatcttgtttcgtcatcatgtatatacgtaggcttgagtcattgttggctccacattttttggagatataaatgcggtaggagttatgagatgtccacagtcggccctcccttgttgaattcctttggatgtatcctctctctttcgtacatgcactcactgaaagtcaatgcaaatatctcgtgtttctagtacgtggctccgtgaccaccctgcagctcctgtctggagctggagcgtaaagaatctatcttac

SEQ ID NO: 48788 - DNA, 2796 bp, Zea Mays
caattttttccttctattttaatttttgaagaaaaactaaacagagaagtcgaggaaaaattgctgttagcagcggacagggggtgagcgagcgggccgaggattcatctcgtgtcgacgacgccttcgccctctccgagtctccgtccgtcttccgcgtcctccgcagctggactcgtgcgctattccccaggacgctactcccactagggttttcggattaggtttctagaaccttccaccgccgcctctccatgcacgcgccgccgctggtcacgttcgcagggggcgcctgccccaccaccgcctccgcttcgccgtcgccctggttggcctcgccgcgggacgccatctttgccgcgccggcgaggcccctacggtcccgccgcgggacactccggctggaagctaaggccgcgtggagggctgccggagggggacggggcccgcgggtcccggccaagggcgctgtgctcgcctcctatatgggcgccgaggaggtggtgggaccatcgtcgctgcttgacgaggaagagttcatttctcacatcagaaaggaactggataatggaaaacttcctgcagatgttgccagtaacctggaggagctgtattataattacaggaatgcggttctgcaaaatggagatccaaatgcatatgaggtcatgctttcaaatatgatgaccttgtttgatcgtgttctactggatgtacagaatccatttaactttccaccttatcataaagctttgcgagaaccgttcgactattacatgtttggtcagaactacattaggcctctggtagatttcaggaactcctatgttggcaacatttcccttttccatgatatcgaagagaatctccaccagggccacaatgttgttttgatgtctaaccatcagtcagaagcagatccagcaattattgccttgcttcttgaaaaaaccaatccttggattagtgaaaacatagtttatgttgctggcgatagggttgttaccgatccgctttgcaagccatttagcatgggaagaaatctcatttgcgtgtactcgaaaaagcatatgaatgatttccctgagctaattgagatgaagaggagatcaaatactcgaagtctcaaggaaatggcattgcttttacgtggtggttcacagttaatttggattgcaccgagtggtggtagagaccgcccaaatccctcatcaggagaatggtacccggtaaatggtcttatttttccattttgacttagctatgcattatagttcatcttctctttcaatgtaactgcattgctaagaccgtgttcagcacacccaaaacactattttgcactgtagactgaactgttcgcagagtggagtttgaatatgagtatggggatgggtaagctctaagctgctggagatagcctaacaaacaaatgaaatgagatggcaccattcgattcatctgcagtggacaatatgaggaggcttctggagcatgctggtgttcctgggcacatatatccactatcattgctgtgctatgaggttatgcctccaccacaacaggttgagaaggagattggtgagcagagggtgatatccttccatggagcaggcttgtcagtaactgaagaaataaactatggagacattactgctcataccaagaatgctgatgagggaagggagctattcacaaataccttgtacaactcagttgttaaccagtacaatgtgctcaaatctgctatctttagagatcgtggagcagctgtatcaaacaatgtcatctcactgtcacaaccatggcgatgaatgttagctttctcagttttggtcgaccctgatctgaacttcatttcctggttcttctatttgcttgacaaatactagtatggtagggtccattaagtatgacttgaaattttgaatacttaaaaagattgcctggtgtttatgtgtaattttcatgcttaatgtctatagtggtgatcctttcttcccatctgacagttgcgcatagcatagtagcatgtaatcccatctatgtagattccatgaggttatgcttatggtaattgattcatttatatagtaagtaattttgctactatatgttaatctgtttatgttacatttgttcattgacactaactatttagatgggtgtgctaacagacgaattttgctactgcattcaggtccagtttcgttactgaagttaccttttcaaaagagcaggtgaactatcattgtgcaattttgctgggagaaactcttgaacttaaatctttttgatatcactagacttcatcaatcatggtggagcctgttattgtcatgcagatgctgtaagcgctaagaagtctgcaactgttggttggtcaagggtgattggcgattttgcacatacggatccgcagttactgctgcctcaggttgctcagcaatgtgctgctggttgggcaccgaggaatccatcaggttgcatcctttttgcccggacgtcgatttgtgcagttgaagtggtaaacgtttttttatcttgtttcgtcatcatgtatatacgtaggcttgagtcattgttggctccacattttttggagatataaatgcggtaggagttatgagatgtccacagtcggccctcccttgttgaattcctttggatgtatcctctctctttcgtacatgcactcactgaaagtcaatgcaaatatctcgtgtttctagtacgtggctccgtgaccaccctgcagctcctgtctggagctggagcgtaaagaatctatcttac

SEQ ID NO: 48789 - DNA, 2271 bp, Zea Mays
caattttttccttctattttaatttttgaagaaaaactaaacagagaagtcgaggaaaaattgctgttagcagcggacagggggtgagcgagcgggccgaggattcatctcgtgtcgacgacgccttcgccctctccgagtctccgtccgtcttccgcgtcctccgcagctggactcgtgcgctattccccaggacgctactcccactagggttttcggattaggtttctagaaccttccaccgccgcctctccatgcacgcgccgccgctggtcacgttcgcagggggcgcctgccccaccaccgcctccgcttcgccgtcgccctggttggcctcgccgcgggacgccatctttgccgcgccggcgaggcccctacggtcccgccgcgggacactccggctggaagctaaggccgcgtggagggctgccggagggggacggggcccgcgggtcccggccaagggcgctgtgctcgcctcctatatgggcgccgaggaggtggtgggaccatcgtcgctgcttgacgaggaagagttcatttctcacatcagaaaggaactggataatggaaaacttcctgcagatgttgccagtaacctggaggagctgtattataattacaggaatgcggttctgcaaaatggagatccaaatgcatatgaggtcatgctttcaaatatgatgaccttgtttgatcgtgttctactggatgtacagaatccatttaactttccaccttatcataaagctttgcgagaaccgttcgactattacatgtttggtcagaactacattaggcctctggtagatttcaggaactcctatgttggcaacatttcccttttccatgatatcgaagagaatctccaccagggccacaatgttgttttgatgtctaaccatcagtcagaagcagatccagcaattattgccttgcttcttgaaaaaaccaatccttggattagtgaaaacatagtttatgttgctggcgatagggttgttaccgatccgctttgcaagccatttagcatgggaagaaatctcatttgcgtgtactcgaaaaagcatatgaatgatttccctgagctaattgagatgaagaggagatcaaatactcgaagtctcaaggaaatggcattgcttttacgtggtggttcacagttaatttggattgcaccgagtggtggtagagaccgcccaaatccctcatcaggagaatggtacccggcaccattcgattcatctgcagtggacaatatgaggaggcttctggagcatgctggtgttcctgggcacatatatccactatcattgctgtgctatgaggttatgcctccaccacaacaggttgagaaggagattggtgagcagagggtgatatccttccatggagcaggcttgtcagtaactgaagaaataaactatggagacattactgctcataccaagaatgctgatgagggaagggagctattcacaaataccttgtacaactcagttgttaaccagtacaatgtgctcaaatctgctatctttagagatcgtggagcagctgtatcaaacaatgtcatctcactgtcacaaccatggcgatgaatgttagctttctcagttttggtcgaccctgatctgaacttcatttcctggttcttctatttgcttgacaaatactagtatggtccagtttcgttactgaagttaccttttcaaaagagcaggtgaactatcattgtgcaattttgctgggagaaactcttgaacttaaatctttttgatatcactagacttcatcaatcatggtggagcctgttattgtcatgcagatgctcgctaagaagtctgcaactgttggttggtcaagggtgattggcgattttgcacatacggatccgcagttactgctgcctcaggttgctcagcaatgtgctgctggttgggcaccgaggaatccatcaggttgcatcctttttgcccggacgtcgatttgtgcagttgaagtggtaaacgtttttttatcttgtttcgtcatcatgtatatacgtaggcttgagtcattgttggctccacattttttggagatataaatgcggtaggagttatgagatgtccacagtcggccctcccttgttgaattcctttggatgtatcctctctctttcgtacatgcactcactgaaagtcaatgcaaatatctcgtgtttctagtacgtggctccgtgaccaccctgcagctcctgtctggagctggagcgtaaagaatctatcttac

SEQ ID NO: 48790 - DNA, 2509 bp, Zea Mays
caattttttccttctattttaatttttgaagaaaaactaaacagagaagtcgaggaaaaattgctgttagcagcggacagggggtgagcgagcgggccgaggattcatctcgtgtcgacgacgccttcgccctctccgagtctccgtccgtcttccgcgtcctccgcagctggactcgtgcgctattccccaggacgctactcccactagggttttcggattaggtttctagaaccttccaccgccgcctctccatgcacgcgccgccgctggtcacgttcgcagggggcgcctgccccaccaccgcctccgcttcgccgtcgccctggttggcctcgccgcgggacgccatctttgccgcgccggcgaggcccctacggtcccgccgcgggacactccggctggaagctaaggccgcgtggagggctgccggagggggacggggcccgcgggtcccggccaagggcgctgtgctcgcctcctatatgggcgccgaggaggtggtgggaccatcgtcgctgcttgacgaggaagagttcatttctcacatcagaaaggaactggataatggaaaacttcctgcagatgttgccagtaacctggaggagctgtattataattacaggaatgcggttctgcaaaatggagatccaaatgcatatgaggtcatgctttcaaatatgatgaccttgtttgatcgtgttctactggatgtacagaatccatttaactttccaccttatcataaagctttgcgagaaccgttcgactattacatgtttggtcagaactacattaggcctctggtagatttcaggaactcctatgttggcaacatttcccttttccatgatatcgaagagaatctccaccagggccacaatgttgttttgatgtctaaccatcagtcagaagcagatccagcaattattgccttgcttcttgaaaaaaccaatccttggattagtgaaaacatagtttatgttgctggcgatagggttgttaccgatccgctttgcaagccatttagcatgggaagaaatctcatttgcgtgtactcgaaaaagcatatgaatgatttccctgagctaattgagatgaagaggagatcaaatactcgaagtctcaaggaaatggcattgcttttacgtggtggttcacagttaatttggattgcaccgagtggtggtagagaccgcccaaatccctcatcaggagaatggtacccggtaaatggtcttatttttccattttgacttagctatgcattatagttcatcttctctttcaatgtaactgcattgctaagaccgtgttcagcacacccaaaacactattttgcactgtagactgaactgttcgcagagtggagtttgaatatgagtatggggatgggtaagctctaagctgctggagatagcctaacaaacaaatgaaatgagatggtacagtaacagtgtagaggtgtgaggtgtctgacaagaatgatctgttttttttacctaagacatgcttgaaaagtccgctgcttttgtaagtatgttcccttaggtttactttatctgctacatgcaaaaacaagggcaggcaccattcgattcatctgcagtggacaatatgaggaggcttctggagcatgctggtgttcctgggcacatatatccactatcattgctgtgctatgaggttatgcctccaccacaacaggttgagaaggagattggtgagcagagggtgatatccttccatggagcaggcttgtcagtaactgaagaaataaactatggagacattactgctcataccaagaatgctgatgagggaagggagctattcacaaataccttgtacaactcagttgttaaccagtacaatgtgctcaaatctgctatctttagagatcgtggagcagctgtatcaaacaatgtcatctcactgtcacaaccatggcgatgaatgtgaactatcattgtgcaattttgctgggagaaactcttgaacttaaatctttttgatatcactagacttcatcaatcatggtggagcctgttattgtcatgcagatgctcgctaagaagtctgcaactgttggttggtcaagggtgattggcgattttgcacatacggatccgcagttactgctgcctcaggttgctcagcaatgtgctgctggttgggcaccgaggaatccatcaggttgcatcctttttgcccggacgtcgatttgtgcagttgaagtggtaaacgtttttttatcttgtttcgtcatcatgtatatacgtaggcttgagtcattgttggctccacattttttggagatataaatgcggtaggagttatgagatgtccacagtcggccctcccttgttgaattcctttggatgtatcctctctctttcgtacatgcactcactgaaagtcaatgcaaatatctcgtgtttctagtacgtggctccgtgaccaccctgcagctcctgtctggagctggagcgtaaagaatctatcttac

SEQ ID NO: 48791 - DNA, 2528 bp, Zea Mays
caattttttccttctattttaatttttgaagaaaaactaaacagagaagtcgaggaaaaattgctgttagcagcggacagggggtgagcgagcgggccgaggattcatctcgtgtcgacgacgccttcgccctctccgagtctccgtccgtcttccgcgtcctccgcagctggactcgtgcgctattccccaggacgctactcccactagggttttcggattaggtttctagaaccttccaccgccgcctctccatgcacgcgccgccgctggtcacgttcgcagggggcgcctgccccaccaccgcctccgcttcgccgtcgccctggttggcctcgccgcgggacgccatctttgccgcgccggcgaggcccctacggtcccgccgcgggacactccggctggaagctaaggccgcgtggagggctgccggagggggacggggcccgcgggtcccggccaagggcgctgtgctcgcctcctatatgggcgccgaggaggtggtgggaccatcgtcgctgcttgacgaggaagagttcatttctcacatcagaaaggaactggataatggaaaacttcctgcagatgttgccagtaacctggaggagctgtattataattacaggaatgcggttctgcaaaatggagatccaaatgcatatgaggtcatgctttcaaatatgatgaccttgtttgatcgtgttctactggatgtacagaatccatttaactttccaccttatcataaagctttgcgagaaccgttcgactattacatgtttggtcagaactacattaggcctctggtagatttcaggaactcctatgttggcaacatttcccttttccatgatatcgaagagaatctccaccagggccacaatgttgttttgatgtctaaccatcagtcagaagcagatccagcaattattgccttgcttcttgaaaaaaccaatccttggattagtgaaaacatagtttatgttgctggcgatagggttgttaccgatccgctttgcaagccatttagcatgggaagaaatctcatttgcgtgtactcgaaaaagcatatgaatgatttccctgagctaattgagatgaagaggagatcaaatactcgaagtctcaaggaaatggcattgcttttacgtggtggttcacagttaatttggattgcaccgagtggtggtagagaccgcccaaatccctcatcaggagaatggtacccggtaaatggtcttatttttccattttgacttagctatgcattatagttcatcttctctttcaatgtaactgcattgctaagaccgtgttcagcacacccaaaacactattttgcactgtagactgaactgttcgcagagtggagtttgaatatgagtatggggatgggtaagctctaagctgctggagatagcctaacaaacaaatgaaatgagatggtacagtaacagtgtagaggtgtgaggtgtctgacaagaatgatctgttttttttacctaagacatgcttgaaaagtccgctgcttttgtaagtatgttcccttaggtttactttatctgctacatgcaaaaacaagggcaggcaccattcgattcatctgcagtggacaatatgaggaggcttctggagcatgctggtgttcctgggcacatatatccactatcattgctgtgctatgaggttatgcctccaccacaacaggttgagaaggagattggtgagcagagggtgatatccttccatggagcaggcttgtcagtaactgaagaaataaactatggagacattactgctcataccaagaatgctgatgagggaagggagctattcacaaataccttgtacaactcagttgttaaccagtacaatgtgctcaaatctgctatctttagagatcgtggagcagctgtatcaaacaatgtcatctcactgtcacaaccatggcgatgaatgttagctttctcagttttggtgaactatcattgtgcaattttgctgggagaaactcttgaacttaaatctttttgatatcactagacttcatcaatcatggtggagcctgttattgtcatgcagatgctcgctaagaagtctgcaactgttggttggtcaagggtgattggcgattttgcacatacggatccgcagttactgctgcctcaggttgctcagcaatgtgctgctggttgggcaccgaggaatccatcaggttgcatcctttttgcccggacgtcgatttgtgcagttgaagtggtaaacgtttttttatcttgtttcgtcatcatgtatatacgtaggcttgagtcattgttggctccacattttttggagatataaatgcggtaggagttatgagatgtccacagtcggccctcccttgttgaattcctttggatgtatcctctctctttcgtacatgcactcactgaaagtcaatgcaaatatctcgtgtttctagtacgtggctccgtgaccaccctgcagctcctgtctggagctggagcgtaaagaatctatcttac

SEQ ID NO: 48792 - DNA, 2645 bp, Zea Mays
caattttttccttctattttaatttttgaagaaaaactaaacagagaagtcgaggaaaaattgctgttagcagcggacagggggtgagcgagcgggccgaggattcatctcgtgtcgacgacgccttcgccctctccgagtctccgtccgtcttccgcgtcctccgcagctggactcgtgcgctattccccaggacgctactcccactagggttttcggattaggtttctagaaccttccaccgccgcctctccatgcacgcgccgccgctggtcacgttcgcagggggcgcctgccccaccaccgcctccgcttcgccgtcgccctggttggcctcgccgcgggacgccatctttgccgcgccggcgaggcccctacggtcccgccgcgggacactccggctggaagctaaggccgcgtggagggctgccggagggggacggggcccgcgggtcccggccaagggcgctgtgctcgcctcctatatgggcgccgaggaggtggtgggaccatcgtcgctgcttgacgaggaagagttcatttctcacatcagaaaggaactggataatggaaaacttcctgcagatgttgccagtaacctggaggagctgtattataattacaggaatgcggttctgcaaaatggagatccaaatgcatatgaggtcatgctttcaaatatgatgaccttgtttgatcgtgttctactggatgtacagaatccatttaactttccaccttatcataaagctttgcgagaaccgttcgactattacatgtttggtcagaactacattaggcctctggtagatttcaggaactcctatgttggcaacatttcccttttccatgatatcgaagagaatctccaccagggccacaatgttgttttgatgtctaaccatcagtcagaagcagatccagcaattattgccttgcttcttgaaaaaaccaatccttggattagtgaaaacatattttcacctgatgtaggtttatgttgctggcgatagggttgttaccgatccgctttgcaagccatttagcatgggaagaaatctcatttgcgtgtactcgaaaaagcatatgaatgatttccctgagctaattgagatgaagaggagatcaaatactcgaagtctcaaggaaatggcattgcttttacgtggtggttcacagttaatttggattgcaccgagtggtggtagagaccgcccaaatccctcatcaggagaatggtacccggtaaatggtcttatttttccattttgacttagctatgcattatagttcatcttctctttcaatgtaactgcattgctaagaccgtgttcagcacacccaaaacactattttgcactgtagactgaactgttcgcagagtggagtttgaatatgagtatggggatgggtaagctctaagctgctggagatagcctaacaaacaaatgaaatgagatggtacagtaacagtgtagaggtgtgaggtgtctgacaagaatgatctgttttttttacctaagacatgcttgaaaagtccgctgcttttgtaagtatgttcccttaggtttactttatctgctacatgcaaaaacaagggcaggcaccattcgattcatctgcagtggacaatatgaggaggcttctggagcatgctggtgttcctgggcacatatatccactatcattgctgtgctatgaggttatgcctccaccacaacaggttgagaaggagattggtgagcagagggtgatatccttccatggagcaggcttgtcagtaactgaagaaataaactatggagacattactgctcataccaagaatgctgatgagggaagggagctattcacaaataccttgtacaactcagttgttaaccagtacaatgtgctcaaatctgctatctttagagatcgtggagcagctgtatcaaacaatgtcatctcactgtcacaaccatggcgatgaatgttagctttctcagttttggtcgaccctgatctgaacttcatttcctggttcttctatttgcttgacaaatactagtatggtccagtttcgttactgaagttaccttttcaaaagagcaggtgaactatcattgtgcaattttgctgggagaaactcttgaacttaaatctttttgatatcactagacttcatcaatcatggtggagcctgttattgtcatgcagatgctcgctaagaagtctgcaactgttggttggtcaagggtgattggcgattttgcacatacggatccgcagttactgctgcctcaggttgctcagcaatgtgctgctggttgggcaccgaggaatccatcaggttgcatcctttttgcccggacgtcgatttgtgcagttgaagtggtaaacgtttttttatcttgtttcgtcatcatgtatatacgtaggcttgagtcattgttggctccacattttttggagatataaatgcggtaggagttatgagatgtccacagtcggccctcccttgttgaattcctttggatgtatcctctctctttcgtacatgcactcactgaaagtcaatgcaaatatctcgtgtttctagtacgtggctccgtgaccaccctgcagctcctgtctggagctggagcgtaaagaatctatcttac

SEQ ID NO: 48793 - DNA, 2918 bp, Zea Mays
caattttttccttctattttaatttttgaagaaaaactaaacagagaagtcgaggaaaaattgctgttagcagcggacagggggtgagcgagcgggccgaggattcatctcgtgtcgacgacgccttcgccctctccgagtctccgtccgtcttccgcgtcctccgcagctggactcgtgcgctattccccaggacgctactcccactagggttttcggattaggtttctagaaccttccaccgccgcctctccatgcacgcgccgccgctggtcacgttcgcagggggcgcctgccccaccaccgcctccgcttcgccgtcgccctggttggcctcgccgcgggacgccatctttgccgcgccggcgaggcccctacggtcccgccgcgggacactccggctggaagctaaggccgcgtggagggctgccggagggggacggggcccgcgggtcccggccaagggcgctgtgctcgcctcctatatgggcgccgaggaggtggtgggaccatcgtcgctgcttgacgaggaagagttcatttctcacatcagaaaggaactggataatggaaaacttcctgcagatgttgccagtaacctggaggagctgtattataattacaggaatgcggttctgcaaaatggagatccaaatgcatatgaggtcatgctttcaaatatgatgaccttgtttgatcgtgttctactggatgtacagaatccatttaactttccaccttatcataaagctttgcgagaaccgttcgactattacatgtttggtcagaactacattaggcctctggtagatttcaggaactcctatgttggcaacatttcccttttccatgatatcgaagagaatctccaccagggccacaatgttgttttgatgtctaaccatcagtcagaagcagatccagcaattattgccttgcttcttgaaaaaaccaatccttggattagtgaaaacataggttgttaccgatccgctttgcaagccatttagcatgggaagaaatctcatttgcgtgtactcgaaaaagcatatgaatgatttccctgagctaattgagatgaagaggagatcaaatactcgaagtctcaaggaaatggcattgcttttacgtggtggttcacagttaatttggattgcaccgagtggtggtagagaccgcccaaatccctcatcaggagaatggtacccggtaaatggtcttatttttccattttgacttagctatgcattatagttcatcttctctttcaatgtaactgcattgctaagaccgtgttcagcacacccaaaacactattttgcactgtagactgaactgttcgcagagtggagtttgaatatgagtatggggatgggtaagctctaagctgctggagatagcctaacaaacaaatgaaatgagatggtacagtaacagtgtagaggtgtgaggtgtctgacaagaatgatctgttttttttacctaagacatgcttgaaaagtccgctgcttttgtaagtatgttcccttaggtttactttatctgctacatgcaaaaacaagggcaggcaccattcgattcatctgcagtggacaatatgaggaggcttctggagcatgctggtgttcctgggcacatatatccactatcattgctgtgctatgaggttatgcctccaccacaacaggttgagaaggagattggtgagcagagggtgatatccttccatggagcaggcttgtcagtaactgaagaaataaactatggagacattactgctcataccaagaatgctgatgagggaagggagctattcacaaataccttgtacaactcagttgttaaccagtacaatgtgctcaaatctgctatctttagagatcgtggagcagctgtatcaaacaatgtcatctcactgtcacaaccatggcgatgaatgttagctttctcagttttggtcgaccctgatctgaacttcatttcctggttcttctatttgcttgacaaatactagtatggtagggtccattaagtatgacttgaaattttgaatacttaaaaagattgcctggtgtttatgtgtaattttcatgcttaatgtctatagtggtgatcctttcttcccatctgacagttgcgcatagcatagtagcatgtaatcccatctatgtagattccatgaggttatgcttatggtaattgattcatttatatagtaagtaattttgctactatatgttaatctgtttatgttacatttgttcattgacactaactatttagatgggtgtgctaacagacgaattttgctactgcattcaggtccagtttcgttactgaagttaccttttcaaaagagcaggtgaactatcattgtgcaattttgctgggagaaactcttgaacttaaatctttttgatatcactagacttcatcaatcatggtggagcctgttattgtcatgcagatgctgtaagcgctaagaagtctgcaactgttggttggtcaagggtgattggcgattttgcacatacggatccgcagttactgctgcctcaggttgctcagcaatgtgctgctggttgggcaccgaggaatccatcaggttgcatcctttttgcccggacgtcgatttgtgcagttgaagtggtaaacgtttttttatcttgtttcgtcatcatgtatatacgtaggcttgagtcattgttggctccacattttttggagatataaatgcggtaggagttatgagatgtccacagtcggccctcccttgttgaattcctttggatgtatcctctctctttcgtacatgcactcactgaaagtcaatgcaaatatctcgtgtttctagtacgtggctccgtgaccaccctgcagctcctgtctggagctggagcgtaaagaatctatcttac

SEQ ID NO: 48794 - DNA, 2554 bp, Zea Mays
caattttttccttctattttaatttttgaagaaaaactaaacagagaagtcgaggaaaaattgctgttagcagcggacagggggtgagcgagcgggccgaggattcatctcgtgtcgacgacgccttcgccctctccgagtctccgtccgtcttccgcgtcctccgcagctggactcgtgcgctattccccaggacgctactcccactagggttttcggattaggtttctagaaccttccaccgccgcctctccatgcacgcgccgccgctggtcacgttcgcagggggcgcctgccccaccaccgcctccgcttcgccgtcgccctggttggcctcgccgcgggacgccatctttgccgcgccggcgaggcccctacggtcccgccgcgggacactccggctggaagctaaggccgcgtggagggctgccggagggggacggggcccgcgggtcccggccaagggcgctgtgctcgcctcctatatgggcgccgaggaggtggtgggaccatcgtcgctgcttgacgaggaagagttcatttctcacatcagaaaggaactggataatggaaaacttcctgcagatgttgccagtaacctggaggagctgtattataattacaggaatgcggttctgcaaaatggagatccaaatgcatatgaggtcatgctttcaaatatgatgaccttgtttgatcgtgttctactggatgtacagaatccatttaactttccaccttatcataaagctttgcgagaaccgttcgactattacatgtttggtcagaactacattaggcctctggtagatttcaggaactcctatgttggcaacatttcccttttccatgatatcgaagagaatctccaccagggccacaatgttgttttgatgtctaaccatcagtcagaagcagatccagcaattattgccttgcttcttgaaaaaaccaatccttggattagtgaaaacatagtttatgttgctggcgatagggttgttaccgatccgctttgcaagccatttagcatgggaagaaatctcatttgcgtgtactcgaaaaagcatatgaatgatttccctgagctaattgagatgaagaggagatcaaatactcgaagtctcaaggaaatggcattgcttttacgtggtggttcacagttaatttggattgcaccgagtggtggtagagaccgcccaaatccctcatcaggagaatggtacccggtaaatggtcttatttttccattttgacttagctatgcattatagttcatcttctctttcaatgtaactgcattgctaagaccgtgttcagcacacccaaaacactattttgcactgtagactgaactgttcgcagagtggagtttgaatatgagtatggggatgggtaagctctaagctgctggagatagcctaacaaacaaatgaaatgagatggtacagtaacagtgtagaggtgtgaggtgtctgacaagaatgatctgttttttttacctaagacatgcttgaaaagtccgctgcttttgtaagtatgttcccttaggtttactttatctgctacatgcaaaaacaagggcaggcaccattcgattcatctgcagtggacaatatgaggaggcttctggagcatgctggtgttcctgggcacatatatccactatcattgctgtgctatgaggttatgcctccaccacaacaggttgagaaggagattggtgagcagagggtgatatccttccatggagcaggcttgtcagtaactgaagaaataaactatggagacattactgctcataccaagaatgctgatgagggaagggagctattcacaaataccttgtacaactcagttgttaaccagtacaatgtgctcaaatctgctatctttagagatcgtggagcagctgtatcaaacaatgtcatctcactgtcacaaccatggcgatgaatgtccagtttcgttactgaagttaccttttcaaaagagcaggtgaactatcattgtgcaattttgctgggagaaactcttgaacttaaatctttttgatatcactagacttcatcaatcatggtggagcctgttattgtcatgcagatgctgtaagcgctaagaagtctgcaactgttggttggtcaagggtgattggcgattttgcacatacggatccgcagttactgctgcctcaggttgctcagcaatgtgctgctggttgggcaccgaggaatccatcaggttgcatcctttttgcccggacgtcgatttgtgcagttgaagtggtaaacgtttttttatcttgtttcgtcatcatgtatatacgtaggcttgagtcattgttggctccacattttttggagatataaatgcggtaggagttatgagatgtccacagtcggccctcccttgttgaattcctttggatgtatcctctctctttcgtacatgcactcactgaaagtcaatgcaaatatctcgtgtttctagtacgtggctccgtgaccaccctgcagctcctgtctggagctggagcgtaaagaatctatcttac

SEQ ID NO: 48795 - DNA, 2129 bp, Zea Mays
cggctgcatcaccgatctctctccctccctcgctcgtcgcttccgcaggggcagccgcagcaccgcagctacctacctacccacacacgcgattcacgcaagcacacgcagccgctccttccgtcctcaaaccacaggcggaccctgacgagacgtacaagaacctccaccaggccattgagcccttgaccgtgtacgcaaacgaacacgaagcctagctcctccccaatggcctcccatcctcctcctgcggagccgtcttctaagtcaaacaaggggcagagcgagcacgaggagatccacgtctcctcgggcggcgttctggcttacaccgacgacgatgactgcgagagcaggcgccccttgctgctcaggactcccgcctccgccgagtgctactccgtctccgccgccgtcttcccgtttctctttccagctttgggaggccttctgtatggctatgacattggggcaacatccggtgcaaccatatcgctcaagtcgtcgacattcagtggtactacttggtacaatttgtcatctgtgcaaacgggtcttgtggtcagtggctcactgtatggtgctttgatcggctccgtcttggcatatacaattgcagattttttaggacgacgtaaagagcttatccttgcttctatctcatattttattggagcctttctgacagcagtagcacccaatttcactatcatggtggttggccgctttttatatggcataggaattggattgagactgcaccgagccagataagaggcatgctcatttctctaaaggagttctttattgttcttgggatgcttcttggttatatagcaggaaatctctatgttgaagtggtttctggttggcgttacatgtatgcctccagtacaccattatgtctcataatgggagttggaatgtgctggttaccctcatcacctaggtggctcctgttatgtgccatacaagggaaggggaatctgccagagacaaaagaaaatgcaacccggtgcttatgtcggttgcggggtcaagcttcacctgatttggtctcagagcagattgacttgattctagaggaactttcatatattgatcaagagaagcaagctagcttcggtgagatctttcaaggaaaatgtcttaaagcaatgataattggatgtggtttggtgttctttcagcaggtcactggtcaacctagcgttctatactatgctgctacaatttttcagagtgctggattctctggggcatctgatgccactcgtgtgtcaattcttcttggcttactgaagctaatcatgaccggagtagcagtccttgtggtcgacagacttggcaggagaccattgcttattggaggtgtcagtggaattactgttgccttatttttgctgtcctcctactacactttactgaaagatgcctcctatgtggctgtaatagcgcttctactatatgttggttgttatcagctctcatttggtcctattggctggcttatgatctcagaggttttcccgctgaggctgcgagggcgtggactgggcgttgctgttcttgtcaattttgcgtccaacgctctggtcacctttgctttctctccactggaggatttgattggaacgggagcgctcttctctggattcggggtgattgcagtggcatctcttgcattcatattctggatcgtccctgagacaaaaggactcaccctggaagagattgaagcgagtttgtagttgactgatccagacgtcacgttcttccgtcctagtttcactgaactgaagggacttctggtatccttctgtagtttgctgccgtagttagccttctataaacgttctacaagctgttgtagcaataatacttctttccttccgggtataaaccgagatggtcggttgctgcaaagtgtgttctttaccgcagttcatccgattagtcacaattaattttcctgatcgccccctgcacttaactaggcaccatgactcaatcagagcgacgttgattattcaactagtactcgatattttcaaaatggttgctaatggaaagaaaagaaagaaaatgatcttctctctagatcatgatcaagaaaagattaccaggag

SEQ ID NO: 48796 - DNA, 2015 bp, Zea Mays
ctccctccctcgctcgtcgcttccgcaggggcagccgcagcaccgcagctacctacctacccacacacgcgattcacgcaagcacacgcagccgctccttccgtcctcaaaccacaggcggaccctgacgagacgtacaagaacctccaccaggccattgagcccttgaccgtgtacgcaaacgaacacgaagcctagctcctccccaatggcctcccatcctcctcctgcggagccgtcttctaagtcaaacaaggggcagagcgagcacgaggagatccacgtctcctcgggcggcgttctggcttacaccgacgacgatgactgcgagagcaggcgccccttgctgctcaggactcccgcctccgccgagtgctactccgtctccgccgccgtcttcccgtttctctttccagctttgggaggccttctgtatggctatgacattggggcaacatccggtgcaaccatatcgctcaagtcgtcgacattcagtggtactacttggtacaatttgtcatctgtgcaaacgggtcttgtggtcagtggctcactgtatggtgctttgatcggctccgtcttggcatatacaattgcagattttttaggctatgcatgctgctccaatgtatattgcagagactgcaccgagccagataagaggcatgctcatttctctaaaggagttctttattgttcttgggatgcttcttggttatatagcaggaaatctctatgttgaagtggtttctggttggcgttacatgtatgcctccagtacaccattatgtctcataatgggagttggaatgtgctggttaccctcatcacctaggtggctcctgttatgtgccatacaagggaaggggaatctgccagagacaaaagaaaatgcaacccggtgcttatgtcggttgcggggtcaagcttcacctgatttggtctcagagcagattgacttgattctagaggaactttcatatattgatcaagagaagcaagctagcttcggtgagatctttcaaggaaaatgtcttaaagcaatgataattggatgtggtttggtgttctttcagcaggtcactggtcaacctagcgttctatactatgctgctacaatttttcagagtgctggattctctggggcatctgatgccactcgtgtgtcaattcttcttggcttactgaagctaatcatgaccggagtagcagtccttgtggtcgacagacttggcaggagaccattgcttattggaggtgtcagtggaattactgttgccttatttttgctgtcctcctactacactttactgaaagatgcctcctatgtggctgtaatagcgcttctactatatgttggttgttatcagctctcatttggtcctattggctggcttatgatctcagaggttttcccgctgaggctgcgagggcgtggactgggcgttgctgttcttgtcaattttgcgtccaacgctctggtcacctttgctttctctccactggaggatttgattggaacgggagcgctcttctctggattcggggtgattgcagtggcatctcttgcattcatattctggatcgtccctgagacaaaaggactcaccctggaagagattgaagcgagtttgtagttgactgatccagacgtcacgttcttccgtcctagtttcactgaactgaagggacttctggtatccttctgtagtttgctgccgtagttagccttctataaacgttctacaagctgttgtagcaataatacttctttccttccgggtataaaccgagatggtcggttgctgcaaagtgtgttctttaccgcagttcatccgattagtcacaattaattttcctgatcgccccctgcacttaactaggcaccatgactcaatcagagcgacgttgattattcaactagtactcgatattttcaaaatggttgctaatggaaagaaaagaaagaaaatgatcttctctctagatcatgatcaagaaaagattaccaggag

SEQ ID NO: 48797 - DNA, 2133 bp, Zea Mays
cgctcgtcgcttccgcaggggcagccgcagcaccgcagctacctacctacccacacacgcgattcacgcaagcacacgcagccgctccttccgtcctcaaaccacaggcggaccctgacgagacgtacaagaacctccaccaggccattgagcccttgaccgtgtacgcaaacgaacacgaagcctagctcctccccaatggcctcccatcctcctcctgcggagccgtcttctaagtcaaacaagcaggggcagagcgagcacgaggagatccacgtctcctcgggcggcgttctggcttacaccgacgacgatgactgcgagagcaggcgccccttgctgctcaggactcccgcctccgccgagtgctactccgtctccgccgccgtcttcccgtttctctttccagctttgggaggccttctgtatggctatgacattggggcaacatccggtgcaaccatatcgctcaagtcgtcgacattcagtggtactacttggtacaatttgtcatctgtgcaaacgggtcttgtggtcagtggctcactgtatggtgctttgatcggctccgtcttggcatatacaattgcagattttttaggacgacgtaaagagcttatccttgcttctatctcatattttattggagcctttctgacagcagtagcacccaatttcactatcatggtggttggccgctttttatatggcataggaattggattggctatgcatgctgctccaatgtatattgcagagactgcaccgagccagataagaggcatgctcatttctctaaaggagttctttattgttcttgggatgcttcttggttatatagcaggaaatctctatgttgaagtggtttctggttggcgttacatgtatgcctccagtacaccattatgtctcataatgggagttggaatgtgctggttaccctcatcacctaggtggctcctgttatgtgccatacaagggaaggggaatctgccagagacaaaagaaaatgcaacccggtgcttatgtcggttgcggggtcaagcttcacctgatttggtctcagagcagattgacttgattctagaggaactttcatatattgatcaagagaagcaagctagcttcggtgagatctttcaaggaaaatgtcttaaagcaatgataattggatgtggtttggtgttctttcagcaggtcactggtcaacctagcgttctatactatgctgctacaatttttcagagtgctggattctctggggcatctgatgccactcgtgtgtcaattcttcttggcttactgaagctaatcatgaccggagtagcagtccttgtggtcgacagacttggcaggagaccattgcttattggaggtgtcagtggaattactgttgccttatttttgctgtcctcctactacactttactgaaagatgcctcctatgtggctgtaatagcgcttctactatatgttggttgttatcagctctcatttggtcctattggctggcttatgatctcagaggttttcccgctgaggctgcgagggcgtggactgggcgttgctgttcttgtcaattttgcgtccaacgctctggtcacctttgctttctctccactggaggatttgattggaacgggagcgctcttctctggattcggggtgattgcagtggcatctcttgcattcatattctggatcgtccctgagacaaaaggactcaccctggaagagattgaagcgagtttgtagttgactgatccagacgtcacgttcttccgtcctagtttcactgaactgaagggacttctggtatccttctgtagtttgctgccgtagttagccttctataaacgttctacaagctgttgtagcaataatacttctttccttccgggtataaaccgagatggtcggttgctgcaaagtgtgttctttaccgcagttcatccgattagtcacaattaattttcctgatcgccccctgcacttaactaggcaccatgactcaatcagagcgacgttgattattcaactagtactcgatattttcaaaatggttgctaatggaaagaaaagaaagaaaatgatcttctctctagatcatgatcaagaaaagattaccaggag

SEQ ID NO: 48798 - DNA, 2388 bp, Zea Mays
cgctcgtcgcttccgcaggggcagccgcagcaccgcagctacctacctacccacacacgcgattcacgcaagcacacgcagccgctccttccgtcctcaaaccacaggcggaccctgacgagacgtacaagaacctccaccaggccattgagcccttgaccgtgtacgcaaacgaacacgaagcctagctcctccccaatggcctcccatcctcctcctgcggagccgtcttctaagtcaaacaaggggcagagcgagcacgaggagatccacgtctcctcgggcggcgttctggcttacaccgacgacgatgactgcgagagcaggcgccccttgctgctcaggactcccgcctccgccgagtgctactccgtctccgccgccgtcttcccgtttctctttccagctttgggaggccttctgtatggctatgacattggggcaacatccggtgcaaccatatcgctcaagtcgtcgacattcagtggtactacttggtacaatttgtcatctgtgcaaacgggtcttgtggtcagtggctcactgtatggtgctttgatcggctccgtcttggcatatacaattgcagattttttaggacgacgtaaagagcttatccttgcttctatctcatattttattggagcctttctgacagcagtagcacccaatttcactatcatggtggttggccgctttttatatggcataggaattggattggctatgcatgctgctccaatgtatattgcagagactgcaccgagccagataagaggcatgctcatttctctaaaggagttctttattgttcttgggatgcttcttggttatatagcaggaaatctctatgttgaagtggtttctggttggcgttacatgtatgcctccagtacaccattatgtctcataatgggagttggaatgtgctggttaccctcatcacctaggtggctcctgttatgtgccatacaagggaaggggaatctgccagagacaaaagaaaatgcaacccggtgcttatgtcggttgcggggtcaagcttcacctgatttggtctcagagcagattgacttgattctagaggaactttcatatattgatcaagagaagcaagctagcttcggtgagatctttcaaggaaaatgtcttaaagcaatgataattggatgtggtttggtgttctttcagcaggtcactggtcaacctagcgttctatactatgctgctacaatttttcaggtagtgacatactgttgattccctatatggagttatccagttcaagcatgtttgggtattatagaagcccatttgtgttaggacttactatgttgatctccaatatagggttcagtgcctcaaaacattatcaatctactttcagggtggaaataattgtcaaacttgtctgggcaacttgcgattagtactttttagaccccacattattctctttagttcctgtatcactcatatctatcattggtttgcaagcagagtgctggattctctggggcatctgatgccactcgtgtgtcaattcttcttggcttactgaagctaatcatgaccggagtagcagtccttgtggtcgacagacttggcaggagaccattgcttattggaggtgtcagtggaattactgttgccttatttttgctgtcctcctactacactttactgaaagatgcctcctatgtggctgtaatagcgcttctactatatgttggttgttatcagctctcatttggtcctattggctggcttatgatctcagaggttttcccgctgaggctgcgagggcgtggactgggcgttgctgttcttgtcaattttgcgtccaacgctctggtcacctttgctttctctccactggaggatttgattggaacgggagcgctcttctctggattcggggtgattgcagtggcatctcttgcattcatattctggatcgtccctgagacaaaaggactcaccctggaagagattgaagcgagtttgtagttgactgatccagacgtcacgttcttccgtcctagtttcactgaactgaagggacttctggtatccttctgtagtttgctgccgtagttagccttctataaacgttctacaagctgttgtagcaataatacttctttccttccgggtataaaccgagatggtcggttgctgcaaagtgtgttctttaccgcagttcatccgattagtcacaattaattttcctgatcgccccctgcacttaactaggcaccatgactcaatcagagcgacgttgattattcaactagtactcgatattttcaaaatggttgctaatggaaagaaaagaaagaaaatgatcttctctctagatcatgatcaagaaaagattaccaggag

SEQ ID NO: 48799 - DNA, 1970 bp, Zea Mays
cgtcgcttccgcaggggcagccgcagcaccgcagctacctacctacccacacacgcgattcacgcaagcacacgcagccgctccttccgtcctcaaaccacaggcggaccctgacgagacgtacaagaacctccaccaggccattgagcccttgaccgtgtacgcaaacgaacacgaagcctagctcctccccaatggcctcccatcctcctcctgcggagccgtcttctaagtcaaacaaggggcagagcgagcacgaggagatccacgtctcctcgggcggcgttctggcttacaccgacgacgatgactgcgagagcaggcgccccttgctgctcaggactcccgcctccgccgagtgctactccgtctccgccgccgtcttcccgtttctctttccagctttgggaggccttctgtatggctatgacattggggcaacatccggtgcaaccatatcgctcaagtcgtcgacattcagtggtactacttggtacaatttgtcatctgtgcaaacgggtcttgtggtcagtggctcactgtatggtgctttgatcggctccgtcttggcatatacaattgcagattttttagagactgcaccgagccagataagaggcatgctcatttctctaaaggagttctttattgttcttgggatgcttcttggttatatagcaggaaatctctatgttgaagtggtttctggttggcgttacatgtatgcctccagtacaccattatgtctcataatgggagttggaatgtgctggttaccctcatcacctaggtggctcctgttatgtgccatacaagggaaggggaatctgccagagacaaaagaaaatgcaacccggtgcttatgtcggttgcggggtcaagcttcacctgatttggtctcagagcagattgacttgattctagaggaactttcatatattgatcaagagaagcaagctagcttcggtgagatctttcaaggaaaatgtcttaaagcaatgataattggatgtggtttggtgttctttcagcaggtcactggtcaacctagcgttctatactatgctgctacaatttttcagagtgctggattctctggggcatctgatgccactcgtgtgtcaattcttcttggcttactgaagctaatcatgaccggagtagcagtccttgtggtcgacagacttggcaggagaccattgcttattggaggtgtcagtggaattactgttgccttatttttgctgtcctcctactacactttactgaaagatgcctcctatgtggctgtaatagcgcttctactatatgttggttgttatcagctctcatttggtcctattggctggcttatgatctcagaggttttcccgctgaggctgcgagggcgtggactgggcgttgctgttcttgtcaattttgcgtccaacgctctggtcacctttgctttctctccactggaggatttgattggaacgggagcgctcttctctggattcggggtgattgcagtggcatctcttgcattcatattctggatcgtccctgagacaaaaggactcaccctggaagagattgaagcgagtttgtagttgactgatccagacgtcacgttcttccgtcctagtttcactgaactgaagggacttctggtatccttctgtagtttgctgccgtagttagccttctataaacgttctacaagctgttgtagcaataatacttctttccttccgggtataaaccgagatggtcggttgctgcaaagtgtgttctttaccgcagttcatccgattagtcacaattaattttcctgatcgccccctgcacttaactaggcaccatgactcaatcagagcgacgttgattattcaactagtactcgatattttcaaaatggttgctaatggaaagaaaagaaagaaaatgatcttctctctagatcatgatcaagaaaagattaccaggag

SEQ ID NO: 48800 - DNA, 2062 bp, Zea Mays
gtcgcttccgcaggggcagccgcagcaccgcagctacctacctacccacacacgcgattcacgcaagcacacgcagccgctccttccgtcctcaaaccacaggcggaccctgacgagacgtacaagaacctccaccaggccattgagcccttgaccgtgtacgcaaacgaacacgaagcctagctcctccccaatggcctcccatcctcctcctgcggagccgtcttctaagtcaaacaaggggcagagcgagcacgaggagatccacgtctcctcgggcggcgttctggcttacaccgacgacgatgactgcgagagcaggcgccccttgctgctcaggactcccgcctccgccgagtgctactccgtctccgccgccgtcttcccgtttctctttccagctttgggaggccttctgtatggctatgacattggggcaacatccggtgcaaccatatcgctcaagtcgtcgacattcagtggtactacttggtacaatttgtcatctgtgcaaacgggtcttgtggtcagtggctcactgtatggtgctttgatcggctccgtcttggcatatacaattgcagattttttagtagcacccaatttcactatcatggtggttggccgctttttatatggcataggaattggattggctatgcatgctgctccaatgtatattgcagagactgcaccgagccagataagaggcatgctcatttctctaaaggagttctttattgttcttgggatgcttcttggttatatagcaggaaatctctatgttgaagtggtttctggttggcgttacatgtatgcctccagtacaccattatgtctcataatgggagttggaatgtgctggttaccctcatcacctaggtggctcctgttatgtgccatacaagggaaggggaatctgccagagacaaaagaaaatgcaacccggtgcttatgtcggttgcggggtcaagcttcacctgatttggtctcagagcagattgacttgattctagaggaactttcatatattgatcaagagaagcaagctagcttcggtgagatctttcaaggaaaatgtcttaaagcaatgataattggatgtggtttggtgttctttcagcaggtcactggtcaacctagcgttctatactatgctgctacaatttttcagagtgctggattctctggggcatctgatgccactcgtgtgtcaattcttcttggcttactgaagctaatcatgaccggagtagcagtccttgtggtcgacagacttggcaggagaccattgcttattggaggtgtcagtggaattactgttgccttatttttgctgtcctcctactacactttactgaaagatgcctcctatgtggctgtaatagcgcttctactatatgttggttgttatcagctctcatttggtcctattggctggcttatgatctcagaggttttcccgctgaggctgcgagggcgtggactgggcgttgctgttcttgtcaattttgcgtccaacgctctggtcacctttgctttctctccactggaggatttgattggaacgggagcgctcttctctggattcggggtgattgcagtggcatctcttgcattcatattctggatcgtccctgagacaaaaggactcaccctggaagagattgaagcgagtttgtagttgactgatccagacgtcacgttcttccgtcctagtttcactgaactgaagggacttctggtatccttctgtagtttgctgccgtagttagccttctataaacgttctacaagctgttgtagcaataatacttctttccttccgggtataaaccgagatggtcggttgctgcaaagtgtgttctttaccgcagttcatccgattagtcacaattaattttcctgatcgccccctgcacttaactaggcaccatgactcaatcagagcgacgttgattattcaactagtactcgatattttcaaaatggttgctaatggaaagaaaagaaagaaaatgatcttctctctagatcatgatcaagaaaagattaccaggag

SEQ ID NO: 48801 - DNA, 1824 bp, Zea Mays
gctccttccgtcctcaaaccacaggcggaccctgacgagacgtacaagaacctccaccaggccattgagcccttgaccgtgtacgcaaacgaacacgaagcctagctcctccccaatggcctcccatcctcctcctgcggagccgtcttctaagtcaaacaaggggcagagcgagcacgaggagatccacgtctcctcgggcggcgttctggcttacaccgacgacgatgactgcgagagcaggcgccccttgctgctcaggactcccgcctccgccgagtgctactccgtctccgccgccgtcttcccgtttctctttccagctttgggaggccttctgtatggctatgacattggggcaacatccggtgcaaccatatcgctcaagtcgtcgacattcagtggtactacttggtacaatttgtcatctgtgcaaacgggtcttgtgagactgcaccgagccagataagaggcatgctcatttctctaaaggagttctttattgttcttgggatgcttcttggttatatagcaggaaatctctatgttgaagtggtttctggttggcgttacatgtatgcctccagtacaccattatgtctcataatgggagttggaatgtgctggttaccctcatcacctaggtggctcctgttatgtgccatacaagggaaggggaatctgccagagacaaaagaaaatgcaacccggtgcttatgtcggttgcggggtcaagcttcacctgatttggtctcagagcagattgacttgattctagaggaactttcatatattgatcaagagaagcaagctagcttcggtgagatctttcaaggaaaatgtcttaaagcaatgataattggatgtggtttggtgttctttcagcaggtcactggtcaacctagcgttctatactatgctgctacaatttttcagagtgctggattctctggggcatctgatgccactcgtgtgtcaattcttcttggcttactgaagctaatcatgaccggagtagcagtccttgtggtcgacagacttggcaggagaccattgcttattggaggtgtcagtggaattactgttgccttatttttgctgtcctcctactacactttactgaaagatgcctcctatgtggctgtaatagcgcttctactatatgttggttgttatcagctctcatttggtcctattggctggcttatgatctcagaggttttcccgctgaggctgcgagggcgtggactgggcgttgctgttcttgtcaattttgcgtccaacgctctggtcacctttgctttctctccactggaggatttgattggaacgggagcgctcttctctggattcggggtgattgcagtggcatctcttgcattcatattctggatcgtccctgagacaaaaggactcaccctggaagagattgaagcgagtttgtagttgactgatccagacgtcacgttcttccgtcctagtttcactgaactgaagggacttctggtatccttctgtagtttgctgccgtagttagccttctataaacgttctacaagctgttgtagcaataatacttctttccttccgggtataaaccgagatggtcggttgctgcaaagtgtgttctttaccgcagttcatccgattagtcacaattaattttcctgatcgccccctgcacttaactaggcaccatgactcaatcagagcgacgttgattattcaactagtactcgatattttcaaaatggttgctaatggaaagaaaagaaagaaaatgatcttctctctagatcatgatcaagaaaagattaccaggag

SEQ ID NO: 48802 - DNA, 1980 bp, Zea Mays
gctccttccgtcctcaaaccacaggcggaccctgacgagacgtacaagaacctccaccaggccattgagcccttgaccgtgtacgcaaacgaacacgaagcctagctcctccccaatggcctcccatcctcctcctgcggagccgtcttctaagtcaaacaaggggcagagcgagcacgaggagatccacgtctcctcgggcggcgttctggcttacaccgacgacgatgactgcgagagcaggcgccccttgctgctcaggactcccgcctccgccgagtgctactccgtctccgccgccgtcttcccgtttctctttccagctttgggaggccttctgtatggctatgacattggggcaacatccggtgcaaccatatcgctcaagtcgtcgacattcagtggtactacttggtacaatttgtcatctgtgcaaacgggtcttgtggacgacgtaaagagcttatccttgcttctatctcatattttattggagcctttctgacagcagtagcacccaatttcactatcatggtggttggccgctttttatatggcataggaattggattggctatgcatgctgctccaatgtatattgcagagactgcaccgagccagataagaggcatgctcatttctctaaaggagttctttattgttcttgggatgcttcttggttatatagcaggaaatctctatgttgaagtggtttctggttggcgttacatgtatgcctccagtacaccattatgtctcataatgggagttggaatgtgctggttaccctcatcacctaggtggctcctgttatgtgccatacaagggaaggggaatctgccagagacaaaagaaaatgcaacccggtgcttatgtcggttgcggggtcaagcttcacctgatttggtctcagagcagattgacttgattctagaggaactttcatatattgatcaagagaagcaagctagcttcggtgagatctttcaaggaaaatgtcttaaagcaatgataattggatgtggtttggtgttctttcagcaggtcactggtcaacctagcgttctatactatgctgctacaatttttcagagtgctggattctctggggcatctgatgccactcgtgtgtcaattcttcttggcttactgaagctaatcatgaccggagtagcagtccttgtggtcgacagacttggcaggagaccattgcttattggaggtgtcagtggaattactgttgccttatttttgctgtcctcctactacactttactgaaagatgcctcctatgtggctgtaatagcgcttctactatatgttggttgttatcagctctcatttggtcctattggctggcttatgatctcagaggttttcccgctgaggctgcgagggcgtggactgggcgttgctgttcttgtcaattttgcgtccaacgctctggtcacctttgctttctctccactggaggatttgattggaacgggagcgctcttctctggattcggggtgattgcagtggcatctcttgcattcatattctggatcgtccctgagacaaaaggactcaccctggaagagattgaagcgagtttgtagttgactgatccagacgtcacgttcttccgtcctagtttcactgaactgaagggacttctggtatccttctgtagtttgctgccgtagttagccttctataaacgttctacaagctgttgtagcaataatacttctttccttccgggtataaaccgagatggtcggttgctgcaaagtgtgttctttaccgcagttcatccgattagtcacaattaattttcctgatcgccccctgcacttaactaggcaccatgactcaatcagagcgacgttgattattcaactagtactcgatattttcaaaatggttgctaatggaaagaaaagaaagaaaatgatcttctctctagatcatgatcaagaaaagattaccaggag

SEQ ID NO: 48803 - DNA, 1923 bp, Zea Mays
cgggcatcccctcccgacctgggctccagcaactaactagggcagagcgagcacgaggagatccacgtctcctcgggcggcgttctggcttacaccgacgacgatgactgcgagagcaggcgccccttgctgctcaggactcccgcctccgccgagtgctactccgtctccgccgccgtcttcccgtttctctttccagctttgggaggccttctgtatggctatgacattggggcaacatccggtgcaaccatatcgctcaagtcgtcgacattcagtggtactacttggtacaatttgtcatctgtgcaaacgggtcttgtggtcagtggctcactgtatggtgctttgatcggctccgtcttggcatatacaattgcagattttttaggacgacgtaaagagcttatccttgcttctatctcatattttattggagcctttctgacagcagtagcacccaatttcactatcatggtggttggccgctttttatatggcataggaattggattggctatgcatgctgctccaatgtatattgcagagactgcaccgagccagataagaggcatgctcatttctctaaaggagttctttattgttcttgggatgcttcttggttatatagcaggaaatctctatgttgaagtggtttctggttggcgttacatgtatgcctccagtacaccattatgtctcataatgggagttggaatgtgctggttaccctcatcacctaggtggctcctgttatgtgccatacaagggaaggggaatctgccagagacaaaagaaaatgcaacccggtgcttatgtcggttgcggggtcaagcttcacctgatttggtctcagagcagattgacttgattctagaggaactttcatatattgatcaagagaagcaagctagcttcggtgagatctttcaaggaaaatgtcttaaagcaatgataattggatgtggtttggtgttctttcagcaggtcactggtcaacctagcgttctatactatgctgctacaatttttcagagtgctggattctctggggcatctgatgccactcgtgtgtcaattcttcttggcttactgaagctaatcatgaccggagtagcagtccttgtggtcgacagacttggcaggagaccattgcttattggaggtgtcagtggaattactgttgccttatttttgctgtcctcctactacactttactgaaagatgcctcctatgtggctgtaatagcgcttctactatatgttggttgttatcagctctcatttggtcctattggctggcttatgatctcagaggttttcccgctgaggctgcgagggcgtggactgggcgttgctgttcttgtcaattttgcgtccaacgctctggtcacctttgctttctctccactggaggatttgattggaacgggagcgctcttctctggattcggggtgattgcagtggcatctcttgcattcatattctggatcgtccctgagacaaaaggactcaccctggaagagattgaagcgagtttgtagttgactgatccagacgtcacgttcttccgtcctagtttcactgaactgaagggacttctggtatccttctgtagtttgctgccgtagttagccttctataaacgttctacaagctgttgtagcaataatacttctttccttccgggtataaaccgagatggtcggttgctgcaaagtgtgttctttaccgcagttcatccgattagtcacaattaattttcctgatcgccccctgcacttaactaggcaccatgactcaatcagagcgacgttgattattcaactagtactcgatattttcaaaatggttgctaatggaaagaaaagaaagaaaatgatcttctctctagatcatgatcaagaaaagattaccaggag

SEQ ID NO: 48804 - DNA, 1887 bp, Zea Mays
atcccctcccgacctgggctccagcaactaactagggcagagcgagcacgaggagatccacgtctcctcgggcggcgttctggcttacaccgacgacgatgactgcgagagcaggcgccccttgctgctcaggactcccgcctccgccgagtgctactccgtctccgccgccgtcttcccgtttctctttccagctttgggaggccttctgtatggctatgacattggggcaacatccggtgcaaccatatcgctcaagtcgtcgacattcagtggtactacttggtacaatttgtcatctgtgcaaacgggtcttgtggtcagtggctcactgtatggtgctttgatcggctccgtcttggcatatacaattgcagattttttaggacgacgtaaagagcttatccttgcttctatctcatattttattggagcctttctgacagcagtagcacccaatttcactatcatggtggttggccgctttttatatggcataggaattggattgagactgcaccgagccagataagaggcatgctcatttctctaaaggagttctttattgttcttgggatgcttcttggttatatagcaggaaatctctatgttgaagtggtttctggttggcgttacatgtatgcctccagtacaccattatgtctcataatgggagttggaatgtgctggttaccctcatcacctaggtggctcctgttatgtgccatacaagggaaggggaatctgccagagacaaaagaaaatgcaacccggtgcttatgtcggttgcggggtcaagcttcacctgatttggtctcagagcagattgacttgattctagaggaactttcatatattgatcaagagaagcaagctagcttcggtgagatctttcaaggaaaatgtcttaaagcaatgataattggatgtggtttggtgttctttcagcaggtcactggtcaacctagcgttctatactatgctgctacaatttttcagagtgctggattctctggggcatctgatgccactcgtgtgtcaattcttcttggcttactgaagctaatcatgaccggagtagcagtccttgtggtcgacagacttggcaggagaccattgcttattggaggtgtcagtggaattactgttgccttatttttgctgtcctcctactacactttactgaaagatgcctcctatgtggctgtaatagcgcttctactatatgttggttgttatcagctctcatttggtcctattggctggcttatgatctcagaggttttcccgctgaggctgcgagggcgtggactgggcgttgctgttcttgtcaattttgcgtccaacgctctggtcacctttgctttctctccactggaggatttgattggaacgggagcgctcttctctggattcggggtgattgcagtggcatctcttgcattcatattctggatcgtccctgagacaaaaggactcaccctggaagagattgaagcgagtttgtagttgactgatccagacgtcacgttcttccgtcctagtttcactgaactgaagggacttctggtatccttctgtagtttgctgccgtagttagccttctataaacgttctacaagctgttgtagcaataatacttctttccttccgggtataaaccgagatggtcggttgctgcaaagtgtgttctttaccgcagttcatccgattagtcacaattaattttcctgatcgccccctgcacttaactaggcaccatgactcaatcagagcgacgttgattattcaactagtactcgatattttcaaaatggttgctaatggaaagaaaagaaagaaaatgatcttctctctagatcatgatcaagaaaagattaccaggag

SEQ ID NO: 48805 - DNA, 1866 bp, Zea Mays
atttgcattgggctgtccgcagtatggcgtcgcctccgactcgtcttgtgttctccccgtcgctgcgtcgcagccgtcgtcgggcttctcctctttcttgcactttcagtcgagtccagacctgcggaatatagatctaccaatcgaccgacccggatccttcccttccgtctgacgtcgtcgtagcagatcttatctcaaaccctaccgaccaacagctgcttgctcgggacgggaaccggagttggattgcgatggcgctgcagtacgtggaggcgcagcggcaggcgcgcccggacctcgccgactggtatgcttccctcgccgacctctaccagcagaagctatggcaccagctcaccctcaagctcgaccaattcctacagctccaggccgcacagaccggagacactatcattcagctctacaacaatttcatcactgattttgagaccaagattaatctgctcaagcttgcccattttgcggtgatagcttctcgccagtaccctgataaggatgctgcaattaccttcttagagggggtgatcacaaagctgcgtgatacaagagagtcacggattaatgaaccgattctctatgtgaagatgcaaattgcagctattaatcttgagaaaggaaaccaaaaagagtgcaagaattcgttggaggatgggaaaaccaccctggatagtatgactgatgtcgatcccacagttcatgctagcttttactggatatcatctcaataccacaagtcatgccaagaatttgcagagttctataagaacgctcttctctatctggcctacacaactgtggagtctctatctgagtcattcaagctagacttggcttttgatctttctctagcagccttgctgggtgataacatttataattttggagagttattagctcacccgattctttggtgcaggatgagaggaagctgcttgagaaaatcaatattctttgtctgatggagataatctttagtcggccatctgaagatagaactattccattaagtgttattgctgagcagactaagctttcaatcagtgatgtggagtatctccttatgaagagcctctcggttcatcttattgagggaataattgatgaagtggacagtacagttcatgtttcgtgggtccagcccagagtgcttggaatcccacaggttaaggctttgcgcgaccgcctggatgcctgggttggaaaggtgcatactacattgctttcagttgaggcagaaacacctgatcttgttgctgcctaatttagcacctgttacacttccgcgagaggcttggtcagcaaggtgatgagatgcattgtgacacttgtagtcattttctggataatgaacctgctgccctgagcgtttgtcagcctgcgtcctgatcggggcctgtaatttcttttttgatgtcctctggacatggatgggtacaacttcacgcagtgtcacggaaacgggaccaaatgattgaaatttttatactagtagggtgttactgtagttttcccagttgaatttaatttgtaactgagtttgtactctgctggacatggatgcaggagaatcttgctggaaatttagttgtgcttgatgtttgcatgttgcattgcgataagacgtggatcatcattaatgtattcttattctcagacattgcgttctgggctcggatggaattgtgcttagtttgggacgtttttatggctatgcttggttcagcgtctggggtgcttatagtcgccagaagatggaagccaaaccaaacacctggcttctggtggatgcgctttcgctcgcagcccctttagcactggccgtgagaatcggcctgaagcccg

SEQ ID NO: 48806 - DNA, 1201 bp, Zea Mays
aacacattttgtatataagttattatgttattagatgtcaccgttggaacgcacaggtactcacctatcttttaaaatgaaccaccgtctccctccaacctaactcaaaaaatatctctactacttattaaatcaacaaaaataggctgcctttcctacttaatctacaacttccgtgttactgcccgcacgtcttatcctcggccattgtccatcacaattcacaaccccactctcgatcctcgccctctcgagaccaccgaccgctcgtcctcatcccgtcatccgtgcccgcatctccgcagtcgtcgccagtcgccaccgctatccgagctcccccccccccccctccatgccgcactatggctcttgcctcgaatccgcccactccccacatcgagaacagccatcgacgccgcaagaggagacgcacccaagagagaggaggaggaactaacgatagccatcgccatggccaccgacgacgactgataggactgcctcttcttcatcgatgtggtaacgacagaaatcaagtaatggggacggggctctccaggccatgcgggtcaaacgactggaacacgtccccttagcctccgaacgggaaccccgggctggagctctacagcgagaagaccaagcttgctgaagggccgcaggcttggaacatctagattttgttttgctaaggggagcgctatgtgagggtgggcaggttgctcaggtcaagtgggttcacggctgcgagcttcatggagagactattgatagcagttgtgtcctgcatcattctttgatcaagattgatgagggaaagatcagtatgccgaggatgggaccgggttgtagcttgcgatgctagatctgctcatcatgaaacccatcatgactaatgcatttatctgccatttaagtgtacaccagattatttgtatgtttgctgcttactatgcaaaatggcagctaaaagaagccctaaagcatgcgagctgcacctctaccggtttagtggccaaactggctgttactacgtttcagggtttggaatgttttccagcatgcattaaattactgttaacatatgattttagaatacaagtttttagacatgtgttgtgtatttggctgtatgttaaattgtaaacaaaaaactcttagtcgttgtactctaaccttgaatttatttgatagatttttc

SEQ ID NO: 48807 - DNA, 1251 bp, Zea Mays
caaaaataggctgcctttcctacttaatctacaacttccgtgttactgcccgcacgtcttatcctcggccattgtccatcacaattcacaaccccactctcgatcctcgccctctcgagaccaccgaccgctcgtcctcatcccgtcatccgtgcccgcatctccgcagtcgtcgccagtcgccaccgctatccgagctcccccccccccccctccatgccgcactatggctcttgcctcgaatccgcccactccccacatcgagaacagccatcgacgccgcaagaggagacgcacccaagagagaggaggcgaccatgagggccaaggtatactccacccatctcccttcctacttctcgcgcctactacctcatctcttagatccatgtggcatatcgccctgctggtgctcccggcgttggcccaggtcccgaagcgggagggttggtgggggaggaggaactaacgatagccatcgccatggccaccgacgacgactgataggactgcctcttcttcatcgatgtggtaacgacagaaatcaagtaatggggacggggctctccaggccatgcgggtcaaacgactggaacacgtccccttagcctccgaacgggaaccccgggctggagctctacagcgagaagaccaagcttgctgaagggccgcaggcttggaacatctagattttgttttgctaaggggagcgctatgtgttgctcaggtcaagtgggttcacggctgcgagcttcatggagagactattgatagcaggtttctttattttcatgggaaaagtacatgtttctattgtgccttcgtacattcatagttgaggtttaatgtacatgccttctctattatattttagttaagatactcaagcaacaatgcctaaaagctcttactgaattactcgttgttgtgtttgtagttgtgtcctgcatcattctttgatcaagattgatgagggaaagatcagtatgccgaggatgggaccgggttgtagcttgcgatgctagatctgctcatcatgaaacccatcatgactaatgcatttatctgccatttaagtgtacaccagattatttgtatgtttgctgcttactatgcaaaatggcagctaaaagaagccctaaagcatgcgagctgcacctctaccggtttagtggccaaactggctgttactacgtttcaggtactgaatactgctcagcatgtcgttcaagtctgtattccaattcttcc

SEQ ID NO: 48808 - DNA, 1304 bp, Zea Mays
ccattgtccatcacaattcacaaccccactctcgatcctcgccctctcgagaccaccgaccgctcgtcctcatcccgtcatccgtgcccgcatctccgcagtcgtcgccagtcgccaccgctatccgagctcccccccccccccctccatgccgcactatggctcttgcctcgaatccgcccactccccacatcgagaacagccatcgacgccgcaagaggagacgcacccaagagagaggaggcgaccatgagggccaaggtatactccacccatctcccttcctacttctcgcgcctactacctcatctcttagatccatgtggcatatcgccctgctggtgctcccggcgttggcccaggtcccgaagcgggagggttggtgggggaggaggaactaacgatagccatcgccatggccaccgacgacgactgataggactgcctcttcttcatcgatgtggtaacgacagaaatcaagtaatggggacggggctctccaggccatgcgggtcaaacgactggaacacgtccccttagcctccgaacgggaaccccgggctggagctctacagcgagaagaccaagcttgctgaagggccgcaggcttggaacatctagattttgttttgctaaggggagcgctatgtgttgctcaggtcaagtgggttcacggctgcgagcttcatggagagactattgatagcagttgtgtcctgcatcattctttgatcaagattgatgagggaaagatcagtatgccgaggatgggaccgggttgtagcttgcgatgctagatctgctcatcatgaaacccatcatgactaatgcatttatctgccatttaagtgtacaccagattatttgtatgtttgctgcttactatgcaaaatggcagctaaaagaagccctaaagcatgcgagctgcacctctaccggtttagtggccaaactggctgttactacgtttcaggtgttttatctgtaacttttattttgttctttttcttgttactcacttatttctgaataattaagtatatatgtcacttaatttagtgctagaatgcagatctggcatgtttgggaactaacctgcactattggttgttttttgcttcttggtggaccattttatctatagggtttggaatgttttccagcatgcattaaattactgttaacatatgattttagaatacaagtttttagacatgtgttgtgtatttggctgtatgttaaattgtaaacaaaaaactcttagtcgttgtactctaaccttgaatttatttgatagatttttc

SEQ ID NO: 48809 - DNA, 1112 bp, Zea Mays
ccattgtccatcacaattcacaaccccactctcgatcctcgccctctcgagaccaccgaccgctcgtcctcatcccgtcatccgtgcccgcatctccgcagtcgtcgccagtcgccaccgctatccgagctcccccccccccccctccatgccgcactatggctcttgcctcgaatccgcccactccccacatcgagaacagccatcgacgccgcaagaggagacgcacccaagagagaggaggcgaccatgagggccaaggtatactccacccatctcccttcctacttctcgcgcctactacctcatctcttagatccatgtggcatatcgccctgctggtgctcccggcgttggcccaggtcccgaagcgggagggttggtgggggaggaggaactaacgatagccatcgccatggccaccgacgacgactgataggactgcctcttcttcatcgatgtggtaacgacagaaatcaagtaatggggacggggctctccaggccatgcgggtcaaacgactggaacacgtccccttagcctccgaacgggaaccccgggctggagctctacagcgagaagaccaagcttgctgaagggccgcaggcttggaacatctagattttgttttgctaaggggagcgctatgtgagggtgggcaggttgctcaggtcaagtgggttcacggctgcgagcttcatggagagactattgatagcagttgtgtcctgcatcattctttgatcaagattgatgagggaaagatcagtatgccgaggatgggaccgggttgtagcttgcgatgctagatctgctcatcatgaaacccatcatgactaatgcatttatctgccatttaagtgtacaccagattatttgtatgtttgctgcttactatgcaaaatggcagctaaaagaagccctaaagcatgcgagctgcacctctaccggtttagtggccaaactggctgttactacgtttcagagctctctgaagaagtggacatcgaagagaaatttgctccagtacctgaatacccattggtggggttccatctaactagttatctagcagaaggcttttggatctcctctgcaacaaaggattttgg

SEQ ID NO: 48810 - DNA, 1062 bp, Zea Mays
ccattgtccatcacaattcacaaccccactctcgatcctcgccctctcgagaccaccgaccgctcgtcctcatcccgtcatccgtgcccgcatctccgcagtcgtcgccagtcgccaccgctatccgagctcccccccccccccctccatgccgcactatggctcttgcctcgaatccgcccactccccacatcgagaacagccatcgacgccgcaagaggagacgcacccaagagagaggaggcgaccatgagggccaaggtatactccacccatctcccttcctacttctcgcgcctactacctcatctcttagatccatgtggcatatcgccctgctggtgctcccggcgttggcccaggtcccgaagcgggagggttggtgggggaggaggaactaacgatagccatcgccatggccaccgacgacgactgataggactgcctcttcttcatcgatgtggtaacgacagaaatcaagtaatggggacggggctctccaggccatgcgggtcaaacgactggaacacgtccccttagcctccgaacgggaaccccgggctggagctctacagcgagaagaccaagcttgctgaagggccgcaggcttggaacatctagattttgttttgctaaggggagcgctatgtgagggtgggcaggttgctcaggtcaagtgggttcacggctgcgagcttcatggagagactattgatagcaggtttctttattttcatgggaaaagtacatgtttctattgtgccttcgtacattcatagttgaggtttaatttgtgtcctgcatcattctttgatcaagattgatgagggaaagatcagtatgccgaggatgggaccgggttgtagcttgcgatgctagatctgctcatcatgaaacccatcatgactaatgcatttatctgccatttaagtgtacaccagattatttgtatgtttgctgcttactatgcaaaatggcagctaaaagaagccctaaagcatgcgagctgcacctctaccggtttagtggccaaactggctgttactacgtttcagtttaacc

SEQ ID NO: 48811 - DNA, 1863 bp, Zea Mays
ctcgaatccgcccactccccacatcgagaacagccatcgacgccgcaagaggagacgcacccaagagagaggaggcgaccatgagggccaaggtatactccacccatctcccttcctacttctcgcgcctactacctcatctcttagatccatgtggcatatcgccctgctggtgctcccggcgttggcccaggtcccgaagcgggagggttggtgggggaggaggaactaacgatagccatcgccatggccaccgacgacgactgataggactgcctcttcttcatcgatgtggtaacgacagaaatcaagtaatggggacggggctctccaggccatgcgggtcaaacgactggaacacgtccccttagcctccgaacgggaaccccgggctggagctctacagcgagaagaccaagcttgctgaagggccgcaggcttggaacatctagattttgttttgctaaggggagcgctatgtgagggtgggcaggttgctcaggtcaagtgggttcacggctgcgagcttcatggagagactattgatagcagttgtgtcctgcatcattctttgatcaagattgatgagggaaagatcagtatgccgaggatgggaccgggttgtagcttgcgatgctagatctgctcatcatgaaacccatcatgactaatgcatttatctgccatttaagtgtacaccagattatttgtatgtttgctgcttactatgcaaaatggcagctaaaagaagccctaaagcatgcgagctgcacctctaccggtttagtggccaaactggctgttactacgtttcagaagtaataaagctatgattaaggaacgattcttgttcatggagatcgatgcactgctacatgattttgggaataaaatcaacttgaattctcgggtgcagtaactttgaagaccatcactcgctgaaaaaatttccttcttggagatcgatgcgatactgcactgaatcagaataaaatcaatggtgaatttgctgtcagtttgctacattggtcggtgggaagttgtctatctgtttcttctatcggcgaataccacctatccgctatccttgttcaccgcttcacggtacaatgccacgcaactgcttgccgcctttgcatcaccacgccatttaccgttcctttctcatcgtccagaggctgttcaacgcttggaagcctccctctctcatgcacgcagcctttgctcccaacttgtgaacgtcgctgcctccttattcctgtgacgcacggtgtttagaggctcccagcgctcgatcgctcgtcgcgtccttgctacagcaccgaccggtcgtctctagggccctcgccctcctacttccttgcgtcgagccgccatcctttccactgcgcccagccactctccatcactaaccctggccgtggctcacccaggtctggcgtctccctgttctcgcctcgtccttgtgctcgtggtcgacctgcaccgtcacccagttcaccggtgtcatcggcgcacgcctccctcaccaacgatagcaacttcgccagtgtcgtcttctccaaccttcgcatgttcctgcagctagacgtcgcatcgttcctgctccctgccgcagttttccctggcatgctcggactcattcgggcgccgacctggactcatccgggcgccgacctcctccacgctacgctcaggacatcgtcggcgccgtctggccatgcttgtcgcgctgcacgtcttcatgttcctctgcgtcgatctcgcttcgccgaagcaacagcaacaccagcgtcgtctcccagcttgggttcgtgaatttcctcgtcgaaccggcatcgtgtcgtcacctggtagtgtaga

SEQ ID NO: 48812 - DNA, 869 bp, Zea Mays
cccacatcgagaacagccatcgacgccgcaagaggagacgcacccaagagagaggaggcgaccatgagggccaaggtatactccacccatctcccttcctacttctcgcgcctactacctcatctcttagatccatgtggcatatcgccctgctggtgctcccggcgttggcccaggtcccgaagcgggagggttggtgggggaggaggaactaacgatagccatcgccatggccaccgacgacgactgataggactgcctcttcttcatcgatgtggtaacgacagaaatcaagtaatggggacggggctctccaggccatgcgggtcaaacgactggaacacgtccccttagcctccgaacgggaaccccgggctggagctctacagcgagaagaccaagcttgctgaagggccgcaggcttggaacatctagattttgttttgctaaggggagcgctatgtgagggtgggcaggttgctcaggtcaagtgggttcacggctgcgagcttcatggagagactattgatagcagttgtgtcctgcatcattctttgatcaagattgatgagggaaagatcagtatgccgaggatgggaccgggttgtagcttgcgatgctagatctgctcatcatgaaacccatcatgactaatgcatttatctgccatttaagtgtacaccagattatttgtatgtttgctgcttactatgcaaaatggcagctaaaagaagccctaaagcatgcgagctgcacctctaccggtttagtggccaaactggctgttactacgtttcaggcgaatggtgtgttaaacacagtttcagtaacagaagaagttcagattttagtgaatgtcgatgttattg

SEQ ID NO: 48813 - DNA, 1144 bp, Zea Mays
agaacagccatcgacgccgcaagaggagacgcacccaagagagaggaggcgaccatgagggccaaggtatactccacccatctcccttcctacttctcgcgcctactacctcatctcttagatccatgtggcatatcgccctgctggtgctcccggcgttggcccaggtcccgaagcgggagggttggtgggggaggaggaactaacgatagccatcgccatggccaccgacgacgactgataggactgcctcttcttcatcgatgtggtaacgacagaaatcaagtaatggggacggggctctccaggccatgcgggtcaaacgactggaacacgtccccttagcctccgaacgggaaccccgggctggagctctacagcgagaagaccaagcttgctgaagggccgcaggcttggaacatctagattttgttttgctaaggggagcgctatgtgagggtgggcaggttgctcaggtcaagtgggttcacggctgcgagcttcatggagagactattgatagcaggtttctttattttcatgggaaaattgtgtcctgcatcattctttgatcaagattgatgagggaaagatcagtatgccgaggatgggaccgggttgtagcttgcgatgctagatctgctcatcatgaaacccatcatgactaatgcatttatctgccatttaagtgtacaccagattatttgtatgtttgctgcttactatgcaaaatggcagctaaaagaagccctaaagcatgcgagctgcacctctaccggtttagtggccaaactggctgttactacgtttcaggtgttttatctgtaacttttattttgttctttttcttgttactcacttatttctgaataattaagtatatatgtcacttaatttagtgctagaatgcagatctggcatgtttgggaactaacctgcactattggttgttttttgcttcttggtggaccattttatctatagggtttggaatgttttccagcatgcattaaattactgttaacatatgattttagaatacaagtttttagacatgtgttgtgtatttggctgtatgttaaattgtaaacaaaaaactcttagtcgttgtactctaaccttgaatttatttgatagatttttc

SEQ ID NO: 48814 - DNA, 2207 bp, Zea Mays
gaattcgttcttcatctgaccacgaaagtacagtcatgaagaggaagatgaagaggaaaatcagcgatcattgctaaggagaacaacaatcgggaatggcccctcccgaatcattatatgattggacccgtgaaaatgatttgggaatatcaaatcaaggaagccctgaccaagttttctctagaggacactggcgccttgtcagatgccagaatggcctccgcatttttgaggagctccaagatgttgattaccttgcaagaagttgtagcagagcaatgaaggctgttggtgtggttgaagcctcctgtgaagctatatttcagcttgttatgagcatggatacttcacgttttgagtgggactgcagctttcagtatggtagtctggtagaggaggttgatggccacactgcaatactataccataggctgcagctggattggttcccaatgtttgtttggcctcgtgatctttgttatgtgcgctattggcggcgcaatgatgatggaagctatgttgtgttgtttcaatccagagagcaccaaaactgtggtccacaaccaggatttgtaagggcacatattgagagtggtggcttcaacatttctcccctgaaatcccgtaatggaagaatccgaacacaagtgcagcatcttatgcagatagatttgaagggctggggggttggttatgtaccttcatttcagcagcattgcctacttcatatgctgaacagtgttgctgggctcagggaatggttttcacaaagtgatgagagtcaagtgcttcctaggattcctgttatggtcaacatgactcaatctgtttcttccaagaaaggcagaaaagcacaagagagtactacacaaaccggcattcagatggatccaagcagacattccacagttcttgaggaggagtctgatgaagatgacgaatttctgatacctgaatctgaaccagagccatcaaatcttgaggatgctgcagatgttaggaagtcagggcgcaatgaagaggattcagatctgattgatttatctgggttttctgggaatttacgtcgggatgaccgtgatagcagtcgtgactgctggagaatgtctgatggaaataatttcagagttcgaagcaagaattttgtatatgataaaagcaagattcctgcaggaaagcctcttatggagcttgtcgctgttgactggtttaaagatgcaaagcgaatggatcatgttgctagaagaaaaggctgtgcagttcaagtagcggctgagaaggggctctttgcattggctataaatctacaagttcctggcactacaaactacagtatggttttctactttgttacgaagaaactgataccaaactccttattgcaacgctttgtggatggtgatgacgaatttcggaatagtaggttcaagttgataccatcagttcctaagggctcatggattgttcgacaaagtgttggcagcactccttgtctattaggaaaagctgttgacattacctatatacgtggctcaaattatttagaaatagatgtggatattggctcgtctacagtggcgaatggagtcttggggcttgtgtgcggtgtcataacgacactagttgtcgatatggctttccttgtccaggctaatacatacgacgagctcccagaaaggctgattggggcagttcgtatgtcgcatattgagctgtcatctgcaatagttcccgtgctcgaggattaatcataatacgcgatactgcatgcattgggcccgacaggattatgccggtctgctgagatcactgacagtgtacacaatgtagtaggaaacatagttctcgacttctcgtgtcatcttcctgaggacctttctatgcgatcatgcatgcattgcgtatttagacgtgaactatgtaggctttagaatgggttgtgttggggaaaagaaaggagagataagaagaggtaggaatagaggcactagtgacccaaactgaggtttcaataaatggtacgtacatgcttaacttgagagaccacaccattcttcattgatagtatttcccttgtgtgtaatgttgtgacagccgtatccctgatatgtatttatgtaactcaaaagtgtttattggaatcttttgactactataaggttggttggtgccgcgtttctcgaaatgatttcctgttcctgagataa

SEQ ID NO: 48815 - DNA, 2210 bp, Zea Mays
gaattcgttcttcatctgaccacgaaagtcagtacagtcatgaagaggaagatgaagaggaaaatcagcgatcattgctaaggagaacaacaatcgggaatggcccctcccgaatcattatatgattggacccgtgaaaatgatttgggaatatcaaatcaaggaagccctgaccaagttttctctagaggacactggcgccttgtcagatgccagaatggcctccgcatttttgaggagctccaagatgttgattaccttgcaagaagttgtagcagagcaatgaaggctgttggtgtggttgaagcctcctgtgaagctatatttcagcttgttatgagcatggatacttcacgttttgagtgggactgcagctttcagtatggtagtctggtagaggaggttgatggccacactgcaatactataccataggctgcagctggattggttcccaatgtttgtttggcctcgtgatctttgttatgtgcgctattggcggcgcaatgatgatggaagctatgttgtgttgtttcaatccagagagcaccaaaactgtggtccacaaccaggatttgtaagggcacatattgagagtaaggaaattgttctgatgaattcactacgacacaatcatttgcaacttgtgtttatttatagcgagttgccgagttagcaaccaggtggtggcttcaacatttctcccctgaaatcccgtaatggaagaatccgaacacaagtgcagcatcttatgcagatagatttgaagggctggggggttggttatgtaccttcatttcagcagcattgcctacttcatatgctgaacagtgttgctgggctcagggaatggttttcacaaagtgatgagagtcaagtgcttcctaggattcctgttatggtcaacatgactcaatctgtttcttccaagaaaggcagaaaagcacaagagagtactacacaaaccggcattcagatggatccaagcagacattccacagttcttgaggaggagtctgatgaagatgacgaatttctgatacctgaatctgaaccagagccatcaaatcttgaggatgctgcagatgttaggaagtcagggcgcaatgaagaggattcagatctgattgatttatctgggttttctgggaatttacgtcgggatgaccgtgatagcagtcgtgactgctggagaatgtctgatggaaataatttcagagttcgaagcaagaattttgtatatgataaaagcaagattcctgcaggaaagcctcttatggagcttgtcgctgttgactggtttaaagatgcaaagcgaatggatcatgttgctagaagaaaaggctgtgcagttcaagtagcggctgagaaggggctctttgcattggctataaatctacaagttcctggcactacaaactacataggttcaagttgataccatcagttcctaagggctcatggattgttcgacaaagtgttggcagcactccttgtctattaggaaaagctgttgacattacctatatacgtggctcaaattatttagaaatagatgtggatattggctcgtctacagtggcgaatggagtcttggggcttgtgtgcggtgtcataacgacactagttgtcgatatggctttccttgtccaggctaatacatacgacgagctcccagaaaggctgattggggcagttcgtatgtcgcatattgagctgtcatctgcaatagttcccgtgctcgaggattaatcataatacgcgatactgcatgcattgggcccgacaggattatgccggtctgctgagatcactgacagtgtacacaatgtagtaggaaacatagttctcgacttctcgtgtcatcttcctgaggacctttctatgcgatcatgcatgcattgcgtatttagacgtgaactatgtaggctttagaatgggttgtgttggggaaaagaaaggagagataagaagaggtaggaatagaggcactagtgacccaaactgaggtttcaataaatggtacgtacatgcttaacttgagagaccacaccattcttcattgatagtatttcccttgtgtgtaatgttgtgacagccgtatccctgatatgtatttatgtaactcaaaagtgtttattggaatcttttgactactataaggttggttggtgccgcgtttctcgaaatgatttcctgttcctgagataa

SEQ ID NO: 48816 - DNA, 2735 bp, Zea Mays
gaattcgttcttcatctgaccacgaaagtcagtacagtcatgaagaggaagatgaagaggaaaatcagcgatcattgctaaggagaacaacaatcgggaatggcccctcccgaatcattatatgattggacccgtgaaaatgatttgggaatatcaaatcaaggaagccctgaccaagttttctctagaggacactggcgccttgtcagatgccagaatggcctccgcatttttgaggagctccaagatgttgattaccttgcaagaagttgtagcagagcaatgaaggctgttggtgtggttgaagcctcctgtgaagctatatttcagcttgttatgagcatggatacttcacgttttgagtgggactgcagctttcagtatggtagtctggtagaggaggttgatggccacactgcaatactataccataggctgcagctggattggttcccaatgtttgtttggcctcgtgatctttgttatgtgcgctattggcggcgcaatgatgatggaagctatgttgtgttgtttcaatccagagagcaccaaaactgtggtccacaaccaggatttgtaagggcacatattgagagtaaggaaattgttctgatgaattcactacgacacaatcatttgcaacttgtgtttatttatagcgagttgccgagttagcaaccaggtggtggcttcaacatttctcccctgaaatcccgtaatggaagaatccgaacacaagtgcagcatcttatgcagatagatttgaagggctggggggttggttatgtaccttcatttcagcagcattgcctacttcatatgctgaacagtgttgctgggctcagggaatggttttcacaaagtgatgagagtcaagtgcttcctaggattcctgttatggtcaacatgactcaatctgtttcttccaagaaaggcagaaaagcacaagagagtactacacaaaccggcattcagatggatccaagcagacattccacagttcttgaggaggagtctgatgaagatgacgaatttctgatacctgaatctgaaccagagccatcaaatcttgaggatgctgcagatgttaggaagtcagggcgcaatgaagaggattcagatctgattgatttatctgggttttctgggaatttacgtcgggatgaccgtgatagcagtcgtgactgctggagaatgtctgatggaaataatttcagagttcgaagcaagaattttgtatatgataaaagcaagattcctgcaggaaagcctcttatggagcttgtcgctgttgactggtttaaagatgcaaagcgaatggatcatgttgctagaagaaaaggctgtgcagttcaagtgagttcatgtttgaatcctgatatcattagctagtgtctaatacaaggaagaatggaaatgaataacaccctcttctaagttttttttaacacggagaagcaaaccctctaattttgggtctgatctgttcttattagtgcttgtggaagtccatgttgataggcacataaaacgatgcttggatatagccatagttgctgagagccagggttgcacttgtatgtggagttagtgtagcatcatgagttgcaccaagagccatgttttgttcttccttatcagatttagcttttctgtgtatatatttaagaatccttgcttagcattttttttaccttttgtgtttaaccatgaatgtgtttgatgtggtgaagctcagttcctgctaagtccttactttttccccatttgataatattatacttgggttccaggtagcggctgagaaggggctctttgcattggctataaatctacaagttcctggcactacaaactacagtatggttttctactttgttacgaagaaactgataccaaactccttattgcaacgctttgtggatggtgatgacgaatttcggaatagtaggttcaagttgataccatcagttcctaagggctcatggattgttcgacaaagtgttggcagcactccttgtctattaggaaaagctgttgacattacctatatacgtggctcaaattatttagaaatagatgtggatattggctcgtctacagtggcgaatggagtcttggggcttgtgtgcggtgtcataacgacactagttgtcgatatggctttccttgtccaggctaatacatacgacgagctcccagaaaggctgattggggcagttcgtatgtcgcatattgagctgtcatctgcaatagttcccgtgctcgaggattaatcataatacgcgatactgcatgcattgggcccgacaggattatgccggtctgctgagatcactgacagtgtacacaatgtagtaggaaacatagttctcgacttctcgtgtcatcttcctgaggacctttctatgcgatcatgcatgcattgcgtatttagacgtgaactatgtaggctttagaatgggttgtgttggggaaaagaaaggagagataagaagaggtaggaatagaggcactagtgacccaaactgaggtttcaataaatggtacgtacatgcttaacttgagagaccacaccattcttcattgatagtatttcccttgtgtgtaatgttgtgacagccgtatccctgatatgtatttatgtaactcaaaagtgtttattggaatcttttgactactataaggttggttggtgccgcgtttctcgaaatgatttcctgttcctgagataa

SEQ ID NO: 48817 - DNA, 3368 bp, Zea Mays
ccaagattccggctcacgacggtgccaggtgcccttgctctagcgccgactcatccggtggcgagacaggggcctgaatgaagtgaagctcgtggtgggctgggttacgtatgccaatgggcgcgcttcaggtgatgctcctccgcttggtgctgctcgccgcgtccgccgcgacgacggctgtcacggtcacggccgcgccgccgcccagtgaggtggcagtgggcgcactcttcacctacgactccaccattggccgcgccgcgcgcctcgccattgagctcgccgtcgacgacgtcaacgccgaccgcaccgtcctcgccgggacccgcctcaacttgctcgcccaggacaccaactgcagcggctttcttggcgccgtcgaagcattgcagctaatggaaagaaatgtggttgctgttattggcccacaatcctccgggataggccatgtcatctcccatgttgttaatgagctacatgtacctcttctgtcatttgcggccacagatccaactctttctgcatcggagtatccttacttcataaggacaaccataagtgactacttccaaatgaatgccgttgctagcattgttgattactatcagtggaaagaggtgacggctatattcgttgatgatgattatgggcgaggtggtgtgtcggcccttggtgatgcgcttgcagcaaaaagggcgaggatttcatataaagcagctatccctcccaattcaaatacagatgtgatcaatgatgtactgtttaaagcaaatatgatggaatcaagggtcatggttgtgcatgtcaatcctgacacagggacgagaatattttctgttgctaacaagctccagatgatggccactggctatgtctggatagtaactgattggctagctgctgtcttggattcctcgacgtcaagagatcgtaaagaaatgagtcatattcagggactaattgttctgcgccagcacactcctgaatctgttgccaagaataagttcatatcaaaatggaataatgctgctcgtaatagaagtattacttcgggcttgaactcgtatggtttctatgcttatgactcagtttgggccattgctcgtggtgtcgatcaatttctcaataatgggcagcagatcaacttttctacagatccagtattgcacgatactaatggtagtagtttgcatctatcaactctcaagatatttgatggcggtgagcagatgctacagcaacttctgctcacaaattttacaggcctaactggtcgagtccaatttaattcagatcgcaatttggtgcacccagcatatgacatccttaacatcggtggttctggctcccggttgattggctattggtccaattactcaggcctctctgttgctgcacctgaaatattgtatcagaagccaccagatacttcttcaattgctcagcggctccacaatgtggtttggccgggtgattccacaaccactcctaaagggtgggttttcccgaacaatggccagccgctgcgggttggtgtcccaatcaagccaagctttaaggaattagtggcagctggaaaaggccctgataatgtgactggttattgcattgatatattcaacgcagcaattagactgcttccttaccccgttccatgtcaattcatagcaattggggatggtagaaagaaccctaactacgacgacattattagtatggttgctgccaatctgtaggcgactttgctattgtgagaaacagaacaaagattgcagaattcacacagccttatattgagtcagggcttgtgatagtagcgccagtgaaacaagcaacttcaagtgcctgggctttcctcaaaccgttcacattggagatgtggtgtgtaactggtgctctttttatttttgtggggatagttgtctggattcttgaacatcggagtaatgaggagtttcgaggatctccacgacgacaacttataacaatattttggtttagtttctcaacaatgttcttttcacacagacagaacactgtaagcgcgctagggcggtttgtgttgatcatatggctcttcgttgtgctgatcatcaattcaagttatactgccagcttgacgtcaatcctcacagtccaacagctcgcaacaggaataactgggatcgatagtttgatttcaagtggtttacctattggatatcaggctggaaaatttaccagaaattacctgattgaagagctcaatattcctgagtctcgattggtaccactaaatacaatccaggagtatgctgatgcccttaagcgtggaccaaaagatggtggtgttgttgcaattgttgatgagatgccctatgttgagatcttcctgtcataccactgcaatttcagaatagtgggacaggagttcaccaaggagggatggggttttgcattcaagagagacttcccccttgctgcggacttgtcgacagccatccttcaactctcagagagtggtcagcttcagagaattcatgacgagtggttcacccggcctagttgctcctctgatgacagcgaagtgggggcaaccaggcttggcctcggaagcttttggggccttttcctcgtgtgtgccctgatatgcctcttggctttgctggtgtttttcatacggatatgctggcagtataacaagtactccaattctgaagctgctggtgagcccagtgcagcagcagctgctgctgcagcagtagatgctgctgctgccgccgccgatgctgtcgaaagacagaggaggccatcacgtcttggcagcttcaaagatattatacagtttgtcgacaaaaaggaggaggaaattaagaagacgatgaaacgaagagtaagtgagaaagacaataaccaagctgcaggatcctcagaagctcattcagtggcttcagcatagaacattctttccaactcctgtccttcacaaggcaaaacaaggaagcacatatacgataggaaaaagtcaaaattacttccctctactatgaacgatgtccatatagcccctaaaatattttttagtttaatttacctctccatatgtttgaattggttcaatttatcccttaacaaattttttctcttttttatttcttcatgtataaactgagtttgaggttcaaattttgttcgttagtagttaagtcataacttagcctaaacaaatattgtgttttttcataattattttggtaggtcaaagataaaaactttaatggtacaaaactaaatgtgaaataatgataaattttcttaacttatttttctaatactccctcagtttcaatttataattcgtgtgacttttttaccctaagtttgag

SEQ ID NO: 48818 - DNA, 286 bp, Zea Mays
gccttcctgccctttatttaagtgctggttcggtgaagatttccctctgccctggtgttctagccaaagcttgcagtggtgtgagggattcatgtgtattgcaagccaaagctcctctcccactgccaccaagttggcactgtccagagctgtgtgcgctgtcttcctgtgtttgtgatgaccacaaccaccaagttcaccccaccatagccagaacattctagggagttgctggcctatatgaagcttgttccgtaatcatctcagaactcctaccagaaggagt

SEQ ID NO: 48819 - DNA, 1838 bp, Zea Mays
caagcttgacgtgccgtccggtcccgtccatcggaggctcaggctcctctgatcttgacgtgcaggtcagatggcagctagcacagtaacagcgcgatcgaacaacagagaaaagcagaaccactcaaccacacacagtgctcgttcgcaggctcacctcaacacggccgtccgatggcgacggctactgtgccgtcccctgacaacggtcacgacaaggctaccacgtcatcctcacctcaccggttggctggcgctggccatagccgtcgtcttctctctagctagctaacccctcctcattccttgcgcacctcaaaaccagcgcctctcattcattcctcctctgctttcttcttcccaagcaacgtactaaccgatgcgactggcggttctggtgctcccggcggcggcggcggcgcccatcgtgctctagactagccaaaggcaagcgcttgggtggggattaatgatgggcggtgtggctcagttggtggtggtggctgcgctcttggccactgcggccgccgcgccgacggcggcggcggcgggggcactgccaagcgaggtggccgtgggcgccctcttcacgtacgactccacgattggccgcgccgcgcagctcgccatcgagctcgccgtcgacgacgttaacgcggacgacaaggtgctcgcgtggaccaagctcaacttggtgtctatggacaccaactgcagcggcttcctcggcaccatcaaaggttcagcttctccacaatgttcttctcacaccaggagaataccagaaccgcgctcgggcgtttcgtgttgatcatatggatgtttgtcgtgttgatcatcacttcaagctacactgccagtttgacgtcaatcctgacggtccaacagctcgcgacaggaattacaggccttgacagtctcatatcaagctctttacctattggataccagaccggaaaattcaccaagaaatacctgatgctaaacctcaacgttcctgagtctcgattggtgcaactgaacacgatcgaggaatacgctgatgcccttaaccgtggaccaaaaaatggtggggttgctgctattattgacgagaagccatatattgacatcttcctgtcacactactgcaacttcaagattgttggacagcagttcacaagggaaggatggggatttgcattccagaaagactccccccttgctgcagatatgtcgaccgccatccttcagctttcagagagtggccagcttcagagcatccatgacgagtggttcacacagccgagctgcgccaccaatgatgagagcaatgtgggtgcaaccaggcttggcctcggaagcttctgggggcttttcctcatctgtgccctgatctgtctcttcgctgtggtggtgttcttcatacgagtctgctggcagtacaagcagtactccaattctgaagatgctgacgagtccaatgaagctggcgctgatggtgctggcaaaagacagcggaagttgtcacgccttggcagcttccaggagattctaaagtttttcgacatgaaggaggaggaagtcatgaagagctcgatgaaacgacggccaggtgagaaagataaccatgctgctggattctagatgcgcaatcagtggcttcagcatagaacatgcatccccgatcgacttcaacgctattttttatacgacgatccgagaatctgtcttttatcacggttattagaattttgcaaagatatacatgcttgggaaaggctactcatgaccgctattttttatgattacctgaatttaattatgaagagtttactaatttacgagatttagtacag

SEQ ID NO: 48820 - DNA, 3226 bp, Zea Mays
attcattcctcctctgctttcttcttcccaagcaacgtactaaccgatgcgactggcggttctggtgctcccggcggcggcggcggcgcccatcgtgctctagactagccaaaggcaagcgcttgggtggggattaatgatgggcggtgtggctcagttggtggtggtggctgcgctcttggccactgcggccgccgcgccgacggcggcggcggcgggggcactgccaagcgaggtggccgtgggcgccctcttcacgtacgactccacgattggccgcgccgcgcagctcgccatcgagctcgccgtcgacgacgttaacgcggacgacaaggtgctcgcgtggaccaagctcaacttggtgtctatggacaccaactgcagcggcttcctcggcaccatcaaagctttggagctaatggagaaaaatgtagttgctgtgattggcccacaatcctctggaataggccatgccatctctcaagttgtcaatgagttacatgttcctctcctatcatttgcggcgacggatccaactctctctgcatcagagtatccttacttcttaaggacaaccacaagtgattatttccaaatgaatgctgttgctagcattgttgattactatcaatggaaaagggtgactgctgtatacatcgacgacgagtatgggcgaggtggcgtctcggctctcggtgatgcgcttgcattgaagagggcacaagtttcatataaagcaactattcctccaaattcaaacacagatgtgatccgtgatgtactgtttaaagcaaacatgatggaatcaagggtcatggttgtgcatgtcaatcctgacacgggtttgagggtattttctgcagctaagaagctccagatgatggccagtggctatgtctggatagtaactgattggctagctgctgtcctagattcttctgcatctagaaatcctaaatatatgagtaatattcagggagtaattgttttgcgtcagcacactcctgattctgatgccaagaacaagttcatatctagatggaacaatgtggctcgtaatagaagtatgactcctggactgaactcatacggtttctatgcttatgattcagtttgggctgttgctcgttctgtggatcaatttctcaatgctggaaaccagatcaacttctcaacagatccaaggctgcacgatccaaatggcaccactttgcgcctgtcaactctcaagatattcgatggtggtgaccagatgctgcagcagcttctcctcacaaacttcacaggtctaacaggtgcagtcaaatttgattcaggtggcaatttgctacacccagcatatgacatcctcaatgtcggtcgctctggcacccacttgatcggctattggtccaactattcaggcctttctgtggctgctcctgaaattctgtatcagatgtcaccaaatgcgtccacaagtacccatcagctgaacagtgtggtatggcctggtgactccactgatatacctagaggctgggtgttcccgaacgatggccagcctctaagagttggggtcccggttaaaccaagcttcaaggcattggtgtcaggcagcacccctgattctgtgaggggttactgcattgatgttttcaagtcagcaattaaactgctcccttacccagttccttaccagtttattcctattggggatggcacaaagaaccctagttatgtcagcatcgttgggatggttgcttccaatacacttgatgcagctgtaggcgactttgcgatagtgagaaatggaacacggcttgcagagtacacgcagccttacattgattcagggcttgtgatagtggcgccggtgaaacacataacctcaagcgcttgggctttccttaaacccttcacatgggagatgtggtttatcacaggcgctcttttcattttggtgggaattgtggtgtggctacttgagcatcggagtaatccagaatttcgaggccctccatgtaatcaagtcataacaatattctgggttcagcttctccacaatgttcttctcacaccgtaagtccactactagatgcctcggtgacatcaacttgcccatgatttttttttcactgcatcggtagaaacttcttgacgaaaaactctcaccttcagaggagaataccagaaccgcgctcgggcgtttcgtgttgatcatatggatgtttgtcgtgttgatcatcacttcaagctacactgccagtttgacgtcaatcctgacggtccaacagctcgcgacaggaattacaggccttgacagtctcatatcaagctctttacctattggataccagaccggaaaattcaccaagaaatacctgatgctaaacctcaacgttcctgagtctcgattggtgcaactgaacacgatcgaggaatacgctgatgcccttaaccgtggaccaaaaaatggtggggttgctgctattattgacgagaagccatatattgacatcttcctgtcacactactgcaacttcaagattgttggacagcagttcacaagggaaggatggggatttgcattccagaaagactccccccttgctgcagatatgtcgaccgccatccttcagctttcagagagtggccagcttcagagcatccatgacgagtggttcacacagccgagctgcgccaccaatgatgagagcaatgtgggtgcaaccaggcttggcctcggaagcttctgggggcttttcctcatctgtgccctgatctgtctcttcgctgtggtggtgttcttcatacgagtctgctggcagtacaagcagtactccaattctgaagatgctgacgagtccaatgaagctggcgctgatggtgctggcaaaagacagcggaagttgtcacgccttggcagcttccaggagattctaaagtttttcgacatgaaggaggaggaagtcatgaagagctcgatgaaacgacggccaggtgagaaagataaccatgctgctggattctagatgcgcaatcagtggcttcagcatagaacatgcatccccgatcgacttcaacgctattttttatacgacgatccgagaatctgtcttttatcacggttattagaattttgcaaagatatacatgcttgggaaaggctactcatgaccgctattttttatgattacctgaatttaattatgaagagtttactaatttacgagatttagtacag

SEQ ID NO: 48821 - DNA, 3119 bp, Zea Mays
actaaccgatgcgactggcggttctggtgctcccggcggcggcggcggcgcccatcgtgctctagactagccaaaggcaagcgcttgggtggggattaatgatgggcggtgtggctcagttggtggtggtggctgcgctcttggccactgcggccgccgcgccgacggcggcggcggcgggggcactgccaagcgaggtggccgtgggcgccctcttcacgtacgactccacgattggccgcgccgcgcagctcgccatcgagctcgccgtcgacgacgttaacgcggacgacaaggtgctcgcgtggaccaagctcaacttggtgtctatggacaccaactgcagcggcttcctcggcaccatcaaagctttggagctaatggagaaaaatgtagttgctgtgattggcccacaatcctctggaataggccatgccatctctcaagttgtcaatgagttacatgttcctctcctatcatttgcggcgacggatccaactctctctgcatcagagtatccttacttcttaaggacaaccacaagtgattatttccaaatgaatgctgttgctagcattgttgattactatcaatggaaaagggtgactgctgtatacatcgacgacgagtatgggcgaggtggcgtctcggctctcggtgatgcgcttgcattgaagagggcacaagtttcatataaagcaactattcctccaaattcaaacacagatgtgatccgtgatgtactgtttaaagcaaacatgatggaatcaagggtcatggttgtgcatgtcaatcctgacacgggtttgagggtattttctgcagctaagaagctccagatgatggccagtggctatgtctggatagtaactgattggctagctgctgtcctagattcttctgcatctagaaatcctaaatatatgagtaatattcagggagtaattgttttgcgtcagcacactcctgattctgatgccaagaacaagttcatatctagatggaacaatgtggctcgtaatagaagtatgactcctggactgaactcatacggtttctatgcttatgattcagtttgggctgttgctcgttctgtggatcaatttctcaatgctggaaaccagatcaacttctcaacagatccaaggctgcacgatccaaatggcaccactttgcgcctgtcaactctcaagatattcgatggtggtgaccagatgctgcagcagcttctcctcacaaacttcacaggtctaacaggtgcagtcaaatttgattcaggtggcaatttgctacacccagcatatgacatcctcaatgtcggtcgctctggcacccacttgatcggctattggtccaactattcaggcctttctgtggctgctcctgaaattctgtatcagatgtcaccaaatgcgtccacaagtacccatcagctgaacagtgtggtatggcctggtgactccactgatatacctagaggctgggtgttcccgaacgatggccagcctctaagagttggggtcccggttaaaccaagcttcaaggcattggtgtcaggcagcacccctgattctgtgaggggttactgcattgatgttttcaagtcagcaattaaactgctcccttacccagttccttaccagtttattcctattggggatggcacaaagaaccctagttatgtcagcatcgttgggatggttgcttccaatacacttgatgcagctgtaggcgactttgcgatagtgagaaatggaacacggcttgcagagtacacgcagccttacattgattcagggcttgtgatagtggcgccggtgaaacacataacctcaagcgcttgggctttccttaaacccttcacatgggagatgtggtttatcacaggcgctcttttcattttggtgggaattgtggtgtggctacttgagcatcggagtaatccagaatttcgaggccctccatgtaatcaagtcataacaatattctggttcagcttctccacaatgttcttctcacaccaaacttcttgacgaaaaactctcaccttcagaggagaataccagaaccgcgctcgggcgtttcgtgttgatcatatggatgtttgtcgtgttgatcatcacttcaagctacactgccagtttgacgtcaatcctgacggtccaacagctcgcgacaggaattacaggccttgacagtctcatatcaagctctttacctattggataccagaccggaaaattcaccaagaaatacctgatgctaaacctcaacgttcctgagtctcgattggtgcaactgaacacgatcgaggaatacgctgatgcccttaaccgtggaccaaaaaatggtggggttgctgctattattgacgagaagccatatattgacatcttcctgtcacactactgcaacttcaagattgttggacagcagttcacaagggaaggatggggatttgcattccagaaagactccccccttgctgcagatatgtcgaccgccatccttcagctttcagagagtggccagcttcagagcatccatgacgagtggttcacacagccgagctgcgccaccaatgatgagagcaatgtgggtgcaaccaggcttggcctcggaagcttctgggggcttttcctcatctgtgccctgatctgtctcttcgctgtggtggtgttcttcatacgagtctgctggcagtacaagcagtactccaattctgaagatgctgacgagtccaatgaagctggcgctgatggtgctggcaaaagacagcggaagttgtcacgccttggcagcttccaggagattctaaagtttttcgacatgaaggaggaggaagtcatgaagagctcgatgaaacgacggccaggtgagaaagataaccatgctgctggattctagatgcgcaatcagtggcttcagcatagaacatgcatccccgatcgacttcaacgctattttttatacgacgatccgagaatctgtcttttatcacggttattagaattttgcaaagatatacatgcttgggaaaggctactcatgaccgctattttttatgattacctgaatttaattatgaagagtttactaatttacgagatttagtacag

SEQ ID NO: 48822 - DNA, 2860 bp, Zea Mays
cctcgacgcccgccgccgcgtcgtcactgccatctgcactccctgctgccaccgccgcgtcgtcgccgccctccccgccgcctgcgcgttccacaccggcgccgcatgcaccctctccatgtccactgccatgtttaaccgctttggagctaatggagaaaaatgtagttgctgtgattggcccacaatcctctggaataggccatgccatctctcaagttgtcaatgagttacatgttcctctcctatcatttgcggcgacggatccaactctctctgcatcagagtatccttacttcttaaggacaaccacaagtgattatttccaaatgaatgctgttgctagcattgttgattactatcaatggaaaagggtgactgctgtatacatcgacgacgagtatgggcgaggtggcgtctcggctctcggtgatgcgcttgcattgaagagggcacaagtttcatataaagcaactattcctccaaattcaaacacagatgtgatccgtgatgtactgtttaaagcaaacatgatggaatcaagggtcatggttgtgcatgtcaatcctgacacgggtttgagggtattttctgcagctaagaagctccagatgatggccagtggctatgtctggatagtaactgattggctagctgctgtcctagattcttctgcatctagaaatcctaaatatatgagtaatattcagggagtaattgttttgcgtcagcacactcctgattctgatgccaagaacaagttcatatctagatggaacaatgtggctcgtaatagaagtatgactcctggactgaactcatacggtttctatgcttatgattcagtttgggctgttgctcgttctgtggatcaatttctcaatgctggaaaccagatcaacttctcaacagatccaaggctgcacgatccaaatggcaccactttgcgcctgtcaactctcaagatattcgatggtggtgaccagatgctgcagcagcttctcctcacaaacttcacaggtctaacaggtgcagtcaaatttgattcaggtggcaatttgctacacccagcatatgacatcctcaatgtcggtcgctctggcacccacttgatcggctattggtccaactattcaggcctttctgtggctgctcctgaaattctgtatcagatgtcaccaaatgcgtccacaagtacccatcagctgaacagtgtggtatggcctggtgactccactgatatacctagaggctgggtgttcccgaacgatggccagcctctaagagttggggtcccggttaaaccaagcttcaaggcattggtgtcaggcagcacccctgattctgtgaggggttactgcattgatgttttcaagtcagcaattaaactgctcccttacccagttccttaccagtttattcctattggggatggcacaaagaaccctagttatgtcagcatcgttgggatggttgcttccaatacacttgatgcagctgtaggcgactttgcgatagtgagaaatggaacacggcttgcagagtacacgcagccttacattgattcagggcttgtgatagtggcgccggtgaaacacataacctcaagcgcttgggctttccttaaacccttcacatgggagatgtggtttatcacaggcgctcttttcattttggtgggaattgtggtgtggctacttgagcatcggagtaatccagaatttcgaggccctccatgtaatcaagtcataacaatattctggttcagcttctccacaatgttcttctcacaccaggagaataccagaaccgcgctcgggcgtttcgtgttgatcatatggatgtttgtcgtgttgatcatcacttcaagctacactgccagtttgacgtcaatcctgacggtccaacagctcgcgacaggaattacaggccttgacagtctcatatcaagctctttacctattggataccagaccggaaaattcaccaagaaatacctgatgctaaacctcaacgttcctgagtctcgattggtgcaactgaacacgatcgaggaatacgctgatgcccttaaccgtggaccaaaaaatggtggggttgctgctattattgacgagaagccatatattgacatcttcctgtcacactactgcaacttcaagattgttggacagcagttcacaagggaaggatggggatttgcattccagaaagactccccccttgctgcagatatgtcgaccgccatccttcagctttcagagagtggccagcttcagagcatccatgacgagtggttcacacagccgagctgcgccaccaatgatgagagcaatgtgggtgcaaccaggcttggcctcggaagcttctgggggcttttcctcatctgtgccctgatctgtctcttcgctgtggtggtgttcttcatacgagtctgctggcagtacaagcagtactccaattctgaagatgctgacgagtccaatgaagctggcgctgatggtgctggcaaaagacagcggaagttgtcacgccttggcagcttccaggagattctaaagtttttcgacatgaaggaggaggaagtcatgaagagctcgatgaaacgacggccaggtgagaaagataaccatgctgctggattctagatgcgcaatcagtggcttcagcatagaacatgcatccccgatcgacttcaacgctattttttatacgacgatccgagaatctgtcttttatcacggttattagaattttgcaaagatatacatgcttgggaaaggctactcatgaccgctattttttatgattacctgaatttaattatgaagagtttactaatttacgagatttagtacag

SEQ ID NO: 48823 - DNA, 2738 bp, Zea Mays
tctccatgtccactgccatgtttaaccgctttggagctaatggagaaaaatgtagttgctgtgattggcccacaatcctctggaataggccatgccatctctcaagttgtcaatgagttacatgttcctctcctatcatttgcggcgacggatccaactctctctgcatcagagtatccttacttcttaaggacaaccacaagtgattatttccaaatgaatgctgttgctagcattgttgattactatcaatggaaaagggtgactgctgtatacatcgacgacgagtatgggcgaggtggcgtctcggctctcggtgatgcgcttgcattgaagagggcacaagtttcatataaagcaactattcctccaaattcaaacacagatgtgatccgtgatgtactgtttaaagcaaacatgatggaatcaagggtcatggttgtgcatgtcaatcctgacacgggtttgagggtattttctgcagctaagaagctccagatgatggccagtggctatgtctggatagtaactgattggctagctgctgtcctagattcttctgcatctagaaatcctaaatatatgagtaatattcagggagtaattgttttgcgtcagcacactcctgattctgatgccaagaacaagttcatatctagatggaacaatgtggctcgtaatagaagtatgactcctggactgaactcatacggtttctatgcttatgattcagtttgggctgttgctcgttctgtggatcaatttctcaatgctggaaaccagatcaacttctcaacagatccaaggctgcacgatccaaatggcaccactttgcgcctgtcaactctcaagatattcgatggtggtgaccagatgctgcagcagcttctcctcacaaacttcacaggtctaacaggtgcagtcaaatttgattcaggtggcaatttgctacacccagcatatgacatcctcaatgtcggtcgctctggcacccacttgatcggctattggtccaactattcaggcctttctgtggctgctcctgaaattctgtatcagatgtcaccaaatgcgtccacaagtacccatcagctgaacagtgtggtatggcctggtgactccactgatatacctagaggctgggtgttcccgaacgatggccagcctctaagagttggggtcccggttaaaccaagcttcaaggcattggtgtcaggcagcacccctgattctgtgaggggttactgcattgatgttttcaagtcagcaattaaactgctcccttacccagttccttaccagtttattcctattggggatggcacaaagaaccctagttatgtcagcatcgttgggatggttgcttccaatacacttgatgcagctgtaggcgactttgcgatagtgagaaatggaacacggcttgcagagtacacgcagccttacattgattcagggcttgtgatagtggcgccgacagtaaacatgatcccagacatgattttggtagtctacaaattatctgatcccagacatggaagcgaaatgggtgcatgcgacaccacaagcatgagttttgcacgggcgcatgcacccaaccaaacacacggttcagcttctccacaatgttcttctcacaccaaacttcttgacgaaaaactctcaccttcagaggagaataccagaaccgcgctcgggcgtttcgtgttgatcatatggatgtttgtcgtgttgatcatcacttcaagctacactgccagtttgacgtcaatcctgacggtccaacagctcgcgacaggaattacaggccttgacagtctcatatcaagctctttacctattggataccagaccggaaaattcaccaagaaatacctgatgctaaacctcaacgttcctgagtctcgattggtgcaactgaacacgatcgaggaatacgctgatgcccttaaccgtggaccaaaaaatggtggggttgctgctattattgacgagaagccatatattgacatcttcctgtcacactactgcaacttcaagattgttggacagcagttcacaagggaaggatggggatttgcattccagaaagactccccccttgctgcagatatgtcgaccgccatccttcagctttcagagagtggccagcttcagagcatccatgacgagtggttcacacagccgagctgcgccaccaatgatgagagcaatgtgggtgcaaccaggcttggcctcggaagcttctgggggcttttcctcatctgtgccctgatctgtctcttcgctgtggtggtgttcttcatacgagtctgctggcagtacaagcagtactccaattctgaagatgctgacgagtccaatgaagctggcgctgatggtgctggcaaaagacagcggaagttgtcacgccttggcagcttccaggagattctaaagtttttcgacatgaaggaggaggaagtcatgaagagctcgatgaaacgacggccaggtgagaaagataaccatgctgctggattctagatgcgcaatcagtggcttcagcatagaacatgcatccccgatcgacttcaacgctattttttatacgacgatccgagaatctgtcttttatcacggttattagaattttgcaaagatatacatgcttgggaaaggctactcatgaccgctattttttatgattacctgaatttaattatgaagagtttactaatttacgagatttagtacag

SEQ ID NO: 48824 - DNA, 2848 bp, Zea Mays
tccatgtccactgccatgtttaaccgctttggagctaatggagaaaaatgtagttgctgtgattggcccacaatcctctggaataggccatgccatctctcaagttgtcaatgagttacatgttcctctcctatcatttgcggcgacggatccaactctctctgcatcagagtatccttacttcttaaggacaaccacaagtgattatttccaaatgaatgctgttgctagcattgttgattactatcaatggaaaagggtgactgctgtatacatcgacgacgagtatgggcgaggtggcgtctcggctctcggtgatgcgcttgcattgaagagggcacaagtttcatataaagcaactattcctccaaattcaaacacagatgtgatccgtgatgtactgtttaaagcaaacatgatggaatcaagggtcatggttgtgcatgtcaatcctgacacgggtttgagggtattttctgcagctaagaagctccagatgatggccagtggctatgtctggatagtaactgattggctagctgctgtcctagattcttctgcatctagaaatcctaaatatatgagtaatattcagggagtaattgttttgcgtcagcacactcctgattctgatgccaagaacaagttcatatctagatggaacaatgtggctcgtaatagaagtatgactcctggactgaactcatacggtttctatgcttatgattcagtttgggctgttgctcgttctgtggatcaatttctcaatgctggaaaccagatcaacttctcaacagatccaaggctgcacgatccaaatggcaccactttgcgcctgtcaactctcaagatattcgatggtggtgaccagatgctgcagcagcttctcctcacaaacttcacaggtctaacaggtgcagtcaaatttgattcaggtggcaatttgctacacccagcatatgacatcctcaatgtcggtcgctctggcacccacttgatcggctattggtccaactattcaggcctttctgtggctgctcctgaaattctgtatcagatgtcaccaaatgcgtccacaagtacccatcagctgaacagtgtggtatggcctggtgactccactgatatacctagaggctgggtgttcccgaacgatggccagcctctaagagttggggtcccggttaaaccaagcttcaaggcattggtgtcaggcagcacccctgattctgtgaggggttactgcattgatgttttcaagtcagcaattaaactgctcccttacccagttccttaccagtttattcctattggggatggcacaaagaaccctagttatgtcagcatcgttgggatggttgcttccaatacacttgatgcagctgtaggcgactttgcgatagtgagaaatggaacacggcttgcagagtacacgcagccttacattgattcagggcttgtgatagtggcgccggtgaaacacataacctcaagcgcttgggctttccttaaacccttcacatgggagatgtggtttatcacaggcgctcttttcattttggtgggaattgtggtgtggctacttgagcatcggagtaatccagaatttcgaggccctccatgtaatcaagtcataacaatattctggttcagcttctccacaatgttcttctcacaccgtaagtccactactagatgcctcggtgacatcaacttgcccatgatttttttttcactgcatcggtagaaacttcttgacgaaaaactctcaccttcagaggagaataccagaaccgcgctcgggcgtttcgtgttgatcatatggatgtttgtcgtgttgatcatcacttcaagctacactgccagtttgacgtcaatcctgacggtccaacagctcgcgacaggaattacaggccttgacagtctcatatcaagctctttacctattggataccagaccggaaaattcaccaagaaatacctgatgctaaacctcaacgttcctgagtctcgattggtgcaactgaacacgatcgaggaatacgctgatgcccttaaccgtggaccaaaaaatggtggggttgctgctattattgacgagaagccatatattgacatcttcctgtcacactactgcaacttcaagattgttggacagcagttcacaagggaaggatggggatttgtatgcattccagaaagactccccccttgctgcagatatgtcgaccgccatccttcagctttcagagagtggccagcttcagagcatccatgacgagtggttcacacagccgagctgcgccaccaatgatgagagcaatgtgggtgcaaccaggcttggcctcggaagcttctgggggcttttcctcatctgtgccctgatctgtctcttcgctgtggtggtgttcttcatacgagtctgctggcagtacaagcagtactccaattctgaagatgctgacgagtccaatgaagctggcgctgatggtgctggcaaaagacagcggaagttgtcacgccttggcagcttccaggagattctaaagtttttcgacatgaaggaggaggaagtcatgaagagctcgatgaaacgacggccaggtgagaaagataaccatgctgctggattctagatgcgcaatcagtggcttcagcatagaacatgcatccccgatcgacttcaacgctattttttatacgacgatccgagaatctgtcttttatcacggttattagaattttgcaaagatatacatgcttgggaaaggctactcatgaccgctattttttatgattacctgaatttaattatgaagagtttactaatttacgagatttagtacag

SEQ ID NO: 48825 - DNA, 278 bp, Zea Mays
aaaatctttttaaaaacacaaggaaggggtaaatgcaccggggcttgtctggaataacactaggttagtgtttgttagacgacgtccacttggcgatcagccttttgtgttggcacttgttcaggcaggttcgtccattagcatcactacgcggagtagcccgcgcttggggtcaacttggttcgccttccgcatcgcgcgatcaattatcgtacctaattaaaatgcacgatacacatgaatgcatatagacaggaatagcacacgactaattgtcg

SEQ ID NO: 48826 - DNA, 1651 bp, Zea Mays
aagctaggtaatcattattagactaacaaaacataggcttagccttttcggacatctaaattcaggatacgactagaagcaacctaatcagctccctttttccggttaacccgcataacacactaaccgcgtaaaatatcaagaaaatgcttaactattttctcatactactacacatcgcacacaaagaactattttaattttatttcacgcctcacatattttatatgtcaacaattaatcaaacatttcaggtttgactaccaaaatatcctacaaaatcaacgatgacagccttatcagataatcgtttggattactaaatcaattcttcacgctattaattctccttacacattaattattttaaacttgagtttcacgtgacacgaccactttatacttatgtacacaatatattcatcaaaccaataattaagctgacaaaaatatgaatcggcttaccatactaaatctaacgcgttatccacgaacacagtaatggttctggttcagcccttgtgtcgagcactgggtaaacaccacgctgctagcttcgtcttcacccgactcttggaatttcttgacgatgtacagaatgatgacgagatcgataacacacacgcgtgatgaggcagggtctgtggagatgtgcgcaagggaaaatgagcttgtggtgccgagagtcgatggcgagcaggacgcggatcaaggggtttgcttgagagtcgagcagggaatgacgggttcgacgactcgatggtaaacgcgaacacgccgaaacctgatggataaggagcgagcgcacacggggcgagcagcacggatgggttgggctgggaccataggacgatgacgaacttcaccggtgaagtccggcaaacgccatggcgggttggagaccggatctaacagcgatgttgtatgatagcgaataggaaatcgacgaccggccaagatgcgatcggcaagttgagcaaatccgacgatttgacggcggccgcgacagtgagcaggatcccaaactcgacgctgacattgaggagtgcaagcgctgcggtcgggcaagattcgagcgggcgcagtccgagcaggggcgaccgtggccggacagagagagccgccatgggagatgggcagggcgagcaggaaaaagggaacgagggcgcacactggaagctcggaccaagacacagggagccggccatggaggttggggagctacgcacggaggcgaacagagagacgggcgccatgggcgagctgcacagccggcgagcatgcacgcgcagagaaacagagcgcgcaggggagctggaacgagaggagagagttccgagcgtgagcagggggattagcgcgctggacagcaggagaagcagaggccaagttgagagcagggagggacgcgccatggagatgggcggccgagctcggcggccatggaatgcgctcggccatgggaaggactcgacgcgtggagatgtcgtcctggtggccgacgagcaggaagggcgcgacacgagagagagcaggagcaacgagctgagagggtgagggtggccggtgctgctgccaggagtaggaagcgctgccatggaaagcaggtgcggcggctagaggatgaggacgagggctgctaggaaaaaat

SEQ ID NO: 48827 - DNA, 3212 bp, Zea Mays
gacaaaatttcttccttcccgtcgccatcgcgcggtagcatcaccatacctcttcatctcgctcgctgtcactccgctctgcgcgcttgggtcatgcgtgactcacacctacgcattctgtgagttcggaatcagatccgatagagttcccagagttagagttagctcgggtacagtccgtcggttgcctcaaagcttatcccggcatcccgcggaatctcgctttgcgatgaaaccatagctccacccaattcttgcggcttcagagaaccagcgctccctgccgtcgctgtccctcgttctcccagcgcctctcattcagtcatccctcctctccgaactgaccgatgcggttggtgccaaggttccggccctctaatgctgcttgaactccagccttctaatgggcgcggctcagttggtgattctgttcttggcccttgccactgcggtgggggcgccgccgagcgaggtggccgtgggcgctctcttcacgtacgactccacgattggccgcgcagcgaagctcgccatcgagctcgccgtcgatgacgtcaactcggacggcaaggtcctcccgagaacccaactcaatttggtgccccaggataccaactgcagcggatttcttgggaccatcgaagcgttgcagctaatggaaaaaaatgttgttgcgctgattggcccacaatcctctgggataggccatgtcatctcccatgttgttaatgagctacatgtacctcttctatcatttgcggctacagatccaactctttctgcatcagagtatccgtacttcatcaggacaaccataagtgactacttccaaatgaatgctattgctagcattgttgattattatcaatggaaaagggtgactgctatattcgttgatgatgattatgggcgaggtggtgtagaagccctcggtgatgcgcttgcattaaagagggcaaagatttcatataaagcagctattcctccaaattcaaatacagacgtgatcaacgatgtactatttaaagcaaatatgatggaatcaagggtcatgattgtgcatgtcaatcctgacacagggatgaggattttttctgtagctaagaacctgcaaatgatggccagtggctatgtctggatagtaactgattggctagctgctgtccttgattcctcagcaaatagaggtcttaaagatatgagtcatattcagggactaattgttctgcgtcagcacattcctgaatctgaagccaaggataagttcatatctaaatggaataatgtggctcataacagaaatattacttctggcttgaactcgtatggtttttatgcttatgactcggtttgggctgttgctcgtgctgtcgataaatttctcagtaatgggcaacagatcaacttctcaacagatcccaggttagaagattcaaatggcagcacgttgcacctatcaagtctcaagatatttgacggtggtgagcagatgctgcatcaacttctcctcacaaactttacgggtgtaacaggtccagtccagtttgattcagagcacaatttgatgccacgaaatacatctacaagtgcccagcagctgcatgatgtggtatggcctggcgattccactacgaagcctaagggctgggtattcccaaacactggccttcctctgagagttggggttccaattaaagcaagctttaaggaattagtgtcaggcagaggagataacatgagtggttactgcatcgagatattcaacgcagcaattaaacttcttccttacccagttccttgccaatttataactattggtgatggcacaaaaaaccctagctatattgacataattagaatggttgctgccaattcacttgatgcagctgtaggcgactttgctatagtgagaaatggcacacagcttgcagaatacacacagccttatattgagtcagggcttgtgatagtagcgccggtgaaacatgtaacttcaatagtgtggcttcttgaacatcgtactaatgaggaatttcgagggtctccaaggcgacaagtcataacaatgttatggtttagcttctcaacaatgttcttttcacacagagagaacactgtaagcacacttgggcggttcgtgctgataatatggttgttcgttgtgctgatcatcacttcaagttacactgctagcttgacgtcaatcctcacagtccaacagctctcaactggaattacagggattgatagtttggtttcaagttctttacctattggataccaggctggaaaatttaccaaaagatacctgactgaaaacttcaatgttcccctctctcgactggtaccactgaattcgatccaggaatatgctgatgcccttaaccgcggaccaaaaaatggcggtgttgctgcaattgttgatgagaagccatacattgatatcttcctgtcaaactactgcagcttcagaatagtgggggaggaattcacaaaggaagggtggggctttgcattccagagagactcccccctcgctgcggatttatcgacggcaatccttcaactttcagagagtgggcaacttcagaggatccacgacgagtggttctcacggtctagttgctcctcagatgacagcgaagtgggagcaaccaggcttggcctcggaagcttttggggccttttccttgtgtgtgccctgatatgcctcttcgctctgctggtgttcttcatacgagtctgccggcagtataaccagtactccagttctgaagctgccggcgagccccagcacagctgctgcggatcctgtcctaagacagcggcgaccatcacgccttggcagcttcaaagacctgatccagttcgtcgacaagaaggaggaggagattaagaaaacgatgaaacgaagatcaggcgagaaagatagccaagctgcaggattctcatacgctcagtcagtggcttcagcataggacattgctccaaccatattgaattaggttatctccaaaagcataggacattgctccaaccatattgtaaatagtagtggtgtactgtgatcagaacgaagatcagggttctcatacgctgtttgtatttgacaactgttttcggtgattggtcattgctccaagctgtgcgaagtggcttattttagttttttttttcctgacaggcacccttttagctcccgtgcctctttg

SEQ ID NO: 48828 - DNA, 3192 bp, Zea Mays
aaatttcttccttcccgtcgccatcgcgcggtagcatcaccatacctcttcatctcgctcgctgtcactccgctctgcgcgcttgggtcatgcgtgactcacacctacgcattctgtgagttcggaatcagatccgatagagttcccagagttagagttagctcgggtacagtccgtcggttgcctcaaagcttatcccggcatcccgcggaatctcgctttgcgatgaaaccatagctccacccaattcttgcggcttcagagaaccagcgctccctgccgtcgctgtccctcgttctcccagcgcctctcattcagtcatccctcctctccgaactgaccgatgcggttggtgccaaggttccggccctctaatgctgcttgaactccagccttctaatgggcgcggctcagttggtgattctgttcttggcccttgccactgcggtgggggcgccgccgagcgaggtggccgtgggcgctctcttcacgtacgactccacgattggccgcgcagcgaagctcgccatcgagctcgccgtcgatgacgtcaactcggacggcaaggtcctcccgagaacccaactcaatttggtgccccaggataccaactgcagcggatttcttgggaccatcgaagcgttgcagctaatggaaaaaaatgttgttgcgctgattggcccacaatcctctgggataggccatgtcatctcccatgttgttaatgagctacatgtacctcttctatcatttgcggctacagatccaactctttctgcatcagagtatccgtacttcatcaggacaaccataagtgactacttccaaatgaatgctattgctagcattgttgattattatcaatggaaaagggtgactgctatattcgttgatgatgattatgggcgaggtggtgtagaagccctcggtgatgcgcttgcattaaagagggcaaagatttcatataaagcagctattcctccaaattcaaatacagacgtgatcaacgatgtactatttaaagcaaatatgatggaatcaagggtcatgattgtgcatgtcaatcctgacacagggatgaggattttttctgtagctaagaacctgcaaatgatggccagtggctatgtctggatagtaactgattggctagctgctgtccttgattcctcagcaaatagaggtcttaaagatatgagtcatattcagggactaattgttctgcgtcagcacattcctgaatctgaagccaaggataagttcatatctaaatggaataatgtggctcataacagaaatattacttctggcttgaactcgtatggtttttatgcttatgactcggtttgggctgttgctcgtgctgtcgataaatttctcagtaatgggcaacagatcaacttctcaacagatcccaggttagaagattcaaatggcagcacgttgcacctatcaagtctcaagatatttgacggtggtgagcagatgctgcatcaacttctcctcacaaactttacgggtgtaacaggtccagtccagtttgattcagagcacaatttgatgccacgaaatacatctacaagtgcccagcagctgcatgatgtggtatggcctggcgattccactacgaagcctaagggctgggtattcccaaacactggccttcctctgagagttggggttccaattaaagcaagctttaaggaattagtgtcaggcagaggagataacatgagtggttactgcatcgagatattcaacgcagcaattaaacttcttccttacccagttccttgccaatttataactattggtgatggcacaaaaaaccctagctatattgacataattagaatggttgctgccaatctgtaggcgactttgctatagtgagaaatggcacacagcttgcagaatacacacagccttatattgagtcagggcttgtgatagtagcgccggtgaaacatgtaacttcaatgtggcttcttgaacatcgtactaatgaggaatttcgagggtctccaaggcgacaagtcataacaatgttatggtttagcttctcaacaatgttcttttcacacagagagaacactgtaagcacacttgggcggttcgtgctgataatatggttgttcgttgtgctgatcatcacttcaagttacactgctagcttgacgtcaatcctcacagtccaacagctctcaactggaattacagggattgatagtttggtttcaagttctttacctattggataccaggctggaaaatttaccaaaagatacctgactgaaaacttcaatgttcccctctctcgactggtaccactgaattcgatccaggaatatgctgatgcccttaaccgcggaccaaaaaatggcggtgttgctgcaattgttgatgagaagccatacattgatatcttcctgtcaaactactgcagcttcagaatagtgggggaggaattcacaaaggaagggtggggctttgcattccagagagactcccccctcgctgcggatttatcgacggcaatccttcaactttcagagagtgggcaacttcagaggatccacgacgagtggttctcacggtctagttgctcctcagatgacagcgaagtgggagcaaccaggcttggcctcggaagcttttggggccttttccttgtgtgtgccctgatatgcctcttcgctctgctggtgttcttcatacgagtctgccggcagtataaccagtactccagttctgaagctgccggcgagccccagcacagctgctgcggatcctgtcctaagacagcggcgaccatcacgccttggcagcttcaaagacctgatccagttcgtcgacaagaaggaggaggagattaagaaaacgatgaaacgaagatcaggcgagaaagatagccaagctgcaggattctcatacgctcagtcagtggcttcagcataggacattgctccaaccatattgaattaggttatctccaaaagcataggacattgctccaaccatattgtaaatagtagtggtgtactgtgatcagaacgaagatcagggttctcatacgctgtttgtatttgacaactgttttcggtgattggtcattgctccaagctgtgcgaagtggcttattttagttttttttttcctgacaggcacccttttagctcccgtgcctctttg

SEQ ID NO: 48829 - DNA, 1737 bp, Zea Mays
tacctcttcatctcgctcgctgtcactccgctctgcgcgcttgggtcatgcgtgactcacacctacgcattctgtgagttcggaatcagatccgatagagttcccagagttagagttagctcgggtacagtccgtcggttgcctcaaagcttatcccggcatcccgcggaatctcgctttgcgatgaaaccatagctccacccaattcttgcggcttcagagaaccagcgctccctgccgtcgctgtccctcgttctcccagcgcctctcattcagtcatccctcctctccgaactgaccgatgcggttggtgccaaggttccggccctctaatgctgcttgaactccagccttctaatgggcgcggctcagttggtgattctgttcttggcccttgccactgcggtgggggcgccgccgagcgaggtggccgtgggcgctctcttcacgtacgactccacgattggccgcgcagcgaagctcgccatcgagctcgccgtcgatgacgtcaactcggacggcaaggtcctcccgagaacccaactcaatttggtgccccaggataccaactgcagcggatttcttgggaccatcgaaggtttagcttctcaacaatgttcttttcacacagagagaacactgtaagcacacttgggcggttcgtgctgataatatggttgttcgttgtgctgatcatcacttcaagttacactgctagcttgacgtcaatcctcacagtccaacagctctcaactggaattacagggattgatagtttggtttcaagttctttacctattggataccaggctggaaaatttaccaaaagatacctgactgaaaacttcaatgttcccctctctcgactggtaccactgaattcgatccaggaatatgctgatgcccttaaccgcggaccaaaaaatggcggtgttgctgcaattgttgatgagaagccatacattgatatcttcctgtcaaactactgcagcttcagaatagtgggggaggaattcacaaaggaagggtggggctttgcattccagagagactcccccctcgctgcggatttatcgacggcaatccttcaactttcagagagtgggcaacttcagaggatccacgacgagtggttctcacggtctagttgctcctcagatgacagcgaagtgggagcaaccaggcttggcctcggaagcttttggggccttttccttgtgtgtgccctgatatgcctcttcgctctgctggtgttcttcatacgagtctgccggcagtataaccagtactccagttctgaagctgccggcgagccccagcacagctgctgcggatcctgtcctaagacagcggcgaccatcacgccttggcagcttcaaagacctgatccagttcgtcgacaagaaggaggaggagattaagaaaacgatgaaacgaagatcaggcgagaaagatagccaagctgcaggattctcatacgctcagtcagtggcttcagcataggacattgctccaaccatattgaattaggttatctccaaaagcataggacattgctccaaccatattgtaaatagtagtggtgtactgtgatcagaacgaagatcagggttctcatacgctgtttgtatttgacaactgttttcggtgattggtcattgctccaagctgtgcgaagtggcttattttagttttttttttcctgacaggcacccttttagctcccgtgcctctttg

SEQ ID NO: 48830 - DNA, 3218 bp, Zea Mays
cttcatctcgctcgctgtcactccgctctgcgcgcttgggtcatgcgtgactcacacctacgcattctgtgagttcggaatcagatccgatagagttcccagagttagagttagctcgggtacagtccgtcggttgcctcaaagcttatcccggcatcccgcggaatctcgctttgcgatgaaaccatagctccacccaattcttgcggcttcagagaaccagcgctccctgccgtcgctgtccctcgttctcccagcgcctctcattcagtcatccctcctctccgaactgaccgatgcggttggtgccaaggttccggccctctaatgctgcttgaactccagccttctaatgggcgcggctcagttggtgattctgttcttggcccttgccactgcggtgggggcgccgccgagcgaggtggccgtgggcgctctcttcacgtacgactccacgattggccgcgcagcgaagctcgccatcgagctcgccgtcgatgacgtcaactcggacggcaaggtcctcccgagaacccaactcaatttggtgccccaggataccaactgcagcggatttcttgggaccatcgaagctaatggaaaaaaatgttgttgcgctgattggcccacaatcctctgggataggccatgtcatctcccatgttgttaatgagctacatgtacctcttctatcatttgcggctacagatccaactctttctgcatcagagtatccgtacttcatcaggacaaccataagtgactacttccaaatgaatgctattgctagcattgttgattattatcaatggaaaagggtgactgctatattcgttgatgatgattatgggcgaggtggtgtagaagccctcggtgatgcgcttgcattaaagagggcaaagatttcatataaagcagctattcctccaaattcaaatacagacgtgatcaacgatgtactatttaaagcaaatatgatggaatcaagggtcatgattgtgcatgtcaatcctgacacagggatgaggattttttctgtagctaagaacctgcaaatgatggccagtggctatgtctggatagtaactgattggctagctgctgtccttgattcctcagcaaatagaggtcttaaagatatgagtcatattcagggactaattgttctgcgtcagcacattcctgaatctgaagccaaggataagttcatatctaaatggaataatgtggctcataacagaaatattacttctggcttgaactcgtatggtttttatgcttatgactcggtttgggctgttgctcgtgctgtcgataaatttctcagtaatgggcaacagatcaacttctcaacagatcccaggttagaagattcaaatggcagcacgttgcacctatcaagtctcaagatatttgacggtggtgagcagatgctgcatcaacttctcctcacaaactttacgggtgtaacaggtccagtccagtttgattcagagcacaatttgatgccacgaaatacatctacaagtgcccagcagctgcatgatgtggtatggcctggcgattccactacgaagcctaagggctgggtattcccaaacactggccttcctctgagagttggggttccaattaaagcaagctttaaggaattagtgtcaggcagaggagataacatgagtggttactgcatcgagatattcaacgcagcaattaaacttcttccttacccagttccttgccaatttataactattggtgatggcacaaaaaaccctagctatattgacataattagaatggttgctgccaatctgtaggcgactttgctatagtgagaaatggcacacagcttgcagaatacacacagccttatattgagtcagggcttgtgatagtagcgccggtgaaacatgtaacttcaagtgcgtgggctttccttgaacctttcacattggagatgtggtgtgtcacagttgctctttttattttggtgggcatagtagtgtggcttcttgaacatcgtactaatgaggaatttcgagggtctccaaggcgacaagtcataacaatgttatggtttagcttctcaacaatgttcttttcacacagagagaacactgtaagcacacttgggcggttcgtgctgataatatggttgttcgttgtgctgatcatcacttcaagttacactgctagcttgacgtcaatcctcacagtccaacagctctcaactggaattacagggattgatagtttggtttcaagttctttacctattggataccaggctggaaaatttaccaaaagatacctgactgaaaacttcaatgttcccctctctcgactggtaccactgaattcgatccaggaatatgctgatgcccttaaccgcggaccaaaaaatggcggtgttgctgcaattgttgatgagaagccatacattgatatcttcctgtcaaactactgcagcttcagaatagtgggggaggaattcacaaaggaagggtggggctttgcattccagagagactcccccctcgctgcggatttatcgacggcaatccttcaactttcagagagtgggcaacttcagaggatccacgacgagtggttctcacggtctagttgctcctcagatgacagcgaagtgggagcaaccaggcttggcctcggaagcttttggggccttttccttgtgtgtgccctgatatgcctcttcgctctgctggtgttcttcatacgagtctgccggcagtataaccagtactccagttctgaagctgccggcgagccccagcacagctgctgcggatcctgtcctaagacagcggcgaccatcacgccttggcagcttcaaagacctgatccagttcgtcgacaagaaggaggaggagattaagaaaacgatgaaacgaagatcaggcgagaaagatagccaagctgcaggattctcatacgctcagtcagtggcttcagcataggacattgctccaaccatattgaattaggttatctccaaaagcataggacattgctccaaccatattgtaaatagtagtggtgtactgtgatcagaacgaagatcagggttctcatacgctgtttgtatttgacaactgttttcggtgattggtcattgctccaagctgtgcgaagtggcttattttagttttttttttcctgacaggcacccttttagctcccgtgcctctttg

SEQ ID NO: 48831 - DNA, 1984 bp, Zea Mays
ctcgctgtcactccgctctgcgcgcttgggtcatgcgtgactcacacctacgcattctgtgagttcggaatcagatccgatagagttcccagagttagagttagctcgggtacagtccgtcggttgcctcaaagcttatcccggcatcccgcggaatctcgctttgcgatgaaaccatagctccacccaattcttgcggcttcagagaaccagcgctccctgccgtcgctgtccctcgttctcccagcgcctctcattcagtcatccctcctctccgaactgaccgatgcggttggtgccaaggttccggccctctaatgctgcttgaactccagccttctaatgggcgcggctcagttggtgattctgttcttggcccttgccactgcggtgggggcgccgccgagcgaggtggccgtgggcgctctcttcacgtacgactccacgattggccgcgcagcgaagctcgccatcgagctcgccgtcgatgacgtcaactcggacggcaaggtcctcccgagaacccaactcaatttggtgccccaggataccaactgcagcggatttcttgggaccatcgaagctgtaggcgactttgctatagtgagaaatggcacacagcttgcagaatacacacagccttatattgagtcagggcttgtgatagtagcgccggtgaaacatgtaacttcaagtgcgtgggctttccttgaacctttcacattggagatgtggtgtgtcacagttgctctttttattttggtgggcatagtagtgtggcttcttgaacatcgtactaatgaggaatttcgagggtctccaaggcgacaagtcataacaatgttatggtttagcttctcaacaatgttcttttcacacaagaacactgtaagcacacttgggcggttcgtgctgataatatggttgttcgttgtgctgatcatcacttcaagttacactgctagcttgacgtcaatcctcacagtccaacagctctcaactggaattacagggattgatagtttggtttcaagttctttacctattggataccaggctggaaaatttaccaaaagatacctgactgaaaacttcaatgttcccctctctcgactggtaccactgaattcgatccaggaatatgctgatgcccttaaccgcggaccaaaaaatggcggtgttgctgcaattgttgatgagaagccatacattgatatcttcctgtcaaactactgcagcttcagaatagtgggggaggaattcacaaaggaagggtggggctttgcattccagagagactcccccctcgctgcggatttatcgacggcaatccttcaactttcagagagtgggcaacttcagaggatccacgacgagtggttctcacggtctagttgctcctcagatgacagcgaagtgggagcaaccaggcttggcctcggaagcttttggggccttttccttgtgtgtgccctgatatgcctcttcgctctgctggtgttcttcatacgagtctgccggcagtataaccagtactccagttctgaagctgccggcgagccccagcacagctgctgcggatcctgtcctaagacagcggcgaccatcacgccttggcagcttcaaagacctgatccagttcgtcgacaagaaggaggaggagattaagaaaacgatgaaacgaagatcaggcgagaaagatagccaagctgcaggattctcatacgctcagtcagtggcttcagcataggacattgctccaaccatattgaattaggttatctccaaaagcataggacattgctccaaccatattgtaaatagtagtggtgtactgtgatcagaacgaagatcagggttctcatacgctgtttgtatttgacaactgttttcggtgattggtcattgctccaagctgtgcgaagtggcttattttagttttttttttcctgacaggcacccttttagctcccgtgcctctttg

SEQ ID NO: 48832 - DNA, 1987 bp, Zea Mays
ctcgctgtcactccgctctgcgcgcttgggtcatgcgtgactcacacctacgcattctgtgagttcggaatcagatccgatagagttcccagagttagagttagctcgggtacagtccgtcggttgcctcaaagcttatcccggcatcccgcggaatctcgctttgcgatgaaaccatagctccacccaattcttgcggcttcagagaaccagcgctccctgccgtcgctgtccctcgttctcccagcgcctctcattcagtcatccctcctctccgaactgaccgatgcggttggtgccaaggttccggccctctaatgctgcttgaactccagccttctaatgggcgcggctcagttggtgattctgttcttggcccttgccactgcggtgggggcgccgccgagcgaggtggccgtgggcgctctcttcacgtacgactccacgattggccgcgcagcgaagctcgccatcgagctcgccgtcgatgacgtcaactcggacggcaaggtcctcccgagaacccaactcaatttggtgccccaggataccaactgcagcggatttcttgggaccatcgaagctgtaggcgactttgctatagtgagaaatggcacacagcttgcagaatacacacagccttatattgagtcagggcttgtgatagtagcgccggtgaaacatgtaacttcaagtgcgtgggctttccttgaacctttcacattggagatgtggtgtgtcacagttgctctttttattttggtgggcatagtagtgtggcttcttgaacatcgtactaatgaggaatttcgagggtctccaaggcgacaagtcataacaatgttatggtttagcttctcaacaatgttcttttcacacagagagaacactgtaagcacacttgggcggttcgtgctgataatatggttgttcgttgtgctgatcatcacttcaagttacactgctagcttgacgtcaatcctcacagtccaacagctctcaactggaattacagggattgatagtttggtttcaagttctttacctattggataccaggctggaaaatttaccaaaagatacctgactgaaaacttcaatgttcccctctctcgactggtaccactgaattcgatccaggaatatgctgatgcccttaaccgcggaccaaaaaatggcggtgttgctgcaattgttgatgagaagccatacattgatatcttcctgtcaaactactgcagcttcagaatagtgggggaggaattcacaaaggaagggtggggctttgcattccagagagactcccccctcgctgcggatttatcgacggcaatccttcaactttcagagagtgggcaacttcagaggatccacgacgagtggttctcacggtctagttgctcctcagatgacagcgaagtgggagcaaccaggcttggcctcggaagcttttggggccttttccttgtgtgtgccctgatatgcctcttcgctctgctggtgttcttcatacgagtctgccggcagtataaccagtactccagttctgaagctgccggcgagccccagcacagctgctgcggatcctgtcctaagacagcggcgaccatcacgccttggcagcttcaaagacctgatccagttcgtcgacaagaaggaggaggagattaagaaaacgatgaaacgaagatcaggcgagaaagatagccaagctgcaggattctcatacgctcagtcagtggcttcagcataggacattgctccaaccatattgaattaggttatctccaaaagcataggacattgctccaaccatattgtaaatagtagtggtgtactgtgatcagaacgaagatcagggttctcatacgctgtttgtatttgacaactgttttcggtgattggtcattgctccaagctgtgcgaagtggcttattttagttttttttttcctgacaggcacccttttagctcccgtgcctctttg

SEQ ID NO: 48833 - DNA, 3215 bp, Zea Mays
gtcactccgctctgcgcgcttgggtcatgcgtgactcacacctacgcattctgtgagttcggaatcagatccgatagagttcccagagttagagttagctcgggtacagtccgtcggttgcctcaaagcttatcccggcatcccgcggaatctcgctttgcgatgaaaccatagctccacccaattcttgcggcttcagagaaccagcgctccctgccgtcgctgtccctcgttctcccagcgcctctcattcagtcatccctcctctccgaactgaccgatgcggttggtgccaaggttccggccctctaatgctgcttgaactccagccttctaatgggcgcggctcagttggtgattctgttcttggcccttgccactgcggtgggggcgccgccgagcgaggtggccgtgggcgctctcttcacgtacgactccacgattggccgcgcagcgaagctcgccatcgagctcgccgtcgatgacgtcaactcggacggcaaggtcctcccgagaacccaactcaatttggtgccccaggataccaactgcagcggatttcttgggaccatcgaagctaatggaaaaaaatgttgttgcgctgattggcccacaatcctctgggataggccatgtcatctcccatgttgttaatgagctacatgtacctcttctatcatttgcggctacagatccaactctttctgcatcagagtatccgtacttcatcaggacaaccataagtgactacttccaaatgaatgctattgctagcattgttgattattatcaatggaaaagggtgactgctatattcgttgatgatgattatgggcgaggtggtgtagaagccctcggtgatgcgcttgcattaaagagggcaaagatttcatataaagcagctattcctccaaattcaaatacagacgtgatcaacgatgtactatttaaagcaaatatgatggaatcaagggtcatgattgtgcatgtcaatcctgacacagggatgaggattttttctgtagctaagaacctgcaaatgatggccagtggctatgtctggatagtaactgattggctagctgctgtccttgattcctcagcaaatagaggtcttaaagatatgagtcatattcagggactaattgttctgcgtcagcacattcctgaatctgaagccaaggataagttcatatctaaatggaataatgtggctcataacagaaatattacttctggcttgaactcgtatggtttttatgcttatgactcggtttgggctgttgctcgtgctgtcgataaatttctcagtaatgggcaacagatcaacttctcaacagatcccaggttagaagattcaaatggcagcacgttgcacctatcaagtctcaagatatttgacggtggtgagcagatgctgcatcaacttctcctcacaaactttacgggtgtaacaggtccagtccagtttgattcagagcacaatttgatgccacgaaatacatctacaagtgcccagcagctgcatgatgtggtatggcctggcgattccactacgaagcctaagggctgggtattcccaaacactggccttcctctgagagttggggttccaattaaagcaagctttaaggaattagtgtcaggcagaggagataacatgagtggttactgcatcgagatattcaacgcagcaattaaacttcttccttacccagttccttgccaatttataactattggtgatggcacaaaaaaccctagctatattgacataattagaatggttgctgccaattcacttgatgcagctgtaggcgactttgctatagtgagaaatggcacacagcttgcagaatacacacagccttatattgagtcagggcttgtgatagtagcgccggtgaaacatgtaacttcaagtgcgtgggctttccttgaacctttcacattggagatgtggtgtgtcacagttgctctttttattttggtgggcatagtagtgtggcttcttgaacatcgtactaatgaggaatttcgagggtctccaaggcgacaagtcataacaatgttatggtttagcttctcaacaatgttcttttcacacagagagaacactgtaagcacacttgggcggttcgtgctgataatatggttgttcgttgtgctgatcatcacttcaagttacactgctagcttgacgtcaatcctcacagtccaacagctctcaactggaattacagggattgatagtttggtttcaagttctttacctattggataccaggctggaaaatttaccaaaagatacctgactgaaaacttcaatgttcccctctctcgactggtaccactgaattcgatccaggaatatgctgatgcccttaaccgcggaccaaaaaatggcggtgttgctgcaattgttgatgagaagccatacattgatatcttcctgtcaaactactgcagcttcagaatagtgggggaggaattcacaaaggaagggtggggctttgcattccagagagactcccccctcgctgcggatttatcgacggcaatccttcaactttcagagagtgggcaacttcagaggatccacgacgagtggttctcacggtctagttgctcctcagatgacagcgaagtgggagcaaccaggcttggcctcggaagcttttggggccttttccttgtgtgtgccctgatatgcctcttcgctctgctggtgttcttcatacgagtctgccggcagtataaccagtactccagttctgaagctgccggcgagccccagcacagctgctgcggatcctgtcctaagacagcggcgaccatcacgccttggcagcttcaaagacctgatccagttcgtcgacaagaaggaggaggagattaagaaaacgatgaaacgaagatcaggcgagaaagatagccaagctgcaggattctcatacgctcagtcagtggcttcagcataggacattgctccaaccatattgaattaggttatctccaaaagcataggacattgctccaaccatattgtaaatagtagtggtgtactgtgatcagaacgaagatcagggttctcatacgctgtttgtatttgacaactgttttcggtgattggtcattgctccaagctgtgcgaagtggcttattttagttttttttttcctgacaggcacccttttagctcccgtgcctctttg

SEQ ID NO: 48834 - DNA, 3094 bp, Zea Mays
ccgctctgcgcgcttgggtcatgcgtgactcacacctacgcattctgtgagttcggaatcagatccgatagagttcccagagttagagttagctcgggtacagtccgtcggttgcctcaaagcttatcccggcatcccgcggaatctcgctttgcgatgaaaccatagctccacccaattcttgcggcttcagagaaccagcgctccctgccgtcgctgtccctcgttctcccagcgcctctcattcagtcatccctcctctccgaactgaccgatgcggttggtgccaaggttccggccctctaatgctgcttgaactccagccttctaatgggcgcggctcagttggtgattctgttcttggcccttgccactgcggtgggggcgccgccgagcgaggtggccgtgggcgctctcttcacgtacgactccacgattggccgcgcagcgaagctcgccatcgagctcgccgtcgatgacgtcaactcggacggcaaggtcctcccgagaacccaactcaatttggtgccccaggataccaactgcagcggatttcttgggaccatcgaagatccaactctttctgcatcagagtatccgtacttcatcaggacaaccataagtgactacttccaaatgaatgctattgctagcattgttgattattatcaatggaaaagggtgactgctatattcgttgatgatgattatgggcgaggtggtgtagaagccctcggtgatgcgcttgcattaaagagggcaaagatttcatataaagcagctattcctccaaattcaaatacagacgtgatcaacgatgtactatttaaagcaaatatgatggaatcaagggtcatgattgtgcatgtcaatcctgacacagggatgaggattttttctgtagctaagaacctgcaaatgatggccagtggctatgtctggatagtaactgattggctagctgctgtccttgattcctcagcaaatagaggtcttaaagatatgagtcatattcagggactaattgttctgcgtcagcacattcctgaatctgaagccaaggataagttcatatctaaatggaataatgtggctcataacagaaatattacttctggcttgaactcgtatggtttttatgcttatgactcggtttgggctgttgctcgtgctgtcgataaatttctcagtaatgggcaacagatcaacttctcaacagatcccaggttagaagattcaaatggcagcacgttgcacctatcaagtctcaagatatttgacggtggtgagcagatgctgcatcaacttctcctcacaaactttacgggtgtaacaggtccagtccagtttgattcagagcacaatttgatgccacgaaatacatctacaagtgcccagcagctgcatgatgtggtatggcctggcgattccactacgaagcctaagggctgggtattcccaaacactggccttcctctgagagttggggttccaattaaagcaagctttaaggaattagtgtcaggcagaggagataacatgagtggttactgcatcgagatattcaacgcagcaattaaacttcttccttacccagttccttgccaatttataactattggtgatggcacaaaaaaccctagctatattgacataattagaatggttgctgccaattcacttgatgcagctgtaggcgactttgctatagtgagaaatggcacacagcttgcagaatacacacagccttatattgagtcagggcttgtgatagtagcgccggtgaaacatgtaacttcaagtgcgtgggctttccttgaacctttcacattggagatgtggtgtgtcacagttgctctttttattttggtgggcatagtagtgtggcttcttgaacatcgtactaatgaggaatttcgagggtctccaaggcgacaagtcataacaatgttatggtttagcttctcaacaatgttcttttcacacagagagaacactgtaagcacacttgggcggttcgtgctgataatatggttgttcgttgtgctgatcatcacttcaagttacactgctagcttgacgtcaatcctcacagtccaacagctctcaactggaattacagggattgatagtttggtttcaagttctttacctattggataccaggctggaaaatttaccaaaagatacctgactgaaaacttcaatgttcccctctctcgactggtaccactgaattcgatccaggaatatgctgatgcccttaaccgcggaccaaaaaatggcggtgttgctgcaattgttgatgagaagccatacattgatatcttcctgtcaaactactgcagcttcagaatagtgggggaggaattcacaaaggaagggtggggctttgcattccagagagactcccccctcgctgcggatttatcgacggcaatccttcaactttcagagagtgggcaacttcagaggatccacgacgagtggttctcacggtctagttgctcctcagatgacagcgaagtgggagcaaccaggcttggcctcggaagcttttggggccttttccttgtgtgtgccctgatatgcctcttcgctctgctggtgttcttcatacgagtctgccggcagtataaccagtactccagttctgaagctgccggcgagccccagcacagctgctgcggatcctgtcctaagacagcggcgaccatcacgccttggcagcttcaaagacctgatccagttcgtcgacaagaaggaggaggagattaagaaaacgatgaaacgaagatcaggcgagaaagatagccaagctgcaggattctcatacgctcagtcagtggcttcagcataggacattgctccaaccatattgaattaggttatctccaaaagcataggacattgctccaaccatattgtaaatagtagtggtgtactgtgatcagaacgaagatcagggttctcatacgctgtttgtatttgacaactgttttcggtgattggtcattgctccaagctgtgcgaagtggcttattttagttttttttttcctgacaggcacccttttagctcccgtgcctctttg

SEQ ID NO: 48835 - DNA, 3073 bp, Zea Mays
ccgctctgcgcgcttgggtcatgcgtgactcacacctacgcattctgtgagttcggaatcagatccgatagagttcccagagttagagttagctcgggtacagtccgtcggttgcctcaaagcttatcccggcatcccgcggaatctcgctttgcgatgaaaccatagctccacccaattcttgcggcttcagagaaccagcgctccctgccgtcgctgtccctcgttctcccagcgcctctcattcagtcatccctcctctccgaactgaccgatgcggttggtgccaaggttccggccctctaatgctgcttgaactccagccttctaatgggcgcggctcagttggtgattctgttcttggcccttgccactgcggtgggggcgccgccgagcgaggtggccgtgggcgctctcttcacgtacgactccacgattggccgcgcagcgaagctcgccatcgagctcgccgtcgatgacgtcaactcggacggcaaggtcctcccgagaacccaactcaatttggtgccccaggataccaactgcagcggatttcttgggaccatcgaagagtatccgtacttcatcaggacaaccataagtgactacttccaaatgaatgctattgctagcattgttgattattatcaatggaaaagggtgactgctatattcgttgatgatgattatgggcgaggtggtgtagaagccctcggtgatgcgcttgcattaaagagggcaaagatttcatataaagcagctattcctccaaattcaaatacagacgtgatcaacgatgtactatttaaagcaaatatgatggaatcaagggtcatgattgtgcatgtcaatcctgacacagggatgaggattttttctgtagctaagaacctgcaaatgatggccagtggctatgtctggatagtaactgattggctagctgctgtccttgattcctcagcaaatagaggtcttaaagatatgagtcatattcagggactaattgttctgcgtcagcacattcctgaatctgaagccaaggataagttcatatctaaatggaataatgtggctcataacagaaatattacttctggcttgaactcgtatggtttttatgcttatgactcggtttgggctgttgctcgtgctgtcgataaatttctcagtaatgggcaacagatcaacttctcaacagatcccaggttagaagattcaaatggcagcacgttgcacctatcaagtctcaagatatttgacggtggtgagcagatgctgcatcaacttctcctcacaaactttacgggtgtaacaggtccagtccagtttgattcagagcacaatttgatgccacgaaatacatctacaagtgcccagcagctgcatgatgtggtatggcctggcgattccactacgaagcctaagggctgggtattcccaaacactggccttcctctgagagttggggttccaattaaagcaagctttaaggaattagtgtcaggcagaggagataacatgagtggttactgcatcgagatattcaacgcagcaattaaacttcttccttacccagttccttgccaatttataactattggtgatggcacaaaaaaccctagctatattgacataattagaatggttgctgccaattcacttgatgcagctgtaggcgactttgctatagtgagaaatggcacacagcttgcagaatacacacagccttatattgagtcagggcttgtgatagtagcgccggtgaaacatgtaacttcaagtgcgtgggctttccttgaacctttcacattggagatgtggtgtgtcacagttgctctttttattttggtgggcatagtagtgtggcttcttgaacatcgtactaatgaggaatttcgagggtctccaaggcgacaagtcataacaatgttatggtttagcttctcaacaatgttcttttcacacagagagaacactgtaagcacacttgggcggttcgtgctgataatatggttgttcgttgtgctgatcatcacttcaagttacactgctagcttgacgtcaatcctcacagtccaacagctctcaactggaattacagggattgatagtttggtttcaagttctttacctattggataccaggctggaaaatttaccaaaagatacctgactgaaaacttcaatgttcccctctctcgactggtaccactgaattcgatccaggaatatgctgatgcccttaaccgcggaccaaaaaatggcggtgttgctgcaattgttgatgagaagccatacattgatatcttcctgtcaaactactgcagcttcagaatagtgggggaggaattcacaaaggaagggtggggctttgcattccagagagactcccccctcgctgcggatttatcgacggcaatccttcaactttcagagagtgggcaacttcagaggatccacgacgagtggttctcacggtctagttgctcctcagatgacagcgaagtgggagcaaccaggcttggcctcggaagcttttggggccttttccttgtgtgtgccctgatatgcctcttcgctctgctggtgttcttcatacgagtctgccggcagtataaccagtactccagttctgaagctgccggcgagccccagcacagctgctgcggatcctgtcctaagacagcggcgaccatcacgccttggcagcttcaaagacctgatccagttcgtcgacaagaaggaggaggagattaagaaaacgatgaaacgaagatcaggcgagaaagatagccaagctgcaggattctcatacgctcagtcagtggcttcagcataggacattgctccaaccatattgaattaggttatctccaaaagcataggacattgctccaaccatattgtaaatagtagtggtgtactgtgatcagaacgaagatcagggttctcatacgctgtttgtatttgacaactgttttcggtgattggtcattgctccaagctgtgcgaagtggcttattttagttttttttttcctgacaggcacccttttagctcccgtgcctctttg

SEQ ID NO: 48836 - DNA, 3218 bp, Zea Mays
ccgctctgcgcgcttgggtcatgcgtgactcacacctacgcattctgtgagttcggaatcagatccgatagagttcccagagttagagttagctcgggtacagtccgtcggttgcctcaaagcttatcccggcatcccgcggaatctcgctttgcgatgaaaccatagctccacccaattcttgcggcttcagagaaccagcgctccctgccgtcgctgtccctcgttctcccagcgcctctcattcagtcatccctcctctccgaactgaccgatgcggttggtgccaaggttccggccctctaatgctgcttgaactccagccttctaatgggcgcggctcagttggtgattctgttcttggcccttgccactgcggtgggggcgccgccgagcgaggtggccgtgggcgctctcttcacgtacgactccacgattggccgcgcagcgaagctcgccatcgagctcgccgtcgatgacgtcaactcggacggcaaggtcctcccgagaacccaactcaatttggtgccccaggataccaactgcagcggatttcttgggaccatcgaaggcgttgcagctaatggaaaaaaatgttgttgcgctgattggcccacaatcctctgggataggccatgtcatctcccatgttgttaatgagctacatgtacctcttctatcatttgcggctacagatccaactctttctgcatcagagtatccgtacttcatcaggacaaccataagtgactacttccaaatgaatgctattgctagcattgttgattattatcaatggaaaagggtgactgctatattcgttgatgatgattatgggcgaggtggtgtagaagccctcggtgatgcgcttgcattaaagagggcaaagatttcatataaagcagctattcctccaaattcaaatacagacgtgatcaacgatgtactatttaaagcaaatatgatggaatcaagggtcatgattgtgcatgtcaatcctgacacagggatgaggattttttctgtagctaagaacctgcaaatgatggccagtggctatgtctggatagtaactgattggctagctgctgtccttgattcctcagcaaatagaggtcttaaagatatgagtcatattcagggactaattgttctgcgtcagcacattcctgaatctgaagccaaggataagttcatatctaaatggaataatgtggctcataacagaaatattacttctggcttgaactcgtatggtttttatgcttatgactcggtttgggctgttgctcgtgctgtcgataaatttctcagtaatgggcaacagatcaacttctcaacagatcccaggttagaagattcaaatggcagcacgttgcacctatcaagtctcaagatatttgacggtggtgagcagatgctgcatcaacttctcctcacaaactttacgggtgtaacaggtccagtccagtttgattcagagcacaatttgatgccacgaaatacatctacaagtgcccagcagctgcatgatgtggtatggcctggcgattccactacgaagcctaagggctgggtattcccaaacactggccttcctctgagagttggggttccaattaaagcaagctttaaggaattagtgtcaggcagaggagataacatgagtggttactgcatcgagatattcaacgcagcaattaaacttcttccttacccagttccttgccaatttataactattggtgatggcacaaaaaaccctagctatattgacataattagaatggttgctgccaattcacttgatgcagctgtaggcgactttgctatagtgagaaatggcacacagcttgcagaatacacacagccttatattgagtcagggcttgtgatagtagcgccggtgaaacatgtaacttcaagtgcgtgggctttccttgaacctttcacattggagatgtggtgtgtcacagttgctctttttattttggtgggcatagtagtgtggcttcttgaacatcgtactaatgaggaatttcgagggtctccaaggcgacaagtcataacaatgttatggtttagcttctcaacaatgttcttttcacacagagagaacactgtaagcacacttgggcggttcgtgctgataatatggttgttcgttgtgctgatcatcacttcaagttacactgctagcttgacgtcaatcctcacagtccaacagctctcaactggaattacagggattgatagtttggtttcaagttctttacctattggataccaggctggaaaatttaccaaaagatacctgactgaaaacttcaatgttcccctctctcgactggtaccactgaattcgatccaggaatatgctgatgcccttaaccgcggaccaaaaaatggcggtgttgctgcaattgttgatgagaagccatacattgatatcttcctgtcaaactactgcagcttcagaatagtgggggaggaattcacaaaggaagggtggggctttgcattccagagagactcccccctcgctgcggatttatcgacggcaatccttcaactttcagagagtgggcaacttcagaggatccacgacgagtggttctcacggtctagttgctcctcagatgacagcgaagtgggagcaaccaggcttggcctcggaagcttttggggccttttccttgtgtgtgccctgatatgcctcttcgctctgctggtgttcttcatacgagtctgccggcagtataaccagtactccagttctgaagctgccggcgagccccagcacagctgctgcggatcctgtcctaagacagcggcgaccatcacgccttggcagcttcaaagacctgatccagttcgtcgacaagaaggaggaggagattaagaaaacgatgaaacgaagatcaggcgagaaagatagccaagctgcaggattctcatacgctcagtcagtggcttcagcataggacattgctccaaccatattgaattaggttatctccaaaagcataggacattgctccaaccatattgtaaatagtagtggtgtactgtgatcagaacgaagatcagggttctcatacgctgtttgtatttgacaactgttttcggtgattggtcattgctccaagctgtgcgaagtggcttattttagttttttttttcctgacaggcacccttttagctcccgtgcctctttg

SEQ ID NO: 48837 - DNA, 3058 bp, Zea Mays
cgacgggcgagggccggagtaccaacgacgatggtgagaaggacggtgctggcggcgctgctggtggccgccgccctcgccggcggcgcgcgggcgcagctcaaggaggggttctacgactactcctgcccacaggcggagaagatcgtcaaggactacgtgaaggcgcacatcccccacgcgcccgacgtcgcctccaccctgctccgcacccacttccacgactgcttcgtcaggggctgcgacgcgtcagtgctgctcaacgcgacgggcggcagcgaggcggagaaggacgcggcgcccaacctgacgctgcgcggcttcggcttcatcgaccgcatcaaggcgctgctcgagaaggagtgccccggcgtggtgtcctgcgccgacatcgtcgcgctcgccgcccgcgactccgtcggcgtcatcggcggtccgttctggagcgtgccgacggggaggcgcgacggcaccgtgtccatcaagcaggaggcgctggaccagatccccgcgcccaccatgaacttcacccaactcctccagtccttccagaacaagagcctcaacctcgccgacctcgtctggctctcaggtacgtacttccccaaaccaaacacctgaccccctccatgatccgttgacgccacaccgttctgagcagaagaagaagaagattatcttttcacctgtcaatcaatcagcttaatttacatgccaaggaagaactagacagatattaggcagtgacaggtctgactagtcctatgattacaagccacgcttgcgagtttattaaacattccaacggcaccgacacccagtgctgctactttcgctttcgctgggtcaatcatttgtttggtcaggctggcataagcagtaccactgctatgattgtgctagaggactggtagcctcgtgagtcgtgacaaactgttttatgatttgagaaaataactggacaaacagcaggagcctagaacgttttagtagcagttagttcgctgtcatagccggattggacagacaacctgaacatgcacagagcggccctgctaggtagaagtactgctgtcttctccgttccaaattataagctatattctaaaattataaagtataagttatattctaactttataggttttatttttttaattataagatagtttaagatttctaaatttctaattttttactatatatctagacataatatgtatttagcgacgtactagcatgtagcaaaagctataagttttaaaaagtcaggaaaaaaacttttttgatttagaacaaagggaatagcacgcgttactgaataatggcatccatttgtccgtcagagctatctaccatataaaagacaaagttcgtactgtgggtcaagtcgacatctaaaaggcaaaagttgagcacctaacagtatttattgacggtgcgtgcatgcacgaatcagcgttaggaagcatagttctgtctttctagatagactaataactagagtgaatccgtagccaacagaaatggaggcgattaaattgggcaactgcaagtctgttgtctcctcatctttcagtcttcgggttagtgcagtagtgtcaggcacaggcgctgagccgagtagagtagctagccgacagctgcacatcgtccttgaggagagacacagcatgttagtagttagcatctaatggatgcagccggagtttggtacccaggaaatgattcagtacggcagagataagataaatttgtgtaaggaaccacttttgaggataacggacagagagtgtatctgaccttattacgtcccaggcaggcttaactttcatcatccttcagagcaggccgtcttgctgaaagtaaaagaagagactgatgagtgatgacacgtggaggagaacttggaatctgaataataataatgcgtatactcttcatcatttgaggacgagacttgtttgggccaccgatgggcttccatttctcgtatgtgcgtgcgtgacattaaacggcaacctcttctgatgcagacatgctcgctgctgccaactgctgcctcggtctatattccaatctatcatagaagacgagcctttattgtgcatgcagactccagaagtccagagcgatacttctgaaatagtagtccttttcgtagaacatgccctcgatccgttgatggtgccttaaaatacgggctcacacgatcggcatctcccaatgcaactccttcagcgagcgcctgtacaacttcacggggcgcggcgggcccgacgacgcggacccgtcgctggacccgctgtacgccgcgaagttgcggctcaagtgcaagacgctgacggacaacacgacgatcgtggagatggaccccggcagcttccgcaccttcgacctgagctactaccgcggcgtgctcaagcggcggggcctgttccagtccgacgccgcgctcatcaccgacgccgcctccaaggccgacatcctcagcgtgatcaacgcgccgcccgaggtgttcttccaggtcttcgcgggctccatggtcaagatgggcgccatcgaggtcaagaccggctccgagggcgagatcaggaagcactgcgccctcgtcaacaagcactaggcggcggaattcatgcgggagatggctccattgctcgcaaaaaatccttgtgagacacacaacatgctctgcatctgcaggcgttgtcgtcaccttggtggacgtagtacatcggtgcatggattatctgttgtttaatttgtacgttcagttcattctgtttcttgtattcttttggttcctttcctcttgtttattcatggatgatgaggtgtttctgttttattctctggttcagctgtaaccatgtaacatgtaaggtgcgcgttttgtcctcgtgatctctgcaactgtatttattttaatggatggtatacatggagatatgatcatgataataacaataaggtgattacaatcatgtgcctccaccactgtcaattagatcctgttgcatttttcctccgggaataaaagaaaccaccattcaag

SEQ ID NO: 48838 - DNA, 2154 bp, Zea Mays
acatagggttccgactactgccgccgacggcgtcgatgcatctacatatgagagcggtgatgagcaatctttgtggactagagtttctgatactacgaaggatctaaatgatgtgaaactttgaaagggaaagcgtccaatctgttcgattgtgatgtaccatgacagttctttcatattgaataggaagatctgatagattcttgaaacttgtttttgattctttcctctgtttagagatgtggatgatgacaacacaattaaaatacagttatccctgtctgattccttcaaaaagggtgctgagaacatttttctgacacatttctttattttattttcaatagttggtagaaaaaatagctgttttactattatcgttgatcttggcctttgatgacatgatggttacagacgaggcaaaattttgtctaatctgttgatatttatcatgaactaggacggtctgaggccatttggtgacatatgggtctttaccgcaattggtgttcagatattaacattcccaatcattaattatttttaaatgtttgtgtatatatataaataaatgtggctgtgacgacttggaaatattcaagctcaacagaccaaatcacatgtctatctctatagaagagattgatctgtatgccgactatccatttgaaccgagccatacgatttgtcttgttgtcctcagccatttacaatttaattctttttgtctttaatgtacaatttctgggttgtgttgtaatgatgtgtcaagagctccctctcctgatttcagaattaattgaattgcacttgctggcagattttgtttcatcagccttgttggcacctttttttgttgatgcttgcttttttggtccatgaactcttaaatcattgcagttcaaaattataaagtagtgtgttcacagttgagcctgtgatgattagctatacatttggaattaccatcagatttacttgtgaagactgttgtctggctttatgaggcttttgttccacacatctatattctatctgttttacaatgtttcagtttcatatcattagattactatgaatttccataggatattcaatatgattatttccctgtggtgctttgaataggcctaggcagtttattcatttttttcacatgtggattggagcctgatgacagtggctctgagttttattaggttttctggattgtttgttgaaacagtgttgttttactatcttttgattctttgttgttggctgctgtggtggaggttgatgatatggttttgtcgccccagtcttagatccggacttcccgtatctgtgctgattgacatcttatcgaatctgactccattgtatcaatttgcagtcaagtctgcttacgtagtctgttctttttctcatttacatccgattggttcatgacatgtttttcttcatttacacatcatcggttcatgacatgttttagttgcattgcaagagcttaaactcacctggatccgacaccttgatcgttggcttttgttgtttctttgaatttcagcacagcaaacgcatatttgcaattccttaaacaataaaaaggtcttataattatcaaacattatataaattataaataacaatatatgaactaataattatattttaaaaataaaaagaatacaatgttattttttgttggctgtcttttaataactacaaaaagtatttagtcaagagactatgcaaatggattgtacatatttttgggcggtctgatgggtggaaacgagccccctataatcattttgcattagagctgaatgtattgagtcttattgatggtttgaagataaaaaatcatagtctataagacacgatctaaaatcatttagtgttgacttgctagactcgatgtcacaggctgtgcccctgcgcttggtctcagcccacgtggccacgtgcagtagttttgggatgacttgtttcagtatatgaggtggaaccatttcatgttcaaagtctaagaaatttcattctctatcaacactacaaaagtggttttgtcttatataataggatccatattgatagggaacgagaccttaagttggtgatagttaaaaaatatcaaatacttatgaaatgtttattatatctttt

SEQ ID NO: 48839 - DNA, 2105 bp, Zea Mays
acatagggttccgactactgccgccgacggcgtcgatgcatctacatatgagatctaaatgatgtgaaactttgaaagggaaagcgtccaatctgttcgattgtgatgtaccatgacagttctttcatattgaataggaagatctgatagattcttgaaacttgtttttgattctttcctctgtttagagatgtggatgatgacaacacaattaaaatacagttatccctgtctgattccttcaaaaagggtgctgagaacatttttctgacacatttctttattttattttcaatagttggtagaaaaaatagctgttttactattatcgttgatcttggcctttgatgacatgatggttacagacgaggcaaaattttgtctaatctgttgatatttatcatgaactaggacggtctgaggccatttggtgacatatgggtctttaccgcaattggtgttcagatattaacattcccaatcattaattatttttaaatgtttgtgtatatatataaataaatgtggctgtgacgacttggaaatattcaagctcaacagaccaaatcacatgtctatctctatagaagagattgatctgtatgccgactatccatttgaaccgagccatacgatttgtcttgttgtcctcagccatttacaatttaattctttttgtctttaatgtacaatttctgggttgtgttgtaatgatgtgtcaagagctccctctcctgatttcagaattaattgaattgcacttgctggcagattttgtttcatcagccttgttggcacctttttttgttgatgcttgcttttttggtccatgaactcttaaatcattgcagttcaaaattataaagtagtgtgttcacagttgagcctgtgatgattagctatacatttggaattaccatcagatttacttgtgaagactgttgtctggctttatgaggcttttgttccacacatctatattctatctgttttacaatgtttcagtttcatatcattagattactatgaatttccataggatattcaatatgattatttccctgtggtgctttgaataggcctaggcagtttattcatttttttcacatgtggattggagcctgatgacagtggctctgagttttattaggttttctggattgtttgttgaaacagtgttgttttactatcttttgattctttgttgttggctgctgtggtggaggttgatgatatggttttgtcgccccagtcttagatccggacttcccgtatctgtgctgattgacatcttatcgaatctgactccattgtatcaatttgcagtcaagtctgcttacgtagtctgttctttttctcatttacatccgattggttcatgacatgtttttcttcatttacacatcatcggttcatgacatgttttagttgcattgcaagagcttaaactcacctggatccgacaccttgatcgttggcttttgttgtttctttgaatttcagcacagcaaacgcatatttgcaattccttaaacaataaaaaggtcttataattatcaaacattatataaattataaataacaatatatgaactaataattatattttaaaaataaaaagaatacaatgttattttttgttggctgtcttttaataactacaaaaagtatttagtcaagagactatgcaaatggattgtacatatttttgggcggtctgatgggtggaaacgagccccctataatcattttgcattagagctgaatgtattgagtcttattgatggtttgaagataaaaaatcatagtctataagacacgatctaaaatcatttagtgttgacttgctagactcgatgtcacaggctgtgcccctgcgcttggtctcagcccacgtggccacgtgcagtagttttgggatgacttgtttcagtatatgaggtggaaccatttcatgttcaaagtctaagaaatttcattctctatcaacactacaaaagtggttttgtcttatataataggatccatattgatagggaacgagaccttaagttggtgatagttaaaaaatatcaaatacttatgaaatgtttattatatctttt

SEQ ID NO: 48840 - DNA, 2632 bp, Zea Mays
acatagggttccgactactgccgccgacggcgtcgatgcatctacatatgagagcggtgatgagcaatctttgtggactagagtttctgatactacgaaggtagtatttgacgaccaaacccttggctgtctgagctcccaattcacagtcttagccttttttgctgttcatatatgtactagactagtggtctttatttcctgttataatgctatggtatagtgagattttgagcaatgatgaacaactgtgttttggactagagtttctgatgctactacttcgttggtggtagttgaagaccaaacccttggctgtctgaactcatctcacaaaccatcattatgcttgttggttcttcgtagttattaaaaatatattttgttgcatgcgtccattaccaattccggaggatgattttgttccctcacggtataatggctcgggcgcaacatgctattctcttgatgtgcggtcatatccttattggttgcgttcttatgccaatccggccctggaaagctcgcatatagtattgacatgttaaatattctacattttcccccatttgtttcaggatctaaatgatgtgaaactttgaaagggaaagcgtccaatctgttcgattgtgatgtaccatgacagttctttcatattgaataggaagatctgatagattcttgaaacttgtttttgattctttcctctgtttagagatgtggatgatgacaacacaattaaaatacagttatccctgtctgattccttcaaaaagggtgctgagaacatttttctgacacatttctttattttattttcaatagttggtagaaaaaatagctgttttactattatcgttgatcttggcctttgatgacatgatggttacagacgaggcaaaattttgtctaatctgttgatatttatcatgaactaggacggtctgaggccatttggtgacatatgggtctttaccgcaattggtgttcagatattaacattcccaatcattaattatttttaaatgtttgtgtatatatataaataaatgtggctgtgacgacttggaaatattcaagctcaacagaccaaatcacatgtctatctctatagaagagattgatctgtatgccgactatccatttgaaccgagccatacgatttgtcttgttgtcctcagccatttacaatttaattctttttgtctttaatgtacaatttctgggttgtgttgtaatgatgtgtcaagagctccctctcctgatttcagaattaattgaattgcacttgctggcagattttgtttcatcagccttgttggcacctttttttgttgatgcttgcttttttggtccatgaactcttaaatcattgcagttcaaaattataaagtagtgtgttcacagttgagcctgtgatgattagctatacatttggaattaccatcagatttacttgtgaagactgttgtctggctttatgaggcttttgttccacacatctatattctatctgttttacaatgtttcagtttcatatcattagattactatgaatttccataggatattcaatatgattatttccctgtggtgctttgaataggcctaggcagtttattcatttttttcacatgtggattggagcctgatgacagtggctctgagttttattaggttttctggattgtttgttgaaacagtgttgttttactatcttttgattctttgttgttggctgctgtggtggaggttgatgatatggttttgtcgccccagtcttagatccggacttcccgtatctgtgctgattgacatcttatcgaatctgactccattgtatcaatttgcagtcaagtctgcttacgtagtctgttctttttctcatttacatccgattggttcatgacatgtttttcttcatttacacatcatcggttcatgacatgttttagttgcattgcaagagcttaaactcacctggatccgacaccttgatcgttggcttttgttgtttctttgaatttcagcacagcaaacgcatatttgcaattccttaaacaataaaaaggtcttataattatcaaacattatataaattataaataacaatatatgaactaataattatattttaaaaataaaaagaatacaatgttattttttgttggctgtcttttaataactacaaaaagtatttagtcaagagactatgcaaatggattgtacatatttttgggcggtctgatgggtggaaacgagccccctataatcattttgcattagagctgaatgtattgagtcttattgatggtttgaagataaaaaatcatagtctataagacacgatctaaaatcatttagtgttgacttgctagactcgatgtcacaggctgtgcccctgcgcttggtctcagcccacgtggccacgtgcagtagttttgggatgacttgtttcagtatatgaggtggaaccatttcatgttcaaagtctaagaaatttcattctctatcaacactacaaaagtggttttgtcttatataataggatccatattgatagggaacgagaccttaagttggtgatagttaaaaaatatcaaatacttatgaaatgtttattatatctttt

SEQ ID NO: 48841 - DNA, 2136 bp, Zea Mays
atcccgggacacgtacgtacgtacgtacatgatccctgtaacccaccacatccagtggcagtgctgccggctcgcttcatcaattttagaatggtaacagagcctatcagctctgttcccccagtagacacctaaactttgccacatagccaataacggatcggatcgccttcgtacttttcctacttgctatctccagcgctaggctatcagctagcactagcagcgccgtcactgttcgaagagatcagcgcagcgaactcgcagccgagagatcgatcgaggccggccggggccgagatgggcagcgtcggcgtcggttgcggctcgccggacgaggagcagcagaccgagggcagtggccctctgccgccgccggctgtctgcgtcacggggtccaccggctacgtcggctcctggctcgtccgcacgctgctgcggcgaggctaccgcgtccacgccaccgccagggacacaggtatgtatgtatgtatgtacacacggcgcgcgcgcgtgcgtgcgtcggcgctgcacatggccgaataactctgatgttggcgctgaccatatggccgagctctgatgccggcggcgttgcgcgcgcggtgcaccggtgccggtggtgttgcacgcacgcaggcaaggccttgcaggtgctcgccgtcgtggaagaagggagggaccggctcagggtgttcagggccgacatgggcgaggaagggagcttcgacgccgccgtcacgggatgcgtggcgctcttccacgtcgcggcctccatggacctccacgtatcacccgcccatcaggacaacctcgctttgagtatggcagtatgcatcatcttcatcttcctatggttcaagcaacgccacctagacgggccgaccagagaatccgccacgggcttgacagttgacaccatgaaggaactgcctactttccgactaggcagaagagtgcatcgagccatcgatcatcctcgtctattgctctttcacgaaacaagtgtgaggagcacgtgaggtcaagcatgctggagccggccacgaggggaaccatcaacgtgctgcggtcctgcgtccgcgccgggaccgtgcgccgggtcgtcttcacgtcctccgtcagcacgttgacggcggtggacgcggtggggcggcggaaggccgtgctcgacgagtcttgcctcagagccctcgacgacgtgtggcgcaccaagcccgtcggctgggtctacatcctgtccaagcggctgactgaggaggcggcgttcaggttcgcacgggagaacggcgtccacctcgtgtccctcgttctgccaaccgtcgccgggccgttcctcacgacaagcgtccctacgagcatccagctcctgctgtcacccatcacaggtgacccgaagctctactcggtgctggcctcagtgcacgccaggttcgggtgcgtcccgctggcgcacgtccaggacgtgtgtgacgcgcacgtcttactgatggaggcgccgcgcgccgaggggcggtacctgtgcgccgcgggcgggtacgcggcggcgcagctcgcgcggctcctcgcttcgcgctaccttccggccggtgacaggctgagcaaagatttcgacgacgtctcctgctcgccgccggtggtttcgtccaggaggctgttggatctggggttcaggttccggcacgacgtcgaggacgtggtgaaagacagtgttgcgcagtgtcttgcccatgggttcctggagcatcctgagacctgaatgcggcagagctgcaattcctagttggtttcaggcgttcagcaaatcagcggcgatctgaaggagaaggatgaatgcatggttgggctggggcctgggcccttaggctatccacatgttactctatatttactctacagactataccactattcctagcttaatcaccaaaattccttactctaaattactcaccaaaatttgtagcctcatatacctctatatatcaactactactacatagtctattttattctatttcattctaactacttttttctctatataatacaagattttgatatggacaacactagtaccttagcaacttgcttgcactatatttggagaaataatatatctactgttgagcatag

SEQ ID NO: 48842 - DNA, 578 bp, Zea Mays
cacgtcgtctctgccatggctacgagtggtctcttcaggctgagcaaagatttcgacgacgtctcctgctcgccgccggtggtttcgtccaggaggctgttggatctggggttcaggttccggcacgacgtcgaggacgtggtgaaagacagtgttgcgcagtgtcttgcccatgggttcctggagcatcctgagacctgaatgcggcagagctgcaattcctagttggtttcaggcgttcagcaaatcagcggcgatctgaaggagaaggatgaatgcatggttgggctggggcctgggcccttaggctatccacatgttactctatatttactctacagactataccactattcctagcttaatcaccaaaattccttactctaaattactcaccaaaatttgtagcctcatatacctctatatatcaactactactacatagtctattttattctatttcattctaactacttttttctctatataatacaagattttgatatggacaacactagtaccttagcaacttgcttgcactatatttggagaaataatatatctactgttgagcatag

SEQ ID NO: 48843 - DNA, 419 bp, Zea Mays
aaaacgctgaagaccaccttagaataaatatcaaatgtcattgacacatttgatcatgacaacatgaaatagttaagtactgaatctaccctgtgctacagtgaaataaaagtgtgcagtgacaaagtgtgttttatatctaagaatgtcgctgtcttagaaacagaggcaaaaatctttattaaggacactcaacaacaaagccaacttggtgattcgtataaactgacactcatctagttttctctaaaaaaggcagcatttcctagacagcagcatttccttgatcctctcaatctcactcgtcttcatctccttctgcctcctgaaaaaagggcagcgaccttcttgcattaggagattggaacattatttgacgctggaaagtacaactttacactaacaaacatcaaataaat

SEQ ID NO: 48844 - DNA, 508 bp, Zea Mays
gaaatatcagtggcctgatgtgttccaggctgtgttcaggtctatcaattattaagagccacatgtaaggttgtgcttttaccatgaaaagttgaaaggaatttcaagctgagtgctatatgttaatcatctagttggaaaaatagttcaagtggacaagtagatcgttggctactgccacaggctcatgagaacaaaatattgtcatcagtatatcatgaatcctcatgatgcacatcacaaacaatagtcatctattttacacacagcacttcagataaagttaataggtagagaaaatgtaattaagccagtttagtttgactgctacagaaacccatcaaacgctaagtagctaccaccacctatcaaccagcgaggtctcgaagctagctgactggggcatgaagcataattattctttcttgtaatggcatgaagcataatgatgcaaaagagaccgaagtaccaattgcgaaactgaagcaacaacactacaactatgaat

SEQ ID NO: 48845 - DNA, 1422 bp, Zea Mays
ccacgacacgtcattgccgtggcccagcgctagtttccagaagcagccgcgagcttccaccgccttcttcccgtgcattttctcgagcgacggagcgatccgttcgggccgtccaccacagcgagagagagcggcagaggcgcagagcgcaaccgagcgagagagagaggacggcgacggcggagatgatggggtggggagaggaggtggtggctctgtccctgcgaggctacggctatggcaacgaggaggacgaccggccggagaagccgcggcggtacggggtgacggagatgcggagccccttctactccttccgccccgcaaaccaggcgctccaggaaatattggattctcttagtccattcgttgatggtttgaagttctctggcggatgccatagtttgatgggaaaggagttggttagagagatcactgatctagcacacaggcatgacatttatgtgagcacaggtgattgggcagagcatttgctgcgccaaggaccctcttctttcaagcaatatgtagaggaatgcaaggccttagggtttgacacaattgagctgaatgctgggtctctcaacctccctgaagaggctctgttgagactagtccgcctcatcaagagtagtggtttaagggcaaagccaatgttttcggtgaagtttgacagttctgatattcctgcgtctggtgatagggcctttggggcttacatagctccagtcaaagggaagacctcagcgtgctgaatctctgaggacagacatcatcgccaagattgtaggccggctcgggcttgataaaaccatgtttgaagcttccaactccaacacctcggagtggttcgtcagacgttatggcccaagggtaaatctctttgttgaacactctgacgtgatgaatctggagcgcctccggggcttcaacatgcgcagaagcaactcggcctcccgttttgcctcgccgttcttcctgatctaatgggctaatggccattccccttcctgagatgtgtaagatacttctacatgttctcaccctcgcagagcttgttatggcctagagatgtaaccgcctttgttaatgcctcgatgtagcccccagcgagcagcgcatagcacctgttatgttgtcagcgtcgctactgataatcggttctgttggtcaatgctactataataatcggttgtggtgcaagtaatgtgaatagtgtaagagtgttttgtgttccattgcatcggtgagccaggtccttggattcatgtttgtactattgtatgcgtgtgaaatatcggaactttcagtttccagggcatgagagcacgtctccacatgaacttcaaaaattatttggtctcaaaagcaggacaacgccgaaaattgttttctggcacggacttcacgtttgccatcgtc

SEQ ID NO: 48846 - DNA, 1481 bp, Zea Mays
ccacgacacgtcattgccgtggcccagcgctagtttccagaagcagccgcgagcttccaccgccttcttcccgtgcattttctcgagcgacggagcgatccgttcgggccgtccaccacagcgagagagagcggcagaggcgcagagcgcaaccgagcgagagagagaggacggcgacggcggagatgatggggtggggagaggaggtggtggctctgtccctgcgaggctacggctatggcaacgaggaggacgaccggccggagaagccgcggcggtacggggtgacggagatgcggagccccttctactccttccgccccgcaaaccaggcgctccaggaaatattggattctcttagtccattcgttgatggtttgaagttctctggcggatgccatagtttgatgggaaaggagttggttagagagatcactgatctagcacacaggcatgacatttatgtgagcacaggtgattgggcagagcatttgctgcgccaaggaccctcttctttcaagcaatatgtagaggaatgcaaggccttagggtttgacacaattgagctgaatgctgggtctctcaacctccctgaagaggctctgttgagactagtccgcctcatcaagagtagtggtttaagggcaaagccaatgttttcggtgaagtttgacagttctgatattcctgcgtctggtgatagggcctttggggcttacatagctccagtcaaagggaagacctcagagagatgcttggaagcaggcgctgatatgatcatgatcgatgctgatgatgtttgccagcgtgctgaatctctgaggacagacatcatcgccaagattgtaggccggctcgggcttgataaaaccatgtttgaagcttccaactccaacacctcggagtggttcgtcagacgttatggcccaagggtaaatctctttgttgaacactctgacgtgatgaatctggagcgcctccggggcttcaacatgcgcagaagcaactcggcctcccgttttgcctcgccgttcttcctgatctaatgggctaatggccattccccttcctgagatgtgtaagatacttctacatgttctcaccctcgcagagcttgttatggcctagagatgtaaccgcctttgttaatgcctcgatgtagcccccagcgagcagcgcatagcacctgttatgttgtcagcgtcgctactgataatcggttctgttggtcaatgctactataataatcggttgtggtgcaagtaatgtgaatagtgtaagagtgttttgtgttccattgcatcggtgagccaggtccttggattcatgtttgtactattgtatgcgtgtgaaatatcggaactttcagtttccagggcatgagagcacgtctccacatgaacttcaaaaattatttggtctcaaaagcaggacaacgccgaaaattgttttctggcacggacttcacgtttgccatcgtc

SEQ ID NO: 48847 - DNA, 958 bp, Zea Mays
gtttgttccaccgagttggtaatctcatatggcattaaattagaatacacaattttttttatcttactagatgtctaccttatgatttgatcatgagatcatgttaatgtgtggtatgccccttcgaacatacctcatgtcagctttatctacttcgcaatcaatgctttcactttagatatggccatgctgcaatatccaatgcaatatcttttttgtgtgggggatttagattctaatccccttcttatgcagtgcattaagtattgaacgaggtttacatttggatgttgggttgtattgtcagtactttgtaccaaaaaaactttagtgtggtcgatttagattctaatccccttcttatgcagtacaactcaggtaacaagcaattacgatttcagacacgacaataggtattcttataacccctgcttcaaggggacttgaggagcagagacgaccatccaatgaacaacacatcctagaatggagctcaggaaccagggaatagatcggcaagcgaaaatcagggaagaccctaaaccctaacctttgggcaaaaatatgaagaacagaaatagtcagtgaatgagccaaaataaaacaaagcaagaagttcttagttacaagacgttggatctgcaatctatatctagaggaatgtggaactagagacctacctagacgaatcagacgacgaggaacaaaggaaactgtacctcacaaaacaaatgaagcccaaatggtactagatgaagcgtttgtgctgaagcggagtaggcgaggaagcccacaccaacaagactgaagcgacgtcgagaagagaaagggaagggagacgaaatagctcagaagagaagtgaggcacgatggaaggaagagtgtgctggaattctctcgacggagtgaacggagcacttttactctcacttttttaatccgacgatgttgttgtcac

SEQ ID NO: 48848 - DNA, 2380 bp, Zea Mays
cagccatggcgtatccttcagttggtagcactaactcatagtgtttttagtctaagaataagtactagataggatcatatgacatatatataaaccttgttcagttggtgaagcgtgggaagcaactgaacgctgagctagtgagcttcacttgtcttggaagcccttccaacgtgcgtctctactaagtaactcttgtggaggccacaaggtgcaaaatctctatcacagtgggcaaattaatcaacaaccgaaggaaactacttgacatgtctagctccgaaacctgtgaaaaaaaatggtccacatctggagtgtcgcaagcaagtagagctttgcccagacagattgagttttgcccagcactccagcatccatgccttaaaaggttatagttagaaagggggaggattgctaagcccttgccagttagccacatagagagaaggccttattattagatcatgccatttcttttcttacaaaattaacaaagtgcaaagcattactatggccacgaggaacagatagctacgaaatgaaactgtcgcaattatcatggaaaaaagccacacatttccttatccattttgtttggtagcgccacatagaaacaaaacttcatgtcacgatttgcatagttatctcaacacatgtggcgaatagaaaaggagaaagagaaaaataaacacaagattcttaaccataataagatataatttgtgtcgggcatttgcatagtcacatgcttatcccatggggaacgttaaaggtttgcttgcacggcaggaccattcctgattccctagatggtagttagatgacggcgataggagccgaggcccaactgcccagtgatgtattggccgtgttgtttatgtgatctgtcatggatgtcctactatgattcaaggatttaggacatgcgcagaactgccagcaatgaaaagtcgaagaaagagatattgacttcgagggggagaaatgtagtccactatgagaaaagagatacccaatgtctctggagaaaaagatctgaggatgggacctgcagcagcaaaagcgcaaagcttcgatgtcaccgccatccacctaccctccatcgcccaaactgtctctgtctctgtaacgcgaattttattttacacaacagcaaagtgaaaaactggagtagggggttcgcttgcctcagcaaccgtcgcgtagcttgcgcgcctcggcgctggaacggggaatctggaggcgggcacgcatctcccaagcaatctcgcgtggcctcgcgtagcgtgcgaggagacacgcagagagggagggagagagaaagagagccttgaccccgccgtcctcgtcctgtcgtcctgatagctgatgcagtgatgctgatcagctgatgcgtgcggagctcgctcgtggagccgaggccctagcctgtagcctctcacggcggtagaacgagcacccatgggcctcactggatcacctaagcgtcttccaggcccatctgtgcctcacctgaggcctgtctcatttagtgacgaggcccaacccaccagcgtcagaatacaagagcgcgttatcctctctcttccggttccgggcaactcgaagaagccgcgtgcgttatcctttgagcagtttgggcgctgagcaagtccagtgagagagggagagcggcgagaggatggctgggatggcatcgctgcagggcgccatggcgtcgctctccatctccgcgctaggcgcggcgacggcgagcagcagcagcttctggggcaaccggctcgccacctactccgcgccgcagcctggggtctgttcctgcttcccaattccgttccgttctgctgatggtttggtagataataagtagctgttctggtgaaagattttactctggagtttctggatagcgttgcaaagcgcggtcggatggaattgttctagggacattcgagcttgcattacggttttggagctagtctgtatggattggatgcaatgaaatggaaaattacctttgcattgttattaattgtgcattttcaaggatgacaaaccaggcttctaatatgactatgtttaggggtgtttgacatcactctagagcaaaactttaaggaagacctggacaaagtcaactaaacaccctaattctagagttgcaaactctatagagttttgagagttgtagtataattttttggagtacattttttgctactttgaaaaatccttcaaaaacaatcaagacacatccaatgcactggttatgagaaagcaatctacacttcggagcagatatacttcacccaaagttttggagtagaactatgccaaactcgcccttattagatttcatattacattaagtttctatttg

SEQ ID NO: 48849 - DNA, 2100 bp, Zea Mays
cagccatggcgtatccttcagttggtagcactaactcatagtgtttttagtctaagaataagtactagataggatcatatgacatatatataaaccttgttcagttggtgaagcgtgggaagcaactgaacgctgagctagtgagcttcacttgtcttggaagcccttccaacgtgcgtctctactaagtaactcttgtggaggccacaaggtgcaaaatctctatcacagtgggcaaattaatcaacaaccgaaggaaactacttgacatgtctagctccgaaacctgtgaaaaaaaatggtccacatctggagtgtcgcaagcaagtagagctttgcccagacagattgagttttgcccagcactccagcatccatgccttaaaaggttatagttagaaagggggaggattgctaagcccttgccagttagccacatagagagaaggccttattattagatcatgccatttcttttcttacaaaattaacaaagtgcaaagcattactatggccacgaggaacagatagctacgaaatgaaactgtcgcaattatcatggaaaaaagccacacatttccttatccattttgtttggtagcgccacatagaaacaaaacttcatgtcacgatttgcatagttatctcaacacatgtggcgaatagaaaaggagaaagagaaaaataaacacaagattcttaaccataataagatataatttgtgtcgggcatttgcatagtcacatgcttatcccatggggaacgttaaaggtttgcttgcacggcaggaccattcctgattccctagatggtagttagatgacggcgataggagccgaggcccaactgcccagtgatgtattggccgtgttgtttatgtgatctgtcatggatgtcctactatgattcaaggatttaggacatgcgcagaactgccagcaatgaaaagtcgaagaaagagatattgacttcgagggggagaaatgtagtccactatgagaaaagagatacccaatgtctctggagaaaaagatctgaggatgggacctgcagcagcaaaagcgcaaagcttcgatgtcaccgccatccacctaccctccatcgcccaaactgtctctgtctctgtaacgcgaattttattttacacaacagcaaagtgaaaaactggagtagggggttcgcttgcctcagcaaccgtcgcgtagcttgcgcgcctcggcgctggaacggggaatctggaggcgggcacgcatctcccaagcaatctcgcgtggcctcgcgtagcgtgcgaggagacacgcagagagggagggagagagaaagagagccttgaccccgccgtcctcgtcctgtcgtcctgatagctgatgcagtgatgctgatcagctgatgcgtgcggagctcgctcgtggagccgaggccctagcctgtagcctctcacggcggtagaacgagcacccatgggcctcactggatcacctaagcgtcttccaggcccatctgtgcctcacctgaggcctgtctcatttagtgacgaggcccaacccaccagcgtcagaatacaagagcgcgttatcctctctcttccggttccgggcaactcgaagaagccgcgtgcgttatcctttgagcagtttgggcgctgagcaagtccagtgagagagggagagcggcgagaggatggctgggatggcatcgctgcagggcgccatggcgtcgctctccatctccgcgctaggcgcggcgacggcgagcagcagcagcttctggggcaaccggctcgccacctactccgcgccgcagcctggggtaaggtttatggtcaagatatgcccaattgaaatgagacttaagagatgggagcgaaagaagtgtaaaccaaacagtcttcctgtgctgcacaagatgcatgttaggatcggggacacggtacaggttattgcaggccgtgagaaaggaaaggttggagaagtcacacgccttttcaagcacaacagcacggtgatcgtgaaggacctgaacttgaagtcgaagcacaagaaaggcacagacgatgaacccggtgaaatcgtcatggtcagcaaaatttctattgaact

SEQ ID NO: 48850 - DNA, 495 bp, Zea Mays
ctcgatccacccatcgcttctcccgctcgtcctcctcctctcctcctggacagcagagcacagcacaacacaccgagaaagaacaagcagccgccaccggagctcagaaccaccatcagcagcagcagcacacccggtcaaccttccacacacgcgcgcacacacacatggcgtcgcagcagaggcaacagcaggcgggagcggcggtggctcgacgacgccgtcgaccaggcggcccgcttcctcttcaccagctgatgatgacgacgacgatgattgataactaataattaaggctactagatgatcgttgagatgtttcttcttcttcttcttcctcctcctcttgccgctgttcatatagctggatggatcaggacttgtgctgatcggtcgatggattccatccatgtgtactcgtctgctgttctttccttcccaattcccatgttccaatggagtctggattcattaacatgctttctcctttctgac

SEQ ID NO: 48851 - DNA, 483 bp, Zea Mays
cccatcgcttctcccgctcgtcctcctcctctcctcctggacagcagagcacagcacaacacaccgagaaagaacaagcagccgccaccggagctcagaaccaccatcagcagcagcagcacacccggtcaaccttccacacacgcgcgcacacacacatggcgtcgcagcagaggcaacagcaggcgggagcggtggctcgacgacgccgtcgaccaggcggcccgcttcctcttcaccagctgatgatgacgacgacgatgattgataactaataattaaggctactagatgatcgttgagatgtttcttcttcttcttcttcctcctcctcttgccgctgttcatatagctggatggatcaggacttgtgctgatcggtcgatggattccatccatgtgtactcgtctgctgttctttccttcccaattcccatgttccaatggagtctggattcattaacatgctttctcctttctgac

SEQ ID NO: 48852 - DNA, 474 bp, Zea Mays
atcgcttctcccgctcgtcctcctcctctcctcctggacagcagagcacagcacaacacaccgagaaagaacaagcagccgccaccggagctcagaaccaccatcagcagcagcagcacacccggtcaaccttccacacacgcgcgcacacacacatggcgtcgcagcagaggcaacagcaggcggtggctcgacgacgccgtcgaccaggcggcccgcttcctcttcaccagctgatgatgacgacgacgatgattgataactaataattaaggctactagatgatcgttgagatgtttcttcttcttcttcttcctcctcctcttgccgctgttcatatagctggatggatcaggacttgtgctgatcggtcgatggattccatccatgtgtactcgtctgctgttctttccttcccaattcccatgttccaatggagtctggattcattaacatgctttctcctttctgac

SEQ ID NO: 48853 - DNA, 459 bp, Zea Mays
gtaattttagggcacctgacaggatgctggcatcgctggcctgaacagcaagacgcacatgaagatcctactgaaatggatgacggggagaaatgtcgtgaagctgacctgcgtgcacgtgggcaacgcgaagaagtcctctactcccggtccactgaaagcagcagcagcgccggcgcatcaccgtcatccacatcggcctcgcagtgacggtcagtcgccgttaagccttggtgtggttcttgatgttgctttgtagatcgatggaggctgcctccggtcatggtgatcccatgtttaaccttgatgacgaacattggaaaaagcattttgttttatggactggaatagtctgcaaacatcacgatagcaatattgttctgctgctcatcagctgaggatgctgccctgtcctgaactcctgattttgcttttgatctactatgtgatgatttgctc

SEQ ID NO: 48854 - DNA, 429 bp, Zea Mays
acaccatctctaggccgcgtctcgcctcgtctcgtcgtccgatcattatctccctgactcgcctcgtcctccagatatcggccgccaccttcacctccaccgccccggcgcacctgtgcgtctccatcgtcgccgcctctcctccttcggacacgactgaccttccactggcgccaacgaagaaaacacataggaagaagctcaccgccaaacctcatccagatccagtcgctgccctccgaaggccgcatacggaacgtctcgtctcttcctttggatccggcggtcaactccatcacccccagcttcacctcccttagtccccctccgtccgctctcacccaccgcttctatatcgccacctctctcgttgtagaagaagacactgaggatctggttaagaagtattatcatgtgacctgccttttg

SEQ ID NO: 48855 - DNA, 409 bp, Zea Mays
acaccatctctaggccgcgtctcgcctcgtctcgtcgtccgatcattatctccctgactcgcctcgtcctccagatatcggccgccaccttcacctccaccgccccggcgcacctgtgcgtctccatcgtcgccgcctctcctccttcggacacgactgaccttccactggcgccaacgaagaaaacacataggaagaagctcaccgccaaacctcatccagatccagtcgctgccctccgaaggccgcatacggaacgtctcgtctcttcctttggatccggcggtcaactccatcacccccagcttcacctcccttagtccccctccgtccgctctcacccaccgcttctatatcgccacctctctcgttgtagaagaagacactgaggatctgatgtgcatgcttg

SEQ ID NO: 48856 - DNA, 2048 bp, Zea Mays
acggcacgcacggagcgtccatccaaagcaacaaaaactccgcccgtccccacgccaccccgcctcgcgcttgccgttgccgcctccgacccgctgcttcattcgtcgcttctactactgctatgctatagcatatactccagtcgttgcccccgccgccgccgccgccgccgcctcgacgcatccgaggaggaggagaaggagaggccggccgggtagccattcgcgtgcgatcgcggcagaggagggcggcggtatatagacgatgggcctcgtcggcggtgtcgtcggcttctgcctcggcctccccatcggcctcgccgccgcgtacttcgtctacctccgctacttcgccgccgctcgccgcctccaggatcctgtcattaaacctctacgagatttagattctgaaaccctgcaggcaacaataccacatattccattatgggtgaagagcccagactacgagcggattgactggatgaacaagtttatttttgacatgtggccttttctggataaggttctttcaactttttattcttatttggcaatatgcaagcatataaatcgtgctacaaggccaatatttgatcaatatgttggacaatatggtatagaatcaattgaatttggagagttgacacttgggactcttccacctacatttcaaggcattaaagtttacgaaatgttagaaaaagagttggtaattgagcctgtgattcggtgggctagtacatcaaatgtaacagtgaacgtaaaggtgcaatctttcgaagtgacggttcagcttgaagatttgcatataatgctgacaccacgtgtgattttgaagtcacttgtgccaagctttccctgttttgctaacttgtgtgtttcactaatggaaaagccacgtatagattttggattgaaactcttgtgtggagatgtcatggcaataccaggcttgtatcaatatgttcaagatcaattatcaaagcaaatctcaaatttgtatcactggcctaaggttatacagattcctatcttagatggagcaagtggcgctacaaagaagccagttggaatcttgcatgtaaaggtaattagagccctgaatcttctcaagatggactttctcggcaaatctgatccctatgtgaagatgcgcctgagtggtgagagactgccctcgaagaaaacatctgtcaagatgagcaacctgaatcctgagtggaatgaacacttcaggttcatagtcaaggatcctgatacccaagtccttgagcttcacatgtttgattgggaaaaggttaagatgcatgataaattgggcatgcaagtaattcccctccgcttgcttacaccttacgagagcaaattattcacgctcgaccttgttcgaagcatgaacccaaacgatccgcagaacaagaagaacagagggaagctcatcgttgagttgacatttgatcccttaagagaagacaatatgtcttcagatgctgaaggtaatgctagcgtgagaagggatgcggacggtggtggtgggggggtgctgttggtttcggtagaaaatgcggaagacgtcgaagggaagcggcatactaatccatacgctgaggtccttttcaggggagagcggaagaaaacaaaggtgataaggaaaacaagagagccaagatggagcgaggagttccagttcatggtagacgagcctccggtggaagataagatccacatccaagtcaaaagcaaacgccgcgggcttcccttccgcaacaaggaatcgctggggcatgtgaatataaacctggtggatgtggtgaacaacggccggatcaacgagaagtaccacctcatcaactccaggaacgggatgatacacgtggagatcaaatggagcactgtgtgattattcagctcgtgtaatgtttaacatcaacgggctgccaagaggcgtgtgactggtttgtgagttgttgccgttattattataaaaaaaccgatcggtcggggcttctttggttgcttcctatggcaacatttggtaccttcacaag

SEQ ID NO: 48857 - DNA, 2466 bp, Zea Mays
cgtccatccaaagcaacaaaaactccgcccgtccccacgccaccccgcctcgcgcttgccgttgccgcctccgacccgctgcttcattcgtcgcttctactactgctatgctatagcatatactccagtcgttgcccccgccgccgccgccgccgccgcctcgacgcatccgaggaggaggagaaggagaggccggccgggtagccattcgcgtgcgatcgcggcagaggagggcggcggtatatagacgatgggcctcgtcggcggtgtcgtcggcttctgcctcggcctccccatcggcctcgccgccgcgtacttcgtctacctccgctacttcgccgccgctcgccgcctccaggatcctgtcattaaacctctacgagatttagattctgaaaccctgcaggcaacaataccacatattccattatgggtgaagagcccagactacgagcgggtgtaagtcaactgctttgtttactcaaaccttgaggaacatctctttatagaatattgactggatgaacaagtttatttttgacatgtggccttttctggataaggcaatatgcaagcatataaatcgtgctacaaggccaatatttgatcaatatgttggacaatatggtatagaatcaattgaatttggagagttgacacttgggactcttccacctacatttcaaggcattaaagtttacgaaatgttagaaaaagagttggtaattgagcctgtgattcggtgggctagtacatcaaatgtaacagtgaacgtaaaggtgcaatctttcgaagtgacggttcagcttgaagatttgcatataatgctgacaccacgtgtgattttgaagtcacttgtgccaagctttccctgttttgctaacttgtgtgtttcactaatggaaaaggtatgtattatatgtgccttccgcctgcacttaataattttattgaagactactaactcaagttttgtgggtatagccacgtatagattttggattgaaactcttgtgtggagatgtcatggcaataccaggcttgtatcaatatgttcaagtaactgctcctctggcttttgtattaaaaaacattcacaaacccttgagtaatgtactgtataggcacaggcatgtataacatgttcactctggtcttattagccttttcttcttcaggatcaattatcaaagcaaatctcaaatttgtatcactggcctaaggttatacagattcctatcttagatggagcaagtggcgctacaaagaagccagttggaatcttgcatgtaaaggtaattagagccctgaatcttctcaagatggactttctcggcaaatctgatccctatgtgaagatgcgcctgagtggtgagagactgccctcgaagaaaacatctgtcaagatgagcaacctgaatcctgagtggaatgaacacttcaggttcatagtcaaggatcctgatacccaagtccttgagcttcacatgtttgattgggaaaaggtttctagcagtatgcaacttatctacttctgatatgttcataatcctcattttgatgcaattcatgctttttttttcaccctgatttgcattggcaagagagacacgccaaccggataaccttagcgtgttttctgattgttcaaggttaagatgcatgataaattgggcatgcaagtaattcccctccgcttgcttacaccttacgagagcaaattattcacgctcgaccttgttcgaagcatgaacccaaacgatccgcagaacaagaagaacagagggaagctcatcgttgagttgacatttgatcccttaagagaagacaatatgtcttcagatgctgaaggtaatgctagcgtgagaagggatgcggacggtggtggtgggggggtgctgttggtttcggtagaaaatgcggaagacgtcgaagggaagcggcatactaatccatacgctgaggtccttttcaggggagagcggaagaaaacaaagtgctagctccagcttccacagaaagacattgccagactggtgcagttcgttttagtcaaaggtgtgataaggaaaacaagagagccaagatggagcgaggagttccagttcatggtagacgagcctccggtggaagataagatccacatccaagtcaaaagcaaacgccgcgggcttcccttccgcaacaaggaatcgctggggcatgtgaatataaacctggtggatgtggtgaacaacggccggatcaacgagaagtaccacctcatcaactccaggaacgggatgatacacgtggagatcaaatggagcactgtgtgattattcagctcgtgtaatgtttaacatcaacgggctgccaagaggcgtgtgactggtttgtgagttgttgccgttattattataaaaaaaccgatcggtcggggcttctttggttgcttcctatggcaacatttggtaccttcacaag

SEQ ID NO: 48858 - DNA, 2061 bp, Zea Mays
cgtccatccaaagcaacaaaaactccgcccgtccccacgccaccccgcctcgcgcttgccgttgccgcctccgacccgctgcttcattcgtcgcttctactactgctatgctatagcatatactccagtcgttgcccccgccgccgccgccgccgccgcctcgacgcatccgaggaggaggagaaggagaggccggccgggtagccattcgcgtgcgatcgcggcagaggagggcggcggtatatagacgatgggcctcgtcggcggtgtcgtcggcttctgcctcggcctccccatcggcctcgccgccgcgtacttcgtctacctccgctacttcgccgccgctcgccgcctccaggatcctgtcattaaacctctacgagatttagattctgaaaccctgcaggcaacaataccacatattccattatgggtgaagagcccagactacgagcgggtgtaagtcaactgctttgtttactcaaaccttgaggaacatctctttatagaatattgactggatgaacaagtttatttttgacatgtggccttttctggataaggcaatatgcaagcatataaatcgtgctacaaggccaatatttgatcaatatgttggacaatatggtatagaatcaattgaatttggagagttgacacttgggactcttccacctacatttcaaggcattaaagtttacgaaatgttagaaaaagagttggtaattgagcctgtgattcggtgggctagtacatcaaatgtaacagtgaacgtaaaggtgcaatctttcgaagtgacggttcagcttgaagatttgcatataatgctgacaccacgtgtgattttgaagtcacttgtgccaagctttccctgttttgctaacttgtgtgtttcactaatggaaaagccacgtatagattttggattgaaactcttgtgtggagatgtcatggcaataccaggcttgtatcaatatgttcaagatcaattatcaaagcaaatctcaaatttgtatcactggcctaaggttatacagattcctatcttagatggagcaagtggcgctacaaagaagccagttggaatcttgcatgtaaaggtaattagagccctgaatcttctcaagatggactttctcggcaaatctgatccctatgtgaagatgcgcctgagtggtgagagactgccctcgaagaaaacatctgtcaagatgagcaacctgaatcctgagtggaatgaacacttcaggttcatagtcaaggatcctgatacccaagtccttgagcttcacatgtttgattgggaaaaggttaagatgcatgataaattgggcatgcaagtaattcccctccgcttgcttacaccttacgagagcaaattattcacgctcgaccttgttcgaagcatgaacccaaacgatccgcagaacaagaagaacagagggaagctcatcgttgagttgacatttgatcccttaagagaagacaatatgtcttcagatgctgaaggtaatgctagcgtgagaagggatgcggacggtggtggtgggggggtgctgttggtttcggtagaaaatgcggaagacgtcgaagggaagcggcatactaatccatacgctgaggtccttttcaggggagagcggaagaaaacaaaggtgataaggaaaacaagagagccaagatggagcgaggagttccagttcatggtagacgagcctccggtggaagataagatccacatccaagtcaaaagcaaacgccgcgggcttcccttccgcaacaaggaatcgctggggcatgtgaatataaacctggtggatgtggtgaacaacggccggatcaacgagaagtaccacctcatcaactccaggaacgggatgatacacgtggagatcaaatggagcactgtgtgattattcagctcgtgtaatgtttaacatcaacgggctgccaagaggcgtgtgactggtttgtgagttgttgccgttattattataaaaaaaccgatcggtcggggcttctttggttgcttcctatggcaacatttggtaccttcacaag

SEQ ID NO: 48859 - DNA, 528 bp, Zea Mays
caaaaactccgcccgtccccacgccaccccgcctcgcgcttgccgttgccgcctccgacccgctgcttcattcgtcgcttctactactgctatgctatagcatatactccagtcgttgcccccgccgccgccgccgccgccgcctcgacgcatccgaggaggaggagaaggagaggccggccgggtagccattcgcgtgcgatcgcggcagaggagggcggcggtatatagacgatgggcctcgtcggcggtgtcgtcggcttctgcctcggcctccccatcggcctcgccgccgcgtacttcgtctacctccgctacttcgccgccgctcgccgcctccaggatcctgtcattaaacctctacgagatttagattctgaaaccctgcaggcaacaataccacatattccattatgggtgaagagcccagactacgagcgggtgtaagtcaactgctttgtttactcaaaccttgaggaacatctctttatagaatgttgtcgccggcccgaagctcctcaacagtcg

SEQ ID NO: 48860 - DNA, 2010 bp, Zea Mays
aaaactccgcccgtccccacgccaccccgcctcgcgcttgccgttgccgcctccgacccgctgcttcattcgtcgcttctactactgctatgctatagcatatactccagtcgttgcccccgccgccgccgccgccgccgcctcgacgcatccgaggaggaggagaaggagaggccggccgggtagccattcgcgtgcgatcgcggcagaggagggcggcggtatatagacgatgggcctcgtcggcggtgtcgtcggcttctgcctcggcctccccatcggcctcgccgccgcgtacttcgtctacctccgctacttcgccgccgctcgccgcctccaggatcctgtcattaaacctctacgagatttagattctgaaaccctgcaggcaacaataccacatattccattatgggtgaagagcccagactacgagcggattgactggatgaacaagtttatttttgacatgtggccttttctggataaggttctttcaactttttattcttatttggcaatatgcaagcatataaatcgtgctacaaggccaatatttgatcaatatgttggacaatatggtatagaatcaattgaatttggagagttgacacttgggactcttccacctacatttcaaggcattaaagtttacgaaatgttagaaaaagagttggtaattgagcctgtgattcggtgggctagtacatcaaatgtaacagtgaacgtaaaggtgcaatctttcgaagtgacggttcagcttgaagatttgcatataatgctgacaccacgtgtgattttgaagtcacttgtgccaagctttccctgttttgctaacttgtgtgtttcactaatggaaaagtggcgctacaaagaagccagttggaatcttgcatgtaaaggtaattagagccctgaatcttctcaagatggactttctcggcaaatctgatccctatgtgaagatgcgcctgagtggtgagagactgccctcgaagaaaacatctgtcaagatgagcaacctgaatcctgagtggaatgaacacttcaggttcatagtcaaggatcctgatacccaagtccttgagcttcacatgtttgattgggaaaaggtttctagcagtatgcaacttatctacttctgatatgttcataatcctcattttgatgcaattcatgctttttttttcaccctgatttgcattggcaagagagacacgccaaccggataaccttagcgtgttttctgattgttcaaggttaagatgcatgataaattgggcatgcaagtaattcccctccgcttgcttacaccttacgagagcaaattattcacgctcgaccttgttcgaagcatgaacccaaacgatccgcagaacaagaagaacagagggaagctcatcgttgagttgacatttgatcccttaagagaagacaatatgtcttcagatgctgaaggtaatgctagcgtgagaagggatgcggacggtggtggtgggggggtgctgttggtttcggtagaaaatgcggaagacgtcgaagggaagcggcatactaatccatacgctgaggtccttttcaggggagagcggaagaaaacaaaggtgataaggaaaacaagagagccaagatggagcgaggagttccagttcatggtagacgagcctccggtggaagataagatccacatccaagtcaaaagcaaacgccgcgggcttcccttccgcaacaaggaatcgctggggcatgtgaatataaacctggtggatgtggtgaacaacggccggatcaacgagaagtaccacctcatcaactccaggaacgggatgatacacgtggagatcaaatggagcactgtgtgattattcagctcgtgtaatgtttaacatcaacgggctgccaagaggcgtgtgactggtttgtgagttgttgccgttattattataaaaaaaccgatcggtcggggcttctttggttgcttcctatggcaacatttggtaccttcacaag

SEQ ID NO: 48861 - DNA, 1535 bp, Zea Mays
gttctttcaactttttattcttatttggcaatatgcaagcatataaatcgtgctacaaggccaatatttgatcaatatgttggacaatatggtatagaatcaattgaatttggagagttgacacttgggactcttccacctacatttcaaggcattaaagtttacgaaatgttagaaaaagagttggtaattgagcctgtgattcggtgggctagtacatcaaatgtaacagtgaacgtaaaggtgcaatctttcgaagtgacggttcagcttgaagatttgcatataatgctgacaccacgtgtgattttgaagtcacttgtgccaagctttccctgttttgctaacttgtgtgtttcactaatggaaaagccacgtatagattttggattgaaactcttgtgtggagatgtcatggcaataccaggcttgtatcaatatgttcaagatcaattatcaaagcaaatctcaaatttgtatcactggcctaaggttatacagattcctatcttagatggagcaagtggcgctacaaagaagccagttggaatcttgcatgtaaaggtaattagagccctgaatcttctcaagatggactttctcggcaaatctgatccctatgtgaagatgcgcctgagtggtgagagactgccctcgaagaaaacatctgtcaagatgagcaacctgaatcctgagtggaatgaacacttcaggttcatagtcaaggatcctgatacccaagtccttgagcttcacatgtttgattgggaaaaggtttctagcagttaagatgcatgataaattgggcatgcaagtaattcccctccgcttgcttacaccttacgagagcaaattattcacgctcgaccttgttcgaagcatgaacccaaacgatccgcagaacaagaagaacagagggaagctcatcgttgagttgacatttgatcccttaagagaagacaatatgtcttcagatgctgaaggtaatgctagcgtgagaagggatgcggacggtggtggtgggggggtgctgttggtttcggtagaaaatgcggaagacgtcgaagggaagcggcatactaatccatacgctgaggtccttttcaggggagagcggaagaaaacaaaggtgataaggaaaacaagagagccaagatggagcgaggagttccagttcatggtagacgagcctccggtggaagataagatccacatccaagtcaaaagcaaacgccgcgggcttcccttccgcaacaaggaatcgctggggcatgtgaatataaacctggtggatgtggtgaacaacggccggatcaacgagaagtaccacctcatcaactccaggaacgggatgatacacgtggagatcaaatggagcactgtgtgattattcagctcgtgtaatgtttaacatcaacgggctgccaagaggcgtgtgactggtttgtgagttgttgccgttattattataaaaaaaccgatcggtcggggcttctttggttgcttcctatggcaacatttggtaccttcacaag

SEQ ID NO: 48862 - DNA, 1103 bp, Zea Mays
ttcatctattagtcacaacaaaacttaatgtagatttaactattatttatgacaaacattttctactctttattctatgaaccatattgcagtggcgctacaaagaagccagttggaatcttgcatgtaaaggtaattagagccctgaatcttctcaagatggactttctcggcaaatctgatccctatgtgaagatgcgcctgagtggtgagagactgccctcgaagaaaacatctgtcaagatgagcaacctgaatcctgagtggaatgaacacttcaggttcatagtcaaggatcctgatacccaagtccttgagcttcacatgtttgattgggaaaaggtttctagcagttaagatgcatgataaattgggcatgcaagtaattcccctccgcttgcttacaccttacgagagcaaattattcacgctcgaccttgttcgaagcatgaacccaaacgatccgcagaacaagaagaacagagggaagctcatcgttgagttgacatttgatcccttaagagaagacaatatgtcttcagatgctgaaggtaatgctagcgtgagaagggatgcggacggtggtggtgggggggtgctgttggtttcggtagaaaatgcggaagacgtcgaagggaagcggcatactaatccatacgctgaggtccttttcaggggagagcggaagaaaacaaaggtgataaggaaaacaagagagccaagatggagcgaggagttccagttcatggtagacgagcctccggtggaagataagatccacatccaagtcaaaagcaaacgccgcgggcttcccttccgcaacaaggaatcgctggggcatgtgaatataaacctggtggatgtggtgaacaacggccggatcaacgagaagtaccacctcatcaactccaggaacgggatgatacacgtggagatcaaatggagcactgtgtgattattcagctcgtgtaatgtttaacatcaacgggctgccaagaggcgtgtgactggtttgtgagttgttgccgttattattataaaaaaaccgatcggtcggggcttctttggttgcttcctatggcaacatttggtaccttcacaag

SEQ ID NO: 48863 - DNA, 2117 bp, Zea Mays
attcggcttgctcgaaggtaaaggcgtgaatgcaatttcgatccaacgatctccgtatgggggtactgttcatctatttataggcaatcgtacagttcgtacgatattacattcatgcccttaaagattatatacaaggtttacaaaatgtcatcataacgaaggttgcttcgtcgcgctaccattgatctatgtcaaagctttttcgataacgaggctcatgaaacacttggaaacatgctgataacaaatggttagccatgtttttgaggaccttcagaagacgaaggcccctaacagtagcccctcgcagtattagtttatttctttgtaataaattcagactgcgatacaaacgaaggcatttagccgaaggtccgaaaaagcacattccctttgctagaatagtgaaacattctatatcgtggggtctctcaaaatggatgaatgagctctaatatctttattagggctcatttggataccttcttatctatctgaatcctagccactagcacctctccctcccccttctcccacctggccatcgccggagggagccgccggaggacatgtggaccccaacgaaggcgactgcggggcccttcttccctgtgacctggatatgggcggtggtggcgtgtgtgccctccacctcgccactttggtcatggggctgtgggtgcgactgttgaggagcttcgggccggcgacaacctggagctagggcttacataatgctaatattaagatgaaatttcaaagaaacaatgttattctatagataaaattctattagtttcaaacataaagaaatcataaatttattttgggtaaaacacgaacaaggtcccattttgtccataggacttacattctataaagagatgttcctcaaggtttgagtaaacaaagcagttgacttacacctgcattcactcattaattaaaaagggaccgatatactatggacattccatcaagtaacaagaataaatcaatggaatgattagtagcgtaataagaactaagaagtacgtactcacccgctcgtagtctgggctcttcacccataatggaatatgtggtattgttgcctgcagggtttcagaatctaaatctcgtagaggtttaatgacaggatcctgtaaattcaaccattaaaaattaaccagattacgtcgcaatattattattgacacagcgcaacaatgaccataatggctacatctatggaaatttatatgccttgataaaacatggccgaagtaataataattcactaattggtgatgcataggtgcaagggtagtatcaatcacataaggccttgttcggcaccttggaaaattttttccaggttggttttttccccatatggattgggtgaatccaagcctttcacccaatcccttatgggattaaatccataaacccaatcaacctatgtttgttcgtttattccatatggattatattctaaaacacacacaactatgtttgttcgtttattccatgtggattaaataccaaacctaaataccaacaaaagcaaataaaatcaacacaatttaagcatagaccatatcatatctctagaaatttaagcatagaacatgtcgatctctctagaaatttaagcatgccatacaattctcgatacatattttttgttcaaattaaacatcttttaaagatgcgtcaactggcatcacgtgacttgactttcaccttctctagggatgctgataatatctttatctttggaccctccaggcttagctccagcgccggacggaactcctgttgctcaaggcggcggtgagacgagacgaggcagcgacggcgagacggggacgaggcggcaacggcaagacagggacgaggcggcaacggcaagatagggacgaggcggtgagggcggcgtgctcagtcgcgtgcggcggcgcgctcagtcgcgtgcggcgtgcggcgtgcggcgagttggatgcgttccagaacaaacgagctagggttataatccaggagtacaagagtaaaaaaatgatctaagcctctgggctacaaaccatactgggcttaaccgaatggaaaaaagaaatcattctggatttttt

SEQ ID NO: 48864 - DNA, 2454 bp, Zea Mays
acgaaggttgcttcgtcgcgctaccattgatctatgtcaaagctttttcgataacgaggctcatgaaacacttggaaacatgctgataacaaatggttagccatgtttttgaggaccttcagaagacgaaggcccctaacagtagcccctcgcagtattagtttatttctttgtaataaattcagactgcgatacaaacgaaggcatttagccgaaggtccgaaaaagcacattccctttgctagaatagtgaaacattctatatcgtggggtctctcaaaatggatgaatgagctctaatatctttattagggctcatttggataccttcttatctatctgaatcctagccactagcacctctccctcccccttctcccacctggccatcgccggagggagccgccggaggacatgtggaccccaacgaaggcgactgcggggcccttcttccctgtgacctggatatgggcggtggtggcgtgtgtgccctccacctcgccactttggtcatggggctgtgggtgcgactgttgaggagcttcgggccggcgacaacctggagctagggcttacataatgctaatattaagatgaaatttcaaagaaacaatgttattctatagataaaattctattagtttcaaacataaagaaatcataaatttattttgggtaaaacacgaacaaggtcccattttgtccataggacttacattctataaagagatgttcctcaaggtttgagtaaacaaagcagttgacttacacctgcattcactcattaattaaaaagggaccgatatactatggacattccatcaagtaacaagaataaatcaatggaatgattagtagcgtaataagaactaagaagtacgtactcacccgctcgtagtctgggctcttcacccataatggaatatgtggtattgttgcctgcagggtttcagaatctaaatctcgtagaggtttaatgacaggatcctgtaaattcaaccattaaaaattaaccagattacgtcgcaatattattattgacacagcgcaacaatgaccataatggctacatctatggaaatttatatgccttgataaaacatggccgaagtaataataattcactaattggtgatgcataggtgcaagggtagtatcaatcacataaggccttgttcggcaccttggaaaattttttccaggttggttttttccccatatggattgggtgaatccaagcctttcacccaatcccttatgggattaaatccataaacccaatcaacctatgtttgttcgtttattccatatggattatattctaaaacacacacaactatgtttgttcgtttattccatgtggattaaataccaaacctaaataccaacaaaagcaaataaaatcaacacaatttaagcatagaccatatcatatctctagaaatttaagcatagaacatgtcgatctctctagaaatttaagcatgccatacaattctcgatacatattttttgttcaaattaaacatcttttaaagatgcgtcaactggcatcacgtgacttgactttcaccttctctagggatgctgataatatctttatctttggaccctgaaacacatgagacaaataatcttaaaaattacagtaatctattgttttatgtaaagacaaagtactactatttgaaagttgcctgactgcaacttgaaaataacaatttgtccctcaataacagcagctgaacacctatttcctaatcagactatagcaattatgtcagcttttccatccaatgatagcaacaacaaacatatggactacacagaaattcaagccatgtgccttgtgaactacacataaattctagaaaattagaagttatcacaatggtcgtttaaaatataatcaattctctgaactcactgcaaatatggagaatactgctatctcgggtattactaatagaaagacctacaaggaactggagatatatagtttataggctggatggtgtaaaggttaagaacatactgaatggtgaggtctcggatcttcaggtgtcttcaggaacatactgaatggtgaacgccagccaatgggtaactccaggcttagctccagcgccggacggaactcctgttgctcaaggcggcggtgagacgagacgaggcagcgacggcgagacggggacgaggcggcaacggcaagacagggacgaggcggcaacggcaagatagggacgaggcggtgagggcggcgtgctcagtcgcgtgcggcggcgcgctcagtcgcgtgcggcgtgcggcgtgcggcgagttggatgcgttccagaacaaacgagctagggttataatccaggagtacaagagtaaaaaaatgatctaagcctctgggctacaaaccatactgggcttaaccgaatggaaaaaagaaatcattctggatttttt

SEQ ID NO: 48865 - DNA, 1912 bp, Zea Mays
atggttagccatgtttttgaggaccttcagaagacgaaggcccctaacagtagcccctcgcagtattagtttatttctttgtaataaattcagactgcgatacaaacgaaggcatttagccgaaggtccgaaaaagcacattccctttgctagaatagtgaaacattctatatcgtggggtctctcaaaatggatgaatgagctctaatatctttattagggctcatttggataccttcttatctatctgaatcctagccactagcacctctccctcccccttctcccacctggccatcgccggagggagccgccggaggacatgtggaccccaacgaaggcgactgcggggcccttcttccctgtgacctggatatgggcggtggtggcgtgtgtgccctccacctcgccactttggtcatggggctgtgggtgcgactgttgaggagcttcgggccggcgacaacctggagctagggcttacataatgctaatattaagatgaaatttcaaagaaacaatgttattctatagataaaattctattagtttcaaacataaagaaatcataaatttattttgggtaaaacacgaacaaggtcccattttgtccataggacttacattctataaagagatgttcctcaaggtttgagtaaacaaagcagttgacttacacctgcattcactcattaattaaaaagggaccgatatactatggacattccatcaagtaacaagaataaatcaatggaatgattagtagcgtaataagaactaagaagtacgtactcacccgctcgtagtctgggctcttcacccataatggaatatgtggtattgttgcctgcagggtttcagaatctaaatctcgtagaggtttaatgacaggatcctgtaaattcaaccattaaaaattaaccagattacgtcgcaatattattattgacacagcgcaacaatgaccataatggctacatctatggaaatttatatgccttgataaaacatggccgaagtaataataattcactaattggtgatgcataggtgcaagggtagtatcaatcacataaggccttgttcggcaccttggaaaattttttccaggttggttttttccccatatggattgggtgaatccaagcctttcacccaatcccttatgggattaaatccataaacccaatcaacctatgtttgttcgtttattccatatggattatattctaaaacacacacaactatgtttgttcgtttattccatgtggattaaataccaaacctaaataccaacaaaagcaaataaaatcaacacaatttaagcatagaccatatcatatctctagaaatttaagcatagaacatgtcgatctctctagaaatttaagcatgccatacaattctcgatacatattttttgttcaaattaaacatcttttaaagatgcgtcaactggcatcacgtgacttgactttcaccttctctagggatgctgataatatctttatctttggaccctccagatctagccagcagcacggacggctctagccaggacctacctccaggcttagctccagcgccggacggaactcctgttgctcaaggcggcggtgagacgagacgaggcagcgacggcgagacggggacgaggcggcaacggcaagacagggacgaggcggcaacggcaagatagggacgaggcggtgagggcggcgtgctcagtcgcgtgcggcggcgcgctcagtcgcgtgcggcgtgcggcgtgcggcgagttggatgcgttccagaacaaacgagctagggttataatccaggagtacaagagtaaaaaaatgatctaagcctctgggctacaaaccatactgggcttaaccgaatggaaaaaagaaatcattctggatttttt

SEQ ID NO: 48866 - DNA, 2348 bp, Zea Mays
atggttagccatgtttttgaggaccttcagaagacgaaggcccctaacagtagcccctcgcagtattagtttatttctttgtaataaattcagactgcgatacaaacgaaggcatttagccgaaggtccgaaaaagcacattccctttgctagaatagtgaaacattctatatcgtggggtctctcaaaatggatgaatgagctctaatatctttattagggctcatttggataccttcttatctatctgaatcctagccactagcacctctccctcccccttctcccacctggccatcgccggagggagccgccggaggacatgtggaccccaacgaaggcgactgcggggcccttcttccctgtgacctggatatgggcggtggtggcgtgtgtgccctccacctcgccactttggtcatggggctgtgggtgcgactgttgaggagcttcgggccggcgacaacctggagctagggcttacataatgctaatattaagatgaaatttcaaagaaacaatgttattctatagataaaattctattagtttcaaacataaagaaatcataaatttattttgggtaaaacacgaacaaggtcccattttgtccataggacttacattctataaagagatgttcctcaaggtttgagtaaacaaagcagttgacttacacctgcattcactcattaattaaaaagggaccgatatactatggacattccatcaagtaacaagaataaatcaatggaatgattagtagcgtaataagaactaagaagtacgtactcacccgctcgtagtctgggctcttcacccataatggaatatgtggtattgttgcctgcagggtttcagaatctaaatctcgtagaggtttaatgacaggatcctgtaaattcaaccattaaaaattaaccagattacgtcgcaatattattattgacacagcgcaacaatgaccataatggctacatctatggaaatttatatgccttgataaaacatggccgaagtaataataattcactaattggtgatgcataggtgcaagggtagtatcaatcacataaggccttgttcggcaccttggaaaattttttccaggttggttttttccccatatggattgggtgaatccaagcctttcacccaatcccttatgggattaaatccataaacccaatcaacctatgtttgttcgtttattccatatggattatattctaaaacacacacaactatgtttgttcgtttattccatgtggattaaataccaaacctaaataccaacaaaagcaaataaaatcaacacaatttaagcatagaccatatcatatctctagaaatttaagcatagaacatgtcgatctctctagaaatttaagcatgccatacaattctcgatacatattttttgttcaaattaaacatcttttaaagatgcgtcaactggcatcacgtgacttgactttcaccttctctagggatgctgataatatctttatctttggacctgaatggtgaggtctcggatcttcaggtgtcttcaggaacatactgaatggtgaacgccagccaatgggtaacttcaggaataataatggaagagcaaggaaagaagacaaaactattttaggtcaaagaaataactgtcttacgaccctgctagattctgttctctctccttcaatcacccaaccgctgctacaagaaatctagtgatacatgaatcgactactcggtaagaaggtgggctagcctacggactgccaagaagttacaaaacaagatggcgtggtctttatggtatgaaattaaactgacatagtctattaatgaaaaaactaactttataataccgtcacagccacgcagaatactactgtattatagaagaagggggtaggaatgcgttgtttgtatgaaactcatgacattagtacaacaaacctccagatctagccagcagcacggacggctctagccaggacctacctccaggcttagctccagcgccggacggaactcctgttgctcaaggcggcggtgagacgagacgaggcagcgacggcgagacggggacgaggcggcaacggcaagacagggacgaggcggcaacggcaagatagggacgaggcggtgagggcggcgtgctcagtcgcgtgcggcggcgcgctcagtcgcgtgcggcgtgcggcgtgcggcgagttggatgcgttccagaacaaacgagctagggttataatccaggagtacaagagtaaaaaaatgatctaagcctctgggctacaaaccatactgggcttaaccgaatggaaaaaagaaatcattctggatttttt

SEQ ID NO: 48867 - DNA, 4638 bp, Zea Mays
gtcaaataaagaaaaccgccagtagatagtgtatttccaccggtggttttattaagcaaaccgtgaattctatttgtagtggtggttgtcttgaccaaccactagtggatatgatgttttcactggcggtttggttccaaaacaaccaacaataaaaataccgatttccattgtctcatagcactgacatcactgaaaatgctagtgcaaataggtgtgggacagccactatagcttttatgtgcaagtggtatctacggttttgtacctcgaaatagtgctgtcacatagccggctgggcttgatgatgaccttgtcatgcattcgcgtacgacactacgactgcttggtattttgtcaggccgtataattccagagtagcaggcaacaggcgtatattggcagtctaggacacggctgcccgatggatacccagtcctacgtacagtagtaccagggtactcctagtcctcgctctgtcatgcgcgcaggctttacgaaatcaaggctcggatcccccagaagatctcgctgctggtgctgggggcgcgcgcagaattaattgcagggagaatattttactgcgtgcagaattacacaatcggccagacccgtcaagacagaaagtagcagcagtactaccgtctaccagtaccagacacacacagcagctgaccagctgtttaagatagataccctatatattattgactctctctcaaaaaaagggaaaaaaatagaacatgcaattgtcaaattgaagggacaggcttcatggctatatacaatattgggatgtatttggttcactgactaaagtttactttcgtgtcacataaaataaaatggctagcctagtacatgtcgcatagctaatgtcatcctgtcctcttcatgcgtgtgctacctcaggctagcttgattgtcttgtctgtagtctgtctgtctgtaccgccacgagaaggaaaagctgtgacgcatactacgctgaatacatggatccgtgtggccggacggtccatgtacctgcgtgggtgtgcgcgcactcgtatagtagctggacgaagaagaagatgtgtgagcgtgtgtatagtggctggatggatgaagagcacaaaggcactgtagtctggttgagcgtcgcgtttccagctagggccgcatgcactgcctgcgtccttgcgaacgcatgtgagttaagtgtcccgccgctttacgatcatcctgctgtttcaattcagaagcgcgtactatgtgccgtgactaccacgcgcgcgtgggcggagccggcggcggcggcacgctgtgccctgccctgtgactgggacgcgagtgcatctgcatccgcacggggacgccgcgcttgccggtctcaacggcaatcctcgcctcgggatccaacccaaacagaattcagcaaaattaaaggtctccctgtctccagaggggaactgctacgtccacgcaaccaacaaggcccaacttggggatcgatgccattgattaataattatgccgaaatcggctagcggccgagaacagcagtttaagctagctagctacagatcttgtcgaaaatacgagggaaaaaaaggcagatcagaaaacagattattattctgatgcagtgatgctcgagctagctacactaacatacgcgttcttcgcagcatgcagtcacgatatctgtttggtgtttagtacctgtactactactaggattgtcgtgttgattgatgataatctgtccggactccgtcgatccggaggaggagccggccggtgaacgaagaagcccggcctctctcgctcacgccgatccatgtataatcgcgcgcgcgcgcgtctagggatcggcgcgtcagcagggggccatcatcgtcggtgcgtggacgcgtgaaacaaggccggccggcttctcgtgtcgtctcgtgtcagcagtgggcttttgactagctagtgctactagaaacgaagaacctgcatggctggcgcgtgaggccggccggcagaaacgtaggagaccgcggccgttgttcctgggtctggagtaacgtagtacgttggaacgaagcgaaacgcgagggacgcctgctccatcagcggtgacgacgacggtcggtcatcagtccggccatgtggacgtggtgccccgacgacaggccggcactcactcaaatcgcgtccatcagtcacgcgctcacgccgagctccggacaccatgggccgggcccggtcccttgtgtcttttccagcgggccacaataagcgcgcggtttacgacatggttgcgtgctacgtgggtgggccgaatcgtttcgtcattgaaaaaaaaggccccgttttgcctctctaaacgaccaagttcagagtactttacgatttattagtttggtggttttcatgttaaactcaatgcggttttcatatggcttgaaataattttcgtcttagattttcatgtttaactcaatgatgtggtggtgccccgacgacgacagacactcaaactgcgtccgtcgctcacgccgagctccggacaccgtgggcaagatgggcccggtcccgtgtgtcttttttagtgggccgcgataagcgctcggttaccgtatagttgtgtgtgctacgtgggccgaatcgtagtgcattgtaatagaaaacgtctccttttggttccactagtacaaaaaaaaaagctctctacagactcggttcgtaacttatttttactgtcattttttagaaccccagcggttttgtccataggcagttaactggaaagtgggaattgattttcgccggtggttcatttaagacaactgtgaatgaaaatagttaagaaaaccgcaaatacaaattcttttttaaagaaatataaatcggttttaaaaatagtaccaaaaaatatttttaatcatggaaggcctcacttgccagtacaaatatggaaaccctgctagtaaaaatattttataccacaacctatacttcatcacacaccattcattaatgcctatacatgcactaaaacatttttcgcaacatccgaaactcaaaatcaatacctactacacaaaattatgatgaagcaccacggattactttgctctaaactatcatgacgtaaccataaaatctctaacttatattaaggcaccactcaaatattgcaagggacatgcatgatttgcccactcctcatttttcactaactcttcttataattatatactagccagttgcccatgctctgctacggttgttatatatcatatagataagtattgagatatttattcaaatataatattgtttatttctaaacaataaggtatgtgtggtctggtggctccaaatttctggagcagggggcgtgggttcgagtgctcgctctgcactattttttgcgcagtgtggtagctacacgggcggggtcgggcaatcgtagtagctgcgtgagcgctacaggtccacatggaagagcactgcgcgggtgttggatgtggggcccacagggcacggcgccgaggcggggcgcgtggggcgggcccagagtggcagcgtaaagggtgaagtcatagtagcacgagatgcccacattatgttcttaatagagtaggtattattttagaatgagtattagtttagcaccatatgaggctatctaatttggggctgtgattttcataaagtataggtaataacaagtcatgacaaatgtacaaattttacattatcaggttttatatattaattattacaaaaatgataaattgttaatgcaataaggcatatgacgacaagttaaatctaaaactaaatattttttgtgaatgcatagccatgttaacttttattaggccactacaacatcgtataaagacactagaacaacattttccatttttacatccgtatactatttataaaccatttaaaactacttaatatgcatcaaacaagttaaatcactaactccatgatacatgcaccataaatcacgaattttttaccagtcaccaatcatcatacctagagtataccataataatttcaagcatttagagtactagagctaaagatccaaaaataacaagcaaaacaatcatcttttttctatttaacaagatttaactaatacaccaagaaaacaacaaacaacatatgggtttcatatttttatgtgctagagtatgacatcatctaactaacaaaacaagcctcattctatttgagcacctaaaactcaaaatatagagagaagcaagttaatttgattttgaaaccacttttcaacatgaatttctacagtagaaaacttgcactaaaacatgctatattataaatctaataggtagaacacttcatacgaaagctaacaaaacaagtcttactaatttcgaagctaccaaactcgagttatgaattttagaagaaaatgtaagaatctgaaatttcagcacacatgttatttacttgggctcacccgctctaaccgagtggaggggaggagggagtcctgatcgcctgctgcaacacgccatggggaagagggcgcagagagcttgggcgtcatggatggccgacgtggaggagaagggggctgctccacctgcgctcggaaggagaagtcccctc

SEQ ID NO: 48868 - DNA, 3330 bp, Zea Mays
ggccattccaaaaagtttcggcctgtgcgttttcaggcgtagtagagttttcaaaaggtagctaaataaaacaaaagaaaaagagaacgcgcgcgtgtgtgtatacagtatacacacacacgcttagtagctccgtggaaaaaaaagcatcgcattattgtctaacactaggatgaaaacaacaacacttgtcgatttagcgtgtggtcccgtctgtttgtttccttctgatgctgattgagatttcagagagagagagcagagaacggctacgggacagcagtggataatggtacaatgatgcagctcatcgtgcggtgggggggagagaaaaatcatcatcagcgctggcactttggctgcgcaactgaaaaagtctgggggaatctgagcctgctgctcacctgagagagcctgtgggtggggaggcaaagcgctgcagaggctgcagcagagaggagcgagcgagggagggagacgacgagccctgtcgagctgttccgattttgcccccccgaatacgtcgctgcccctgctttggagggatctgaagctgctgctgcctgccaaagcccggagcctttttcttcagcggtaggctctgatcatgatggtggtggtgatggcggctgtccagcggaaaggcttcttctcgtgctagtggaggaggcgtgaaatttcatccataaaggctgtcgcggtgggtggagatcttgcccaattccgctgaaatcgcctccggctacgggttgggtcgggtcgggtagcgtggccgtgggcggtgggagatgattactttcgtggactcggcggccatggagcgggagcgggagagtgacaggtgcctggacccgcagctgtggcacgcctgcgccggcgggatggtccagatgccggcggtgcactccaaggtgtactacttcccgcagggccacgcggagcacgcgcagggccccgtggacctccccgccggccgggtccccgcgctcgtcctctgccgcgtcgccgccgtccgcttcatggccgatccggacaccgacgaggtcttcgccaagatccgcctggccccggtccgtcccaacgagccgggctacgccgacgacgccattggcgccgcggcggcgtcgggcgcgcaggaggacaagcccgcgtccttcgccaagacgctcacgcagtccgacgccaacaacggcgggggcttctccgtgccgcgctactgcgccgagaccatcttcccgcggctcgactactcggccgacccccccgtgcagaccgtgctcgccaaggacgtgcacggcgtggtctggaagttccgccacatctaccgcggcacgccccggcgccacctgctcaccaccggctggagcaccttcgtgaaccagaagaagctcgtcgcgggggactccatcgtgttcatgcggacggagaacggggacctctgcgtcggcatccggcgcgccaagaagggcggcatcggagggccggagttcatgcaccaccaccaccagcagccgcccccgccgcagggcggcgggtacgccgggttctccatgttcctgcgaggggaagaggacggcggcaagatgatggccgcggccgccacgagggggaaggccgccagggtgcgggtgcggccagaggaggtcgtcgaggccgctaacctggccgtgagcgggcagccgttcgaggtggtgtactacccgagggcgagcacgccagagttctgcgtcaaggcgggggcggtgcgcgccgccatgcgcacccagtggtgccccgggatgaggttcaagatggccttcgagacggaggactcgtcccggatcagctggttcatgggcactgtctccgccgtgcacgtcgctgaccccatccgatggcccaattcaccctggaggcttctccaggtcgcctgggatgagccggacctgttacagaacgtgaagagggtgagcccatggctggttgagctggtgtcgaacatgccggtcatccatcacctcacagccacgcccttctcgccgcccaggaagaagctgtgcgtcccactgtacccggagcttccgctggagggccagttcccggcgccgatgttccacggaagccccctcctcggccgtggcggcgccggtggcccgatgtgctacttcccggacggcactcctgcaggcatacagggagccaggcatgctcaattcggcatatccttatcagatctccacctgaacaagctgcagccgggcctgtcaccgcacgggctccaccgccagctcgaccacggcgtgcaggtgcaggtgcagcagccgaggatcgccgccgggctcatcgtcggcggccacccggcggcccgagacgacgtctcgtgtctgctcaccatcggcaccccaaagagcaagaagccaccgtcagacgtcaagaaggcgtccacggcggcggcaccgcagctgatgctcttcgggaaagcgatcctcaccgagcagcagatatcgctaggcggcggcaatgtcgtgccggcgctggcgaagaagagcccctccgacgacgacgacgacgtggccgagaggacggtgagcaactcggacgtgtcgagccctgggaggagcaaccaggacggcacgtccagtggcggaggcccggcggcgcgggcgtgctggcaggaggaggagtgcaacaacagggcggcaggttctgaggacgacctcctcgggcactgcaaggtgttcatgcagtcggaggacgtcgggcgcacgctggacctctccgccgtcgcgtcgtacgaggagctctaccagaggctcgccgacatgttcggcgtcgacaaggccgagctgaccagccacgtgttctaccgcgacgacgcttccggagcgctcaagcaccctggcgacgagcctttcagtgagttcaccaagaccgcccggaggctgaccatactgacggacgagagcagcgacagcttagcgaggtagagtccagtctcaaggagacggcggttcggcagtttcggttgggagtgggaggcgccccggaacgggagcgcgtgcgtgcgtctgatccaggaccaaagatttgtcggactagtagctctacagtagtggagtacgtacgtacaccttgatgctgctgcttctgctgtcagttcaagtggccataaccataatgcagctgcctttggtcacagtgactgatcggatgtgttgtgtacatcggaccgttgatttgcgaacgcgattactgaaagattattattatttttttgtatttttgatataactaaggtgctttggttagttggttggtttgtctgggatgctcaagtattctctgttctcg

SEQ ID NO: 48869 - DNA, 637 bp, Zea Mays
tgaaaacaacaacacttgtcgatttagcgtgtggtcccgtctgtttgtttccttctgatgctgattgagatttcagagagagagagcagagaacggctacgggacagcagtggataatggtacaatgatgcagctcatcgtgcggtgggggggagagaaaaatcatcatcagcgctggcactttggctgcgcaactgaaaaagtgagttcaccaagaccgcccggaggctgaccatactgacggacgagagcagcgacagcttagcgaggtagagtccagtctcaaggagacggcggttcggcagtttcggttgggagtgggaggcgccccggaacgggagcgcgtgcgtgcgtctgatccaggaccaaagatttgtcggactagtagctctacagtagtggagtacgtacgtacaccttgatgctgctgcttctgctgtcagttcaagtggccataaccataatgcagctgcctttggtcacagtgactgatcggatgtgttgtgtacatcggaccgttgatttgcgaacgcgattactgaaagattattattatttttttgtatttttgatataactaaggtgctttggttagttggttggtttgtctgggatgctcaagtattctctgttctcg

SEQ ID NO: 48870 - DNA, 3457 bp, Zea Mays
attgcaccgtattctgccatcctctccctcgcgcaatcgcgtcgtgctcacagccaatgcccccgccaggccctcctcgccccattctctctcctgcaatccccgcggcctcgctccggttctccatcctcgcccacatgtcgtccctaaaccccgccccggctctctccatggaaagcgcgtcctctgcgctcggctctccgcgctcgtccctaaaccccgccccggctctccgctatccatggaacgtgggtcctctgccccggatcaccgcgccggccctcgatccgcgtccgcgacagcccgatctcgcgtgtggattgggtacccctctgccccagatcgtcgcctccgcccggcatcagcgtccgtgtccgcgttgtggcgtccgcagtctccatggaaggcaatcccgtgcgtggattaggcacccctctgctggcgccagcaccgcccattcgggaccacgcgcagccctcgccgtgccatgcgccaccattggcctcctcaggtgggacttcccctttcgaattctcagatctgaggccgccgccggatctagaggtgacaacgatttccccgagttcaagcgccattgaccgcagcaagacctgaaggacaccagtgcttccttgattccatcctagacgaaccgaggcccccaaatcaggcatcaacaaactcattaaccgagcgacctgaaagacatgcatatatcagagcaaagtgataatgacgccacaagagaagacttcagggatgatttacttcagtcttacagcttgacgcacaaatcactattgaccctacgaaaattattttgtttaaatactacaaagatatgctgtcacagattaactgtttgcggcctctatgtcttgttaccatgtaagttaagcaaagtatttattacaacctgtgcagtgtataaacctccatatgagcaaataataattattcaaacctcttcctgttccaacattgtaaatgccgacttttctaggctctgcttgttgagtgctttcacatgagcatcaagtaaatctgtgacatcaatataatctcttatgcaggttccatcagttgtgggataatctgttcctttaatctacaggaaggtcatgcataaccatcagctcaatcttatagcgcgctttgacaacaaagtgctctatatttttctccgttgctctaggaaccctttgtgcccacatcaccatatgacaataatagctacaagttaaggaataaataaacacacaatttatagagctaaaaacaagatcttgctgcgatggtattagtgttatggtgatattttaccatggattttgcatatcatattgatgtttgtcgtttcgtatctatgttttgtactaatttataactttcgtggcaattggaatgcatttgctacaggttgtccaccaattggatctactgcaacaagtgctcctccactcgcgtgcatgtataaaatggcaggggttctaccaacaatcaacacacctgtgaagtgaagctgggacgtgtaggttgatccacgacgtgtgcatttgtaggaaccctgattttgttagcttgaagacctgtattttcaaattcctcctcgtccggcgccgcctcacggcagctgcggcggcggcatgatgaacgagaagagcaggtagagggagaggagtgcccggactgcggtgggactagcctctgtggccgctgcaaaggagagggcttcgtcttcaagtagctctcgaaggatatgaccaccagggaacacaaggtcgccaagaacatggccaccaaatacactttaggctgtccaccattggacctactgcaacaagtgctcctccacccgcgtgcatgtataaaatggcaggggttctaccaacaatcaacacacctgtgaagcgaagctgggacgtgtaggtggatccacgacgcgtgcatctgtaggaaccctgattttggtatggtttctacattcaaattcatcagtatgatataagacaatctgtttacaagttttggtaaggtttacaattatggtatgtctttgacattctggccggtatttaagagtagccctctcttcatatcattgaaaggtaaaactattagtggcacacattggttttttcctttgttttcaacatgtaacattatattaggggtatgtgtagtttagggtaagtaatatactcctttgtgctcagtaagtaattgatagaaggtagaaacatatgtgctgtttagggtttacctctttatgatttctggctagccacaatattttcacattgcaaatcaagtccttagtaccctggtaatcaaactaaaatgacagagcatcaagcaaattcattgtgcacctgcatgttgtatgttaaataaataaatttttgcaggggttctaccaactatcaacacacctgtgttttgtcagagcatcaggaaaagagtatcactaattcactatgtgttgtaggtatccactaactttgttggactaaagagcccagaccaatcgacccattttcgtggaggtcatcatccttctttgttgagccatctgggtgaccttgcaaattggataagtgccaaagaatacctactgcatatgaattttgagcctttatcaggagctgaataagaactttgttcatagaatcacactgtttatctatagacacccacaatagaatacctactgctcattatggagaaaacattcttgtgatacccctcacatggcagccacaattgtgctaagtgtgaagatataacaatttcttgaaggggtgttaacataaatatgtttgttgaattccaccatcacttaagcattcattttactgttagtttgaattgcaatccctcataattttatcatgtgtgcttaactgcttatgcatatacatatcttgataggattttgtatggaactgcaaagcctgttttaagaagaatttctagcaaaattttggatgcacaatcaacacctcaaaactctctcagctttgtaaccttcagaaagtgttgagagaggtggcatctagaggacgtcatgtcgaacgtgtgaatttttttagaaatatgtatatttgtgtgaagctttttagaaacttgactcccatttattttctatgtcccctctcggctttgtttcctatcatttccatgacttgctatgcatttgcactatatttggcatgtctaaaaccgctacacaaaactttgctatatattttgtctaaaaaatactatatccttgttatgcttgcttgatctttatttttttctggtcttctattcttgtgtggtctatcaagagtgaggcaattatataaggatatatgctttgtcagtattgtctgagtctttgagcgtagcagcaaaagtcttggcacatcattgttttagttattatgacctaaataacccagtttatatatag

SEQ ID NO: 48871 - DNA, 3781 bp, Zea Mays
gcaccgtattctgccatcctctccctcgcgcaatcgcgtcgtgctcacagccaatgcccccgccaggccctcctcgccccattctctctcctgcaatccccgcggcctcgctccggttctccatcctcgcccacatgtcgtccctaaaccccgccccggctctctccatggaaagcgcgtcctctgcgctcggctctccgcgctcgtccctaaaccccgccccggctctccgctatccatggaacgtgggtcctctgccccggatcaccgcgccggccctcgatccgcgtccgcgacagcccgatctcgcgtgtggattgggtacccctctgccccagatcgtcgcctccgcccggcatcagcgtccgtgtccgcgttgtggcgtccgcagtctccatggaaggcaatcccgtgcgtggattaggcacccctctgctggcgccagcaccgcccattcgggaccacgcgcagccctcgccgtgccatgcgccaccattggcctcctcaggtgggacttcccctttcgaattctcagatctgaggccgccgccggatctagaggtgacaacgatttccccgagttcaagcgccattgaccgcagcaagacctgaaggacaccagtgcttccttgattccatcctagacgaaccgaggcccccaaatcaggcatcaacaaactcattaaccgagcgacctgaaagacatgcatatatcagagcaaagtgataatgacgccacaagagaagacttcagggatgatttacttcagtcttacagcttgacgcacaaatcactattgaccctacgaaaattattttgtttaaatactacaaagatatgctgtcacagattaactgtttgcggcctctatgtcttgttaccatgttgtccaccaattggatctactgcaacaagtgctcctccactcgcgtgcatgtataaaatggcaggggttctaccaacaatcaacacacctgtgaagtgaagctgggacgtgtaggttgatccacgacgtgtgcatttgtaggaaccctgattttggtatggtttctacactcaaattcatcagtatgatataagacaatttgtttacattaattctcattgtgtgaccatttgaaatatgttttgctatttgaaagttcaagaaaaacatgatgccttcaatagtttcatgtacttcttgtgtttcttttcaaatttctttagtttgtcttttatatccagttagcttgaagacctgtattttcaaattcctcctcgtccggcgccgcctcacggcagctgcggcggcggcatgatgaacgagaagagcaggtagagggagaggagtgcccggactgcggtgggactagcctctgtggccgctgcaaaggagagggcttcgtcttcaagtagctctcgaaggatatgaccaccagggaacacaaggtcgccaagaacatggccaccaaatacactttaggctgtccaccattggacctactgcaacaagtgctcctccacccgcgtgcatgtataaaatggcaggggttctaccaacaatcaacacacctgtgaagcgaagctgggacgtgtaggtggatccacgacgcgtgcatctgtaggaaccctgattttggtatggtttctacattcaaattcatcagtatgatataagacaatctgtttacaagttttggtaaggtttacaattatggtatgtctttgacattctggccggtatttaagagtagccctctcttcatatcattgaaaggtaaaactattagtggcacacattggttttttcctttgttttcaacatgtaacattatattaggggtatgtgtagtttagggtaagtaatatactcctttgtgctcagtaagtaattgatagaaggtagaaacatatgtgctgtttagggtttacctctttatgatttctggctagccacaatattttcacattgcaaatcaagtccttagtaccctggtaatcaaactaaaatgacagagcatcaagcaaattcattgtgcacctgcatgttgtatgttaaataaataaatttttgcaggggttctaccaactatcaacacacctgtgttttgtcagagcatcaggaaaagagtatcactaattcactatgtgttgtaggtatccactaactttgttggactaaagagcccagaccaatcgacccattttcgtggaggtcatcatccttctttgttgagccatctgggtgaccttgcaaattggataagtgccaaagaatacctactgcatatgaattttgagcctttatcaggagctgaataagaactttgttcatagaatcacactgtttatctatagacacccacaatagaatacctactgctcattatggagaaaacattcttgtgatacccctcacatggcagccacaattgtgctaagtgtgaagatataacaatttcttgaaggggtgttaacataaatatgtttgttgaattccaccatcacttaagcattcattttactgttagtttgaattgcaatccctcataattttatcatgtgtgcttaactgcttatgcatatacatatcttgataggattttgtatggaactgcaaagcctgttttaagaagaatttctagcaaaattttggatgcacaatcaacacctcaaaactctctcagctttgtaaccttcagttacgtttctctgaacctttgcttcaatcatgtgatttatttatctatgtgccttcaattactacaaaaggtttgtctagccatggctccttactgtttacgtttgtttgtttttattttttcatgccatgacaaagaaaacactatcattatcaaatattcaaacacatagagttggtaaaagtttgactacgatattgatgatctttcttggtctaattggagtttttgcacctattcataggctagagagtttatgcactgtcctcctattttggatacactttctgttaacaaaaatgctacacagttgcattctacttaccttgtgattttgatggagctctgttgttgtgcttttttgacatttgttggtcctttgagcattaggtctgcatcatgcattatgttgttctctattgatctctatatcccatattgtggagatcactaaaatgttagtaagttaacttctattcacactttcaattccatcgtccgtgaaaattgataaatatgaatgtgttgacttgactccattttatcttctcatttgagcttgtattcttatttttgaagacattgctgccctgcactgagatttctattgttaataaccaatgtgctatttaaattttgatttattccttacgaatgtctactggtttcaggaaagtgttgagagaggtggcatctagaggacgtcatgtcgaacgtgtgaatttttttagaaatatgtatatttgtgtgaagctttttagaaacttgactcccatttattttctatgtcccctctcggctttgtttcctatcatttccatgacttgctatgcatttgcactatatttggcatgtctaaaaccgctacacaaaactttgctatatattttgtctaaaaaatactatatccttgttatgcttgcttgatctttatttttttctggtcttctattcttgtgtggtctatcaagagtgaggcaattatataaggatatatgctttgtcagtattgtctgagtctttgagcgtagcagcaaaagtcttggcacatcattgttttagttattatgacctaaataacccagtttatatatag

SEQ ID NO: 48872 - DNA, 3640 bp, Zea Mays
gcaccgtattctgccatcctctccctcgcgcaatcgcgtcgtgctcacagccaatgcccccgccaggccctcctcgccccattctctctcctgcaatccccgcggcctcgctccggttctccatcctcgcccacatgtcgtccctaaaccccgccccggctctctccatggaaagcgcgtcctctgcgctcggctctccgcgctcgtccctaaaccccgccccggctctccgctatccatggaacgtgggtcctctgccccggatcaccgcgccggccctcgatccgcgtccgcgacagcccgatctcgcgtgtggattgggtacccctctgccccagatcgtcgcctccgcccggcatcagcgtccgtgtccgcgttgtggcgtccgcagtctccatggaaggcaatcccgtgcgtggattaggcacccctctgctggcgccagcaccgcccattcgggaccacgcgcagccctcgccgtgccatgcgccaccattggcctcctcaggtgggacttcccctttcgaattctcagatctgaggccgccgccggatctagaggtgacaacgatttccccgagttcaagcgccattgaccgcagcaagacctgaaggacaccagtgcttccttgattccatcctagacgaaccgaggcccccaaatcaggcatcaacaaactcattaaccgagcgacctgaaagacatgcatatatcagagcaaagtgataatgacgccacaagagaagacttcagggatgatttacttcagtcttacagcttgacgcacaaatcactattgaccctacgaaaattattttgtttaaatactacaaagatatgctgtcacagattaactgtttgcggcctctatgtcttgttaccatgttccatcagttgtgggataatctgttcctttaatctacaggaaggttgtccaccaattggatctactgcaacaagtgctcctccactcgcgtgcatgtataaaatggcaggggttctaccaacaatcaacacacctgtgaagtgaagctgggacgtgtaggttgatccacgacgtgtgcatttgtaggaaccctgattttgttagcttgaagacctgtattttcaaattcctcctcgtccggcgccgcctcacggcagctgcggcggcggcatgatgaacgagaagagcaggtagagggagaggagtgcccggactgcggtgggactagcctctgtggccgctgcaaaggagagggcttcgtcttcaagtagctctcgaaggatatgaccaccagggaacacaaggtcgccaagaacatggccaccaaatacactttaggctgtccaccattggacctactgcaacaagtgctcctccacccgcgtgcatgtataaaatggcaggggttctaccaacaatcaacacacctgtgaagcgaagctgggacgtgtaggtggatccacgacgcgtgcatctgtaggaaccctgattttggtatggtttctacattcaaattcatcagtatgatataagacaatctgtttacaagttttggtaaggtttacaattatggtatgtctttgacattctggccggtatttaagagtagccctctcttcatatcattgaaaggtaaaactattagtggcacacattggttttttcctttgttttcaacatgtaacattatattaggggtatgtgtagtttagggtaagtaatatactcctttgtgctcagtaagtaattgatagaaggtagaaacatatgtgctgtttagggtttacctctttatgatttctggctagccacaatattttcacattgcaaatcaagtccttagtaccctggtaatcaaactaaaatgacagagcatcaagcaaattcattgtgcacctgcatgttgtatgttaaataaataaatttttgcaggggttctaccaactatcaacacacctgtgttttgtcagagcatcaggaaaagagtatcactaattcactatgtgttgtaggtatccactaactttgttggactaaagagcccagaccaatcgacccattttcgtggaggtcatcatccttctttgttgagccatctgggtgaccttgcaaattggataagtgccaaagaatacctactgcatatgaattttgagcctttatcaggagctgaataagaactttgttcatagaatcacactgtttatctatagacacccacaatagaatacctactgctcattatggagaaaacattcttgtgatacccctcacatggcagccacaattgtgctaagtgtgaagatataacaatttcttgaaggggtgttaacataaatatgtttgttgaattccaccatcacttaagcattcattttactgttagtttgaattgcaatccctcataattttatcatgtgtgcttaactgcttatgcatatacatatcttgataggattttgtatggaactgcaaagcctgttttaagaagaatttctagcaaaattttggatgcacaatcaacacctcaaaactctctcagctttgtaaccttcagttacgtttctctgaacctttgcttcaatcatgtgatttatttatctatgtgccttcaattactacaaaaggtttgtctagccatggctccttactgtttacgtttgtttgtttttattttttcatgccatgacaaagaaaacactatcattatcaaatattcaaacacatagagttggtaaaagtttgactacgatattgatgatctttcttggtctaattggagtttttgcacctattcataggctagagagtttatgcactgtcctcctattttggatacactttctgttaacaaaaatgctacacagttgcattctacttaccttgtgattttgatggagctctgttgttgtgcttttttgacatttgttggtcctttgagcattaggtctgcatcatgcattatgttgttctctattgatctctatatcccatattgtggagatcactaaaatgttagtaagttaacttctattcacactttcaattccatcgtccgtgaaaattgataaatatgaatgtgttgacttgactccattttatcttctcatttgagcttgtattcttatttttgaagacattgctgccctgcactgagatttctattgttaataaccaatgtgctatttaaattttgatttattccttacgaatgtctactggtttcaggaaagtgttgagagaggtggcatctagaggacgtcatgtcgaacgtgtgaatttttttagaaatatgtatatttgtgtgaagctttttagaaacttgactcccatttattttctatgtcccctctcggctttgtttcctatcatttccatgacttgctatgcatttgcactatatttggcatgtctaaaaccgctacacaaaactttgctatatattttgtctaaaaaatactatatccttgttatgcttgcttgatctttatttttttctggtcttctattcttgtgtggtctatcaagagtgaggcaattatataaggatatatgctttgtcagtattgtctgagtctttgagcgtagcagcaaaagtcttggcacatcattgttttagttattatgacctaaataacccagtttatatatag

SEQ ID NO: 48873 - DNA, 4122 bp, Zea Mays
gcaccgtattctgccatcctctccctcgcgcaatcgcgtcgtgctcacagccaatgcccccgccaggccctcctcgccccattctctctcctgcaatccccgcggcctcgctccggttctccatcctcgcccacatgtcgtccctaaaccccgccccggctctctccatggaaagcgcgtcctctgcgctcggctctccgcgctcgtccctaaaccccgccccggctctccgctatccatggaacgtgggtcctctgccccggatcaccgcgccggccctcgatccgcgtccgcgacagcccgatctcgcgtgtggattgggtacccctctgccccagatcgtcgcctccgcccggcatcagcgtccgtgtccgcgttgtggcgtccgcagtctccatggaaggcaatcccgtgcgtggattaggcacccctctgctggcgccagcaccgcccattcgggaccacgcgcagccctcgccgtgccatgcgccaccattggcctcctcaggtgggacttcccctttcgaattctcagatctgaggccgccgccggatctagaggtgacaacgatttccccgagttcaagcgccattgaccgcagcaagacctgaaggacaccagtgcttccttgattccatcctagacgaaccgaggcccccaaatcaggcatcaacaaactcattaaccgagcgacctgaaagacatgcatatatcagagcaaagtgataatgacgccacaagagaagacttcagggatgatttacttcagtcttacagcttgacgcacaaatcactattgaccctacgaaaattattttgtttaaatactacaaagatatgctgtcacagattaactgtttgcggcctctatgtcttgttaccatgtaagttaagcaaagtatttattacaacctgtgcagtgtataaacctccatatgagcaaataataattattcaaacctcttcctgttccaacattgtaaatgccgacttttctaggctctgcttgttgagtgctttcacatgagcatcaagtaaatctgtgacatcaatataatctcttatgcaggttccatcagttgtgggataatctgttcctttaatctacaggaaggtcatgcataaccatcagctcaatcttatagcgcgctttgacaacaaagtgctctatatttttctccgttgctctaggaaccctttgtgcccacatcaccatatgacaataatagctacaagttaaggaataaataaacacacaatttatagagctaaaaacaagatcttgctgcgatggtattagtgttatggtgatattttaccatggattttgcatatcatattgatgtttgtcgtttcgtatctatgttttgtactaatttataactttcgtggcaattggaatgcatttgctacaggttgtccaccaattggatctactgcaacaagtgctcctccactcgcgtgcatgtataaaatggcaggggttctaccaacaatcaacacacctgtgaagtgaagctgggacgtgtaggttgatccacgacgtgtgcatttgtaggaaccctgattttgcttgaagacctgtattttcaaattcctcctcgtccggcgccgcctcacggcagctgcggcggcggcatgatgaacgagaagagcaggtagagggagaggagtgcccggactgcggtgggactagcctctgtggccgctgcaaaggagagggcttcgtcttcaagtagctctcgaaggatatgaccaccagggaacacaaggtcgccaagaacatggccaccaaatacactttaggctgtccaccattggacctactgcaacaagtgctcctccacccgcgtgcatgtataaaatggcaggggttctaccaacaatcaacacacctgtgaagcgaagctgggacgtgtaggtggatccacgacgcgtgcatctgtaggaaccctgattttggtatggtttctacattcaaattcatcagtatgatataagacaatctgtttacaagttttggtaaggtttacaattatggtatgtctttgacattctggccggtatttaagagtagccctctcttcatatcattgaaaggtaaaactattagtggcacacattggttttttcctttgttttcaacatgtaacattatattaggggtatgtgtagtttagggtaagtaatatactcctttgtgctcagtaagtaattgatagaaggtagaaacatatgtgctgtttagggtttacctctttatgatttctggctagccacaatattttcacattgcaaatcaagtccttagtaccctggtaatcaaactaaaatgacagagcatcaagcaaattcattgtgcacctgcatgttgtatgttaaataaataaatttttgcaggggttctaccaactatcaacacacctgtgttttgtcagagcatcaggaaaagagtatcactaattcactatgtgttgtaggtatccactaactttgttggactaaagagcccagaccaatcgacccattttcgtggaggtcatcatccttctttgttgagccatctgggtgaccttgcaaattggataagtgccaaagaatacctactgcatatgaattttgagcctttatcaggagctgaataagaactttgttcatagaatcacactgtttatctatagacacccacaatagaatacctactgctcattatggagaaaacattcttgtgatacccctcacatggcagccacaattgtgctaagtgtgaagatataacaatttcttgaaggggtgttaacataaatatgtttgttgaattccaccatcacttaagcattcattttactgttagtttgaattgcaatccctcataattttatcatgtgtgcttaactgcttatgcatatacatatcttgataggattttgtatggaactgcaaagcctgttttaagaagaatttctagcaaaattttggatgcacaatcaacacctcaaaactctctcagctttgtaaccttcagttacgtttctctgaacctttgcttcaatcatgtgatttatttatctatgtgccttcaattactacaaaaggtttgtctagccatggctccttactgtttacgtttgtttgtttttattttttcatgccatgacaaagaaaacactatcattatcaaatattcaaacacatagagttggtaaaagtttgactacgatattgatgatctttcttggtctaattggagtttttgcacctattcataggctagagagtttatgcactgtcctcctattttggatacactttctgttaacaaaaatgctacacagttgcattctacttaccttgtgattttgatggagctctgttgttgtgcttttttgacatttgttggtcctttgagcattaggtctgcatcatgcattatgttgttctctattgatctctatatcccatattgtggagatcactaaaatgttagtaagttaacttctattcacactttcaattccatcgtccgtgaaaattgataaatatgaatgtgttgacttgactccattttatcttctcatttgagcttgtattcttatttttgaagacattgctgccctgcactgagatttctattgttaataaccaatgtgctatttaaattttgatttattccttacgaatgtctactggtttcaggaaagtgttgagagaggtggcatctagaggacgtcatgtcgaacgtgtgaatttttttagaaatatgtatatttgtgtgaagctttttagaaacttgactcccatttattttctatgtcccctctcggctttgtttcctatcatttccatgacttgctatgcatttgcactatatttggcatgtctaaaaccgctacacaaaactttgctatatattttgtctaaaaaatactatatccttgttatgcttgcttgatctttatttttttctggtcttctattcttgtgtggtctatcaagagtgaggcaattatataaggatatatgctttgtcagtattgtctgagtctttgagcgtagcagcaaaagtcttggcacatcattgttttagttattatgacctaaataacccagtttatatatag

SEQ ID NO: 48874 - DNA, 2493 bp, Zea Mays
gcaccgtattctgccatcctctccctcgcgcaatcgcgtcgtgctcacagccaatgcccccgccaggccctcctcgccccattctctctcctgcaatccccgcggcctcgctccggttctccatcctcgcccacatgtcgtccctaaaccccgccccggctctctccatggaaagcgcgtcctctgcgctcggctctccgcgctcgtccctaaaccccgccccggctctccgctatccatggaacgtgggtcctctgccccggatcaccgcgccggccctcgatccgcgtccgcgacagcccgatctcgcgtgtggattgggtacccctctgccccagatcgtcgcctccgcccggcatcagcgtccgtgtccgcgttgtggcgtccgcagtctccatggaaggcaatcccgtgcgtggattaggcacccctctgctggcgccagcaccgcccattcgggaccacgcgcagccctcgccgtgccatgcgccaccattggcctcctcaggtgggacttcccctttcgaattctcagatctgaggccgccgccggatctagaggtgacaacgatttccccgagttcaagcgccattgaccgcagcaagacctgaaggacaccagtgcttccttgattccatcctagacgaaccgaggcccccaaatcaggcatcaacaaactcattaaccgagcgacctgaaagacatgcatatatcagagcaaagtgataatgacgccacaagagaagacttcagggatgatttacttcagtcttacagcttgacgcacaaatcactattgaccctacgaaaattattttgtttaaatactacaaagatatgctgtcacagattaactgtttgcggcctctatgtcttgttaccatgtaagttaagcaaagtatttattacaacctgtgcagtgtataaacctccatatgagcaaataataattattcaaacctcttcctgttccaacattgtaaatgccgacttttctaggctctgcttgttgagtgctttcacatgagcatcaagtaaatctgtgacatcaatataatctcttatgcaggttccatcagttgtgggataatctgttcctttaatctacaggaaggtcatgcataaccatcagctcaatcttatagcgcgctttgacaacaaagtgctctatatttttctccgttgctctaggaaccctttgtgcccacatcaccatatgacaataatagctacaagttaaggaataaataaacacacaatttatagagctaaaaacaagatcttgctgcgatggtattagtgttatggtgatattttaccatggattttgcatatcatattgatgtttgtcgtttcgtatctatgttttgtactaatttataactttcgtggcaattggaatgcatttgctacaggttgtccaccaattggatctactgcaacaagtgctcctccactcgcgtgcatgtataaaatggcaggggttctaccaacaatcaacacacctgtgaagtgaagctgggacgtgtaggttgatccacgacgtgtgcatttgtaggaaccctgattttgttagcttgaagacctgtattttcaaattcctcctcgtccggcgccgcctcacggcagctgcggcggcggcatgatgaacgagaagagcaggtagagggagaggagtgcccggactgcggtgggactagcctctgtggccgctgcaaaggagagggcttcgtcttcaagtagctctcgaaggatatgaccaccagggaacacaaggtcgccaagaacatggccaccaaatacactttaggctgtccaccattggacctactgcaacaagtgctcctccacccgcgtgcatgtataaaatggcaggggttctaccaacaatcaacacacctgtgaagcgaagctgggacgtgtaggtggatccacgacgcgtgcatctgtaggaaccctgattttggattttgtatggaactgcaaagcctgttttaagaagaatttctagcaaaattttggatgcacaatcaacacctcaaaactctctcagctttgtaaccttcagaaagtgttgagagaggtggcatctagaggacgtcatgtcgaacgtgtgaatttttttagaaatatgtatatttgtgtgaagctttttagaaacttgactcccatttattttctatgtcccctctcggctttgtttcctatcatttccatgacttgctatgcatttgcactatatttggcatgtctaaaaccgctacacaaaactttgctatatattttgtctaaaaaatactatatccttgttatgcttgcttgatctttatttttttctggtcttctattcttgtgtggtctatcaagagtgaggcaattatataaggatatatgctttgtcagtattgtctgagtctttgagcgtagcagcaaaagtcttggcacatcattgttttagttattatgacctaaataacccagtttatatatag

SEQ ID NO: 48875 - DNA, 3605 bp, Zea Mays
ccgtattctgccatcctctccctcgcgcaatcgcgtcgtgctcacagccaatgcccccgccaggccctcctcgccccattctctctcctgcaatccccgcggcctcgctccggttctccatcctcgcccacatgtcgtccctaaaccccgccccggctctctccatggaaagcgcgtcctctgcgctcggctctccgcgctcgtccctaaaccccgccccggctctccgctatccatggaacgtgggtcctctgccccggatcaccgcgccggccctcgatccgcgtccgcgacagcccgatctcgcgtgtggattgggtacccctctgccccagatcgtcgcctccgcccggcatcagcgtccgtgtccgcgttgtggcgtccgcagtctccatggaaggcaatcccgtgcgtggattaggcacccctctgctggcgccagcaccgcccattcgggaccacgcgcagccctcgccgtgccatgcgccaccattggcctcctcaggtgggacttcccctttcgaattctcagatctgaggccgccgccggatctagaggtgacaacgatttccccgagttcaagcgccattgaccgcagcaagacctgaaggacaccagtgcttccttgattccatcctagacgaaccgaggcccccaaatcaggcatcaacaaactcattaaccgagcgacctgaaagacatgcatatatcagagcaaagtgataatgacgccacaagagaagacttcagggatgatttacttcagtcttacagcttgacgcacaaatcactattgaccctacgaaaattattttgtttaaatactacaaagatatgctgtcacagattaactgtttgcggcctctatgtcttgttaccatgtaagttaagcaaagtatttattacaacctgtgcagtgtataaacctccatatgagcaaataataattattcaaacctcttcctgttccaacattgtaaatgccgacttttctaggctctgcttgttgagtgctttcacatgagcatcaagtaaatctgtgacatcaatataatctcttatgcaggttccatcagttgtgggataatctgttcctttaatctacaggaaggtcatgcataaccatcagctcaatcttatagcgcgctttgacaacaaagtgctctatatttttctccgttgctctaggaaccctttgtgcccacatcaccatatgacaataatagctacaagttaaggaataaataaacacacaatttatagagctaaaaacaagatcttgctgcgatggtattagtgttatggtgatattttaccatggattttgcatatcatattgatgtttgtcgtttcgtatctatgttttgtactaatttataactttcgtggcaattggaatgcatttgctacaggttgtccaccaattggatctactgcaacaagtgctcctccactcgcgtgcatgtataaaatggcaggggttctaccaacaatcaacacacctgtgaagtgaagctgggacgtgtaggttgatccacgacgtgtgcatttgtaggaaccctgattttgttagcttgaagacctgtattttcaaattcctcctcgtccggcgccgcctcacggcagctgcggcggcggcatgatgaacgagaagagcaggtagagggagaggagtgcccggactgcggtgggactagcctctgtggccgctgcaaaggagagggcttcgtcttcaagtagctctcgaaggatatgaccaccagggaacacaaggtcgccaagaacatggccaccaaatacactttaggctgtccaccattggacctactgcaacaagtgctcctccacccgcgtgcatgtataaaatggcaggggttctaccaacaatcaacacacctgtgaagcgaagctgggacgtgtaggtggatccacgacgcgtgcatctgtaggaaccctgattttggtatccactaactttgttggactaaagagcccagaccaatcgacccattttcgtggaggtcatcatccttctttgttgagccatctgggtgaccttgcaaattggataagtgccaaagaatacctactgcatatgaattttgagcctttatcaggagctgaataagaactttgttcatagaatcacactgtttatctatagacacccacaatagaatacctactgctcattatggagaaaacattcttgtgatacccctcacatggcagccacaattgtgctaagtgtgaagatataacaatttcttgaaggggtgttaacataaatatgtttgttgaattccaccatcacttaagcattcattttactgttagtttgaattgcaatccctcataattttatcatgtgtgcttaactgcttatgcatatacatatcttgataggattttgtatggaactgcaaagcctgttttaagaagaatttctagcaaaattttggatgcacaatcaacacctcaaaactctctcagctttgtaaccttcagttacgtttctctgaacctttgcttcaatcatgtgatttatttatctatgtgccttcaattactacaaaaggtttgtctagccatggctccttactgtttacgtttgtttgtttttattttttcatgccatgacaaagaaaacactatcattatcaaatattcaaacacatagagttggtaaaagtttgactacgatattgatgatctttcttggtctaattggagtttttgcacctattcataggctagagagtttatgcactgtcctcctattttggatacactttctgttaacaaaaatgctacacagttgcattctacttaccttgtgattttgatggagctctgttgttgtgcttttttgacatttgttggtcctttgagcattaggtctgcatcatgcattatgttgttctctattgatctctatatcccatattgtggagatcactaaaatgttagtaagttaacttctattcacactttcaattccatcgtccgtgaaaattgataaatatgaatgtgttgacttgactccattttatcttctcatttgagcttgtattcttatttttgaagacattgctgccctgcactgagatttctattgttaataaccaatgtgctatttaaattttgatttattccttacgaatgtctactggtttcaggaaagtgttgagagaggtggcatctagaggacgtcatgtcgaacgtgtgaatttttttagaaatatgtatatttgtgtgaagctttttagaaacttgactcccatttattttctatgtcccctctcggctttgtttcctatcatttccatgacttgctatgcatttgcactatatttggcatgtctaaaaccgctacacaaaactttgctatatattttgtctaaaaaatactatatccttgttatgcttgcttgatctttatttttttctggtcttctattcttgtgtggtctatcaagagtgaggcaattatataaggatatatgctttgtcagtattgtctgagtctttgagcgtagcagcaaaagtcttggcacatcattgttttagttattatgacctaaataacccagtttatatatag

SEQ ID NO: 48876 - DNA, 3220 bp, Zea Mays
ccgtattctgccatcctctccctcgcgcaatcgcgtcgtgctcacagccaatgcccccgccaggccctcctcgccccattctctctcctgcaatccccgcggcctcgctccggttctccatcctcgcccacatgtcgtccctaaaccccgccccggctctctccatggaaagcgcgtcctctgcgctcggctctccgcgctcgtccctaaaccccgccccggctctccgctatccatggaacgtgggtcctctgccccggatcaccgcgccggccctcgatccgcgtccgcgacagcccgatctcgcgtgtggattgggtacccctctgccccagatcgtcgcctccgcccggcatcagcgtccgtgtccgcgttgtggcgtccgcagtctccatggaaggcaatcccgtgcgtggattaggcacccctctgctggcgccagcaccgcccattcgggaccacgcgcagccctcgccgtgccatgcgccaccattggcctcctcaggtgggacttcccctttcgaattctcagatctgaggccgccgccggatctagaggtgacaacgatttccccgagttcaagcgccattgaccgcagcaagacctgaaggacaccagtgcttccttgattccatcctagacgaaccgaggcccccaaatcaggcatcaacaaactcattaaccgagcgacctgaaagacatgcatatatcagagcaaagtgataatgacgccacaagagaagacttcagggatgatttacttcagtcttacagcttgacgcacaaatcactattgaccctacgaaaattattttgtttaaatactacaaagatatgctgtcacagattaactgtttgcggcctctatgtcttgttaccatgtaagttaagcaaagtatttattacaacctgtgcagtgtataaacctccatatgagcaaataataattattcaaacctcttcctgttccaacattgtaaatgccgacttttctaggctctgcttgttgagtgctttcacatgagcatcaagtaaatctgtgacatcaatataatctcttatgcaggttccatcagttgtgggataatctgttcctttaatctacaggaaggtcatgcataaccatcagctcaatcttatagcgcgctttgacaacaaagtgctctatatttttctccgttgctctaggaaccctttgtgcccacatcaccatatgacaataatagctacaagttaaggaataaataaacacacaatttatagagctaaaaacaagatcttgctgcgatggtattagtgttatggtgatattttaccatggattttgcatatcatattgatgtttgtcgtttcgtatctatgttttgtactaatttataactttcgtggcaattggaatgcatttgctacaggttgtccaccaattggatctactgcaacaagtgctcctccactcgcgtgcatgtataaaatggcaggggttctaccaacaatcaacacacctgtgaagtgaagctgggacgtgtaggttgatccacgacgtgtgcatttgtaggaaccctgattttgttagcttgaagacctgtattttcaaattcctcctcgtccggcgccgcctcacggcagctgcggcggcggcatgatgaacgagaagagcaggtagagggagaggagtgcccggactgcggtgggactagcctctgtggccgctgcaaaggagagggcttcgtcttcaagtagctctcgaaggatatgaccaccagggaacacaaggtcgccaagaacatggccaccaaatacactttaggctgtccaccattggacctactgcaacaagtgctcctccacccgcgtgcatgtataaaatggcaggggttctaccaacaatcaacacacctgtgaagcgaagctgggacgtgtaggtggatccacgacgcgtgcatctgtaggaaccctgattttggtatccactaactttgttggactaaagagcccagaccaatcgacccattttcgtggaggattttgtatggaactgcaaagcctgttttaagaagaatttctagcaaaattttggatgcacaatcaacacctcaaaactctctcagctttgtaaccttcagttacgtttctctgaacctttgcttcaatcatgtgatttatttatctatgtgccttcaattactacaaaaggtttgtctagccatggctccttactgtttacgtttgtttgtttttattttttcatgccatgacaaagaaaacactatcattatcaaatattcaaacacatagagttggtaaaagtttgactacgatattgatgatctttcttggtctaattggagtttttgcacctattcataggctagagagtttatgcactgtcctcctattttggatacactttctgttaacaaaaatgctacacagttgcattctacttaccttgtgattttgatggagctctgttgttgtgcttttttgacatttgttggtcctttgagcattaggtctgcatcatgcattatgttgttctctattgatctctatatcccatattgtggagatcactaaaatgttagtaagttaacttctattcacactttcaattccatcgtccgtgaaaattgataaatatgaatgtgttgacttgactccattttatcttctcatttgagcttgtattcttatttttgaagacattgctgccctgcactgagatttctattgttaataaccaatgtgctatttaaattttgatttattccttacgaatgtctactggtttcaggaaagtgttgagagaggtggcatctagaggacgtcatgtcgaacgtgtgaatttttttagaaatatgtatatttgtgtgaagctttttagaaacttgactcccatttattttctatgtcccctctcggctttgtttcctatcatttccatgacttgctatgcatttgcactatatttggcatgtctaaaaccgctacacaaaactttgctatatattttgtctaaaaaatactatatccttgttatgcttgcttgatctttatttttttctggtcttctattcttgtgtggtctatcaagagtgaggcaattatataaggatatatgctttgtcagtattgtctgagtctttgagcgtagcagcaaaagtcttggcacatcattgttttagttattatgacctaaataacccagtttatatatag

SEQ ID NO: 48877 - DNA, 2982 bp, Zea Mays
ccgtattctgccatcctctccctcgcgcaatcgcgtcgtgctcacagccaatgcccccgccaggccctcctcgccccattctctctcctgcaatccccgcggcctcgctccggttctccatcctcgcccacatgtcgtccctaaaccccgccccggctctctccatggaaagcgcgtcctctgcgctcggctctccgcgctcgtccctaaaccccgccccggctctccgctatccatggaacgtgggtcctctgccccggatcaccgcgccggccctcgatccgcgtccgcgacagcccgatctcgcgtgtggattgggtacccctctgccccagatcgtcgcctccgcccggcatcagcgtccgtgtccgcgttgtggcgtccgcagtctccatggaaggcaatcccgtgcgtggattaggcacccctctgctggcgccagcaccgcccattcgggaccacgcgcagccctcgccgtgccatgcgccaccattggcctcctcaggtgggacttcccctttcgaattctcagatctgaggccgccgccggatctagaggtgacaacgatttccccgagttcaagcgccattgaccgcagcaagacctgaaggacaccagtgcttccttgattccatcctagacgaaccgaggcccccaaatcaggcatcaacaaactcattaaccgagcgacctgaaagacatgcatatatcagagcaaagtgataatgacgccacaagagaagacttcagggatgatttacttcagtcttacagcttgacgcacaaatcactattgaccctacgaaaattattttgtttaaatactacaaagatatgctgtcacagattaactgtttgcggcctctatgtcttgttaccatgtaagttaagcaaagtatttattacaacctgtgcagtgtataaacctccatatgagcaaataataattattcaaacctcttcctgttccaacattgtaaatgccgacttttctaggctctgcttgttgagtgctttcacatgagcatcaagtaaatctgtgacatcaatataatctcttatgcaggttccatcagttgtgggataatctgttcctttaatctacaggaaggtcatgcataaccatcagctcaatcttatagcgcgctttgacaacaaagtgctctatatttttctccgttgctctaggaaccctttgtgcccacatcaccatatgacaataatagctacaagttgtccaccaattggatctactgcaacaagtgctcctccactcgcgtgcatgtataaaatggcaggggttctaccaacaatcaacacacctgtgaagtgaagctgggacgtgtaggttgatccacgacgtgtgcatttgtaggaaccctgattttgttagcttgaagacctgtattttcaaattcctcctcgtccggcgccgcctcacggcagctgcggcggcggcatgatgaacgagaagagcaggtagagggagaggagtgcccggactgcggtgggactagcctctgtggccgctgcaaaggagagggcttcgtcttcaagtagctctcgaaggatatgaccaccagggaacacaaggtcgccaagaacatggccaccaaatacactttaggctgtccaccattggacctactgcaacaagtgctcctccacccgcgtgcatgtataaaatggcaggggttctaccaacaatcaacacacctgtgaagcgaagctgggacgtgtaggtggatccacgacgcgtgcatctgtaggaaccctgattttggattttgtatggaactgcaaagcctgttttaagaagaatttctagcaaaattttggatgcacaatcaacacctcaaaactctctcagctttgtaaccttcagttacgtttctctgaacctttgcttcaatcatgtgatttatttatctatgtgccttcaattactacaaaaggtttgtctagccatggctccttactgtttacgtttgtttgtttttattttttcatgccatgacaaagaaaacactatcattatcaaatattcaaacacatagagttggtaaaagtttgactacgatattgatgatctttcttggtctaattggagtttttgcacctattcataggctagagagtttatgcactgtcctcctattttggatacactttctgttaacaaaaatgctacacagttgcattctacttaccttgtgattttgatggagctctgttgttgtgcttttttgacatttgttggtcctttgagcattaggtctgcatcatgcattatgttgttctctattgatctctatatcccatattgtggagatcactaaaatgttagtaagttaacttctattcacactttcaattccatcgtccgtgaaaattgataaatatgaatgtgttgacttgactccattttatcttctcatttgagcttgtattcttatttttgaagacattgctgccctgcactgagatttctattgttaataaccaatgtgctatttaaattttgatttattccttacgaatgtctactggtttcaggaaagtgttgagagaggtggcatctagaggacgtcatgtcgaacgtgtgaatttttttagaaatatgtatatttgtgtgaagctttttagaaacttgactcccatttattttctatgtcccctctcggctttgtttcctatcatttccatgacttgctatgcatttgcactatatttggcatgtctaaaaccgctacacaaaactttgctatatattttgtctaaaaaatactatatccttgttatgcttgcttgatctttatttttttctggtcttctattcttgtgtggtctatcaagagtgaggcaattatataaggatatatgctttgtcagtattgtctgagtctttgagcgtagcagcaaaagtcttggcacatcattgttttagttattatgacctaaataacccagtttatatatag

SEQ ID NO: 48878 - DNA, 2881 bp, Zea Mays
ccgtattctgccatcctctccctcgcgcaatcgcgtcgtgctcacagccaatgcccccgccaggccctcctcgccccattctctctcctgcaatccccgcggcctcgctccggttctccatcctcgcccacatgtcgtccctaaaccccgccccggctctctccatggaaagcgcgtcctctgcgctcggctctccgcgctcgtccctaaaccccgccccggctctccgctatccatggaacgtgggtcctctgccccggatcaccgcgccggccctcgatccgcgtccgcgacagcccgatctcgcgtgtggattgggtacccctctgccccagatcgtcgcctccgcccggcatcagcgtccgtgtccgcgttgtggcgtccgcagtctccatggaaggcaatcccgtgcgtggattaggcacccctctgctggcgccagcaccgcccattcgggaccacgcgcagccctcgccgtgccatgcgccaccattggcctcctcaggtgggacttcccctttcgaattctcagatctgaggccgccgccggatctagaggtgacaacgatttccccgagttcaagcgccattgaccgcagcaagacctgaaggacaccagtgcttccttgattccatcctagacgaaccgaggcccccaaatcaggcatcaacaaactcattaaccgagcgacctgaaagacatgcatatatcagagcaaagtgataatgacgccacaagagaagacttcagggatgatttacttcagtcttacagcttgacgcacaaatcactattgaccctacgaaaattattttgtttaaatactacaaagatatgctgtcacagattaactgtttgcggcctctatgtcttgttaccatgttccatcagttgtgggataatctgttcctttaatctacaggaaggtcatgcataaccatcagctcaatcttatagcgcgctttgacaacaaagtgctctatatttttctccgttgctctaggaaccctttgtgcccacatcaccatatgacaataatagctacaagttaaggaataaataaacacacaatttatagagctaaaaacaagatcttgctgcgatggtattagtgttatggtgatattttaccatggattttgcatatcatattgatgtttgtcgtttcgtatctatgttttgtactaatttataactttcgtggcaattggaatgcatttgctacaggttgtccaccaattggatctactgcaacaagtgctcctccactcgcgtgcatgtataaaatggcaggggttctaccaacaatcaacacacctgtgaagtgaagctgggacgtgtaggttgatccacgacgtgtgcatttgtaggaaccctgattttgttagcttgaagacctgtattttcaaattcctcctcgtccggcgccgcctcacggcagctgcggcggcggcatgatgaacgagaagagcaggtagagggagaggagtgcccggactgcggtgggactagcctctgtggccgctgcaaaggagagggcttcgtcttcaagtagctctcgaaggatatgaccaccagggaacacaaggtcgccaagaacatggccaccaaatacactttaggctgtccaccattggacctactgcaacaagtgctcctccacccgcgtgcatgtataaaatggcaggggttctaccaacaatcaacacacctgtgaagcgaagctgggacgtgtaggtggatccacgacgcgtgcatctgtaggaaccctgattttggtatggtttctacattcaaattcatcagtatgatataagacaatctgtttacaagttttggtaaggtttacaattatggtatgtctttgacattctggccggtatttaagagtagccctctcttcatatcattgaaaggtaaaactattagtggcacacattggttttttcctttgttttcaacatgtaacattatattaggggtatgtgtagtttagggtaagtaatatactcctttgtgctcagtaagtaattgatagaaggtagaaacatatgtgctgtttagggtttacctctttatgatttctggctagccacaatattttcacattgcaaatcaagtccttagtaccctggtaatcaaactaaaatgacagagcatcaagcaaattcattgtgcacctgcatgttgtatgttaaataaataaatttttgcaggggttctaccaactatcaacacacctgtgttttgtcagagcatcaggaaaagagtatcactaattcactatgtgttgtaggtatccactaactttgttggactaaagagcccagaccaatcgacccattttcgtggaggattttgtatggaactgcaaagcctgttttaagaagaatttctagcaaaattttggatgcacaatcaacacctcaaaactctctcagctttgtaaccttcagaaagtgttgagagaggtggcatctagaggacgtcatgtcgaacgtgtgaatttttttagaaatatgtatatttgtgtgaagctttttagaaacttgactcccatttattttctatgtcccctctcggctttgtttcctatcatttccatgacttgctatgcatttgcactatatttggcatgtctaaaaccgctacacaaaactttgctatatattttgtctaaaaaatactatatccttgttatgcttgcttgatctttatttttttctggtcttctattcttgtgtggtctatcaagagtgaggcaattatataaggatatatgctttgtcagtattgtctgagtctttgagcgtagcagcaaaagtcttggcacatcattgttttagttattatgacctaaataacccagtttatatatag

SEQ ID NO: 48879 - DNA, 4123 bp, Zea Mays
ccgtattctgccatcctctccctcgcgcaatcgcgtcgtgctcacagccaatgcccccgccaggccctcctcgccccattctctctcctgcaatccccgcggcctcgctccggttctccatcctcgcccacatgtcgtccctaaaccccgccccggctctctccatggaaagcgcgtcctctgcgctcggctctccgcgctcgtccctaaaccccgccccggctctccgctatccatggaacgtgggtcctctgccccggatcaccgcgccggccctcgatccgcgtccgcgacagcccgatctcgcgtgtggattgggtacccctctgccccagatcgtcgcctccgcccggcatcagcgtccgtgtccgcgttgtggcgtccgcagtctccatggaaggcaatcccgtgcgtggattaggcacccctctgctggcgccagcaccgcccattcgggaccacgcgcagccctcgccgtgccatgcgccaccattggcctcctcaggtgggacttcccctttcgaattctcagatctgaggccgccgccggatctagaggtgacaacgatttccccgagttcaagcgccattgaccgcagcaagacctgaaggacaccagtgcttccttgattccatcctagacgaaccgaggcccccaaatcaggcatcaacaaactcattaaccgagcgacctgaaagacatgcatatatcagagcaaagtgataatgacgccacaagagaagacttcagggatgatttacttcagtcttacagcttgacgcacaaatcactattgaccctacgaaaattattttgtttaaatactacaaagatatgctgtcacagattaactgtttgcggcctctatgtcttgttaccatgtaagttaagcaaagtatttattacaacctgtgcagtgtataaacctccatatgagcaaataataattattcaaacctcttcctgttccaacattgtaaatgccgacttttctaggctctgcttgttgagtgctttcacatgagcatcaagtaaatctgtgacatcaatataatctcttatgcaggttccatcagttgtgggataatctgttcctttaatctacaggaaggtcatgcataaccatcagctcaatcttatagcgcgctttgacaacaaagtgctctatatttttctccgttgctctaggaaccctttgtgcccacatcaccatatgacaataatagctacaagttaaggaataaataaacacacaatttatagagctaaaaacaagatcttgctgcgatggtattagtgttatggtgatattttaccatggattttgcatatcatattgatgtttgtcgtttcgtatctatgttttgtactaatttataactttcgtggcaattggaatgcatttgctacaggttgtccaccaattggatctactgcaacaagtgctcctccactcgcgtgcatgtataaaatggcaggggttctaccaacaatcaacacacctgtgaagtgaagctgggacgtgtaggttgatccacgacgtgtgcatttgtaggaaccctgattttgttagcttgaagacctgtattttcaaattcctcctcgtccggcgccgcctcacggcagctgcggcggcggcatgatgaacgagaagagcaggtagagggagaggagtgcccggactgcggtgggactagcctctgtggccgctgcaaaggagagggcttcgtcttcaagtagctctcgaaggatatgaccaccagggaacacaaggtcgccaagaacatggccaccaaatacactttaggctgtccaccattggacctactgcaacaagtgctcctccacccgcgtgcatgtataaaatggcaggggttctaccaacaatcaacacacctgtgaagcgaagctgggacgtgtaggtggatccacgacgcgtgcatctgtaggaaccctgattttggtatggtttctacattcaaattcatcagtatgatataagacaatctgtttacaagttttggtaaggtttacaattatggtatgtctttgacattctggccggtatttaagagtagccctctcttcatatcattgaaaggtaaaactattagtggcacacattggttttttcctttgttttcaacatgtaacattatattaggggtatgtgtagtttagggtaagtaatatactcctttgtgctcagtaagtaattgatagaaggtagaaacatatgtgctgtttagggtttacctctttatgatttctggctagccacaatattttcacattgcaaatcaagtccttagtaccctggtaatcaaactaaaatgacagagcatcaagcaaattcattgtgcacctgcatgttgtatgttaaataaataaatttttgcaggggttctaccaactatcaacacacctgtgttttgtcagagcatcaggaaaagagtatcactaattcactatgtgttgtaggtatccactaactttgttggactaaagagcccagaccaatcgacccattttcgtggaggtcatcatccttctttgttgagccatctgggtgaccttgcaaattggataagtgccaaagaatacctactgcatatgaattttgagcctttatcaggagctgaataagaactttgttcatagaatcacactgtttatctatagacacccacaatagaatacctactgctcattatggagaaaacattcttgtgatacccctcacatggcagccacaattgtgctaagtgtgaagatataacaatttcttgaaggggtgttaacataaatatgtttgttgaattccaccatcacttaagcattcattttactgttagtttgaattgcaatccctcataattttatcatgtgtgcttaactgcttatgcatatacatatcttgataggattttgtatggaactgcaaagcctgttttaagaagaatttctagcaaaattttggatgcacaatcaacacctcaaaactctctcagctttgtaaccttcagttacgtttctctgaacctttgcttcaatcatgtgatttatttatctatgtgccttcaattactacaaaaggtttgtctagccatggctccttactgtttacgtttgtttgtttttattttttcatgccatgacaaagaaaacactatcattatcaaatattcaaacacatagagttggtaaaagtttgactacgatattgatgatctttcttggtctaattggagtttttgcacctattcataggctagagagtttatgcactgtcctcctattttggatacactttctgttaacaaaaatgctacacagttgcattctacttaccttgtgattttgatggagctctgttgttgtgcttttttgacatttgttggtcctttgagcattaggtctgcatcatgcattatgttgttctctattgatctctatatcccatattgtggagatcactaaaatgttagtaagttaacttctattcacactttcaattccatcgtccgtgaaaattgataaatatgaatgtgttgacttgactccattttatcttctcatttgagcttgtattcttatttttgaagacattgctgccctgcactgagatttctattgttaataaccaatgtgctatttaaattttgatttattccttacgaatgtctactggtttcaggaaagtgttgagagaggtggcatctagaggacgtcatgtcgaacgtgtgaatttttttagaaatatgtatatttgtgtgaagctttttagaaacttgactcccatttattttctatgtcccctctcggctttgtttcctatcatttccatgacttgctatgcatttgcactatatttggcatgtctaaaaccgctacacaaaactttgctatatattttgtctaaaaaatactatatccttgttatgcttgcttgatctttatttttttctggtcttctattcttgtgtggtctatcaagagtgaggcaattatataaggatatatgctttgtcagtattgtctgagtctttgagcgtagcagcaaaagtcttggcacatcattgttttagttattatgacctaaataacccagtttatatatag

SEQ ID NO: 48880 - DNA, 2920 bp, Zea Mays
ccgtattctgccatcctctccctcgcgcaatcgcgtcgtgctcacagccaatgcccccgccaggccctcctcgccccattctctctcctgcaatccccgcggcctcgctccggttctccatcctcgcccacatgtcgtccctaaaccccgccccggctctctccatggaaagcgcgtcctctgcgctcggctctccgcgctcgtccctaaaccccgccccggctctccgctatccatggaacgtgggtcctctgccccggatcaccgcgccggccctcgatccgcgtccgcgacagcccgatctcgcgtgtggattgggtacccctctgccccagatcgtcgcctccgcccggcatcagcgtccgtgtccgcgttgtggcgtccgcagtctccatggaaggcaatcccgtgcgtggattaggcacccctctgctggcgccagcaccgcccattcgggaccacgcgcagccctcgccgtgccatgcgccaccattggcctcctcaggtgggacttcccctttcgaattctcagatctgaggccgccgccggatctagaggtgacaacgatttccccgagttcaagcgccattgaccgcagcaagacctgaaggacaccagtgcttccttgattccatcctagacgaaccgaggcccccaaatcaggcatcaacaaactcattaaccgagcgacctgaaagacatgcatatatcagagcaaagtgataatgacgccacaagagaagacttcagggatgatttacttcagtcttacagcttgacgcacaaatcactattgaccctacgaaaattattttgtttaaatactacaaagatatgctgtcacagattaactgtttgcggcctctatgtcttgttaccatgttgtccaccaattggatctactgcaacaagtgctcctccactcgcgtgcatgtataaaatggcaggggttctaccaacaatcaacacacctgtgaagtgaagctgggacgtgtaggttgatccacgacgtgtgcatttgtaggaaccctgattttgttagcttgaagacctgtattttcaaattcctcctcgtccggcgccgcctcacggcagctgcggcggcggcatgatgaacgagaagagcaggtagagggagaggagtgcccggactgcggtgggactagcctctgtggccgctgcaaaggagagggcttcgtcttcaagtagctctcgaaggatatgaccaccagggaacacaaggtcgccaagaacatggccaccaaatacactttaggctgtccaccattggacctactgcaacaagtgctcctccacccgcgtgcatgtataaaatggcaggggttctaccaacaatcaacacacctgtgaagcgaagctgggacgtgtaggtggatccacgacgcgtgcatctgtaggaaccctgattttggtatggtttctacattcaaattcatcagtatgatataagacaatctgtttacaagttttggtaaggtttacaattatggtatgtctttgacattctggccggtatttaagagtagccctctcttcatatcattgaaaggtaaaactattagtggcacacattggttttttcctttgttttcaacatgtaacattatattaggggtatgtgtagtttagggtaagtaatatactcctttgtgctcagtaagtaattgatagaaggtagaaacatatgtgctgtttagggtttacctctttatgatttctggctagccacaatattttcacattgcaaatcaagtccttagtaccctggtaatcaaactaaaatgacagagcatcaagcaaattcattgtgcacctgcatgttgtatgttaaataaataaatttttgcaggggttctaccaactatcaacacacctgtgttttgtcagagcatcaggaaaagagtatcactaattcactatgtgttgtaggtatccactaactttgttggactaaagagcccagaccaatcgacccattttcgtggaggtcatcatccttctttgttgagccatctgggtgaccttgcaaattggataagtgccaaagaatacctactgcatatgaattttgagcctttatcaggagctgaataagaactttgttcatagaatcacactgtttatctatagacacccacaatagaatacctactgctcattatggagaaaacattcttgtgatacccctcacatggcagccacaattgtgctaagtgtgaagatataacaatttcttgaaggggtgttaacataaatatgtttgttgaattccaccatcacttaagcattcattttactgttagtttgaattgcaatccctcataattttatcatgtgtgcttaactgcttatgcatatacatatcttgataggattttgtatggaactgcaaagcctgttttaagaagaatttctagcaaaattttggatgcacaatcaacacctcaaaactctctcagctttgtaaccttcagaaagtgttgagagaggtggcatctagaggacgtcatgtcgaacgtgtgaatttttttagaaatatgtatatttgtgtgaagctttttagaaacttgactcccatttattttctatgtcccctctcggctttgtttcctatcatttccatgacttgctatgcatttgcactatatttggcatgtctaaaaccgctacacaaaactttgctatatattttgtctaaaaaatactatatccttgttatgcttgcttgatctttatttttttctggtcttctattcttgtgtggtctatcaagagtgaggcaattatataaggatatatgctttgtcagtattgtctgagtctttgagcgtagcagcaaaagtcttggcacatcattgttttagttattatgacctaaataacccagtttatatatag

SEQ ID NO: 48881 - DNA, 3438 bp, Zea Mays
ccgtattctgccatcctctccctcgcgcaatcgcgtcgtgctcacagccaatgcccccgccaggccctcctcgccccattctctctcctgcaatccccgcggcctcgctccggttctccatcctcgcccacatgtcgtccctaaaccccgccccggctctctccatggaaagcgcgtcctctgcgctcggctctccgcgctcgtccctaaaccccgccccggctctccgctatccatggaacgtgggtcctctgccccggatcaccgcgccggccctcgatccgcgtccgcgacagcccgatctcgcgtgtggattgggtacccctctgccccagatcgtcgcctccgcccggcatcagcgtccgtgtccgcgttgtggcgtccgcagtctccatggaaggcaatcccgtgcgtggattaggcacccctctgctggcgccagcaccgcccattcgggaccacgcgcagccctcgccgtgccatgcgccaccattggcctcctcaggtgggacttcccctttcgaattctcagatctgaggccgccgccggatctagaggtgacaacgatttccccgagttcaagcgccattgaccgcagcaagacctgaaggacaccagtgcttccttgattccatcctagacgaaccgaggcccccaaatcaggcatcaacaaactcattaaccgagcgacctgaaagacatgcatatatcagagcaaagtgataatgacgccacaagagaagacttcagggatgatttacttcagtcttacagcttgacgcacaaatcactattgaccctacgaaaattattttgtttaaatactacaaagatatgctgtcacagattaactgtttgcggcctctatgtcttgttaccatgttccatcagttgtgggataatctgttcctttaatctacaggaaggttgtccaccaattggatctactgcaacaagtgctcctccactcgcgtgcatgtataaaatggcaggggttctaccaacaatcaacacacctgtgaagtgaagctgggacgtgtaggttgatccacgacgtgtgcatttgtaggaaccctgattttggtatggtttctacactcaaattcatcagtatgatataagacaatttgtttacattaattctcattgtgtgaccatttgaaatatgttttgctatttgaaagttcaagaaaaacatgatgccttcaatagtttcatgtacttcttgtgtttcttttcaaatttctttagtttgtcttttatatccagttagcttgaagacctgtattttcaaattcctcctcgtccggcgccgcctcacggcagctgcggcggcggcatgatgaacgagaagagcaggtagagggagaggagtgcccggactgcggtgggactagcctctgtggccgctgcaaaggagagggcttcgtcttcaagtagctctcgaaggatatgaccaccagggaacacaaggtcgccaagaacatggccaccaaatacactttaggctgtccaccattggacctactgcaacaagtgctcctccacccgcgtgcatgtataaaatggcaggggttctaccaacaatcaacacacctgtgaagcgaagctgggacgtgtaggtggatccacgacgcgtgcatctgtaggaaccctgattttggtatggtttctacattcaaattcatcagtatgatataagacaatctgtttacaagttttggtaaggtttacaattatggtatgtctttgacattctggccggtatttaagagtagccctctcttcatatcattgaaaggtaaaactattagtggcacacattggttttttcctttgttttcaacatgtaacattatattaggggtatgtgtagtttagggtaagtaatatactcctttgtgctcagtaagtaattgatagaaggtagaaacatatgtgctgtttagggtttacctctttatgatttctggctagccacaatattttcacattgcaaatcaagtccttagtaccctggtaatcaaactaaaatgacagagcatcaagcaaattcattgtgcacctgcatgttgtatgttaaataaataaatttttgcaggggttctaccaactatcaacacacctgtgttttgtcagagcatcaggaaaagagtatcactaattcactatgtgttgtaggtatccactaactttgttggactaaagagcccagaccaatcgacccattttcgtggaggattttgtatggaactgcaaagcctgttttaagaagaatttctagcaaaattttggatgcacaatcaacacctcaaaactctctcagctttgtaaccttcagttacgtttctctgaacctttgcttcaatcatgtgatttatttatctatgtgccttcaattactacaaaaggtttgtctagccatggctccttactgtttacgtttgtttgtttttattttttcatgccatgacaaagaaaacactatcattatcaaatattcaaacacatagagttggtaaaagtttgactacgatattgatgatctttcttggtctaattggagtttttgcacctattcataggctagagagtttatgcactgtcctcctattttggatacactttctgttaacaaaaatgctacacagttgcattctacttaccttgtgattttgatggagctctgttgttgtgcttttttgacatttgttggtcctttgagcattaggtctgcatcatgcattatgttgttctctattgatctctatatcccatattgtggagatcactaaaatgttagtaagttaacttctattcacactttcaattccatcgtccgtgaaaattgataaatatgaatgtgttgacttgactccattttatcttctcatttgagcttgtattcttatttttgaagacattgctgccctgcactgagatttctattgttaataaccaatgtgctatttaaattttgatttattccttacgaatgtctactggtttcaggaaagtgttgagagaggtggcatctagaggacgtcatgtcgaacgtgtgaatttttttagaaatatgtatatttgtgtgaagctttttagaaacttgactcccatttattttctatgtcccctctcggctttgtttcctatcatttccatgacttgctatgcatttgcactatatttggcatgtctaaaaccgctacacaaaactttgctatatattttgtctaaaaaatactatatccttgttatgcttgcttgatctttatttttttctggtcttctattcttgtgtggtctatcaagagtgaggcaattatataaggatatatgctttgtcagtattgtctgagtctttgagcgtagcagcaaaagtcttggcacatcattgttttagttattatgacctaaataacccagtttatatatag

SEQ ID NO: 48882 - DNA, 2495 bp, Zea Mays
ccgtattctgccatcctctccctcgcgcaatcgcgtcgtgctcacagccaatgcccccgccaggccctcctcgccccattctctctcctgcaatccccgcggcctcgctccggttctccatcctcgcccacatgtcgtccctaaaccccgccccggctctctccatggaaagcgcgtcctctgcgctcggctctccgcgctcgtccctaaaccccgccccggctctccgctatccatggaacgtgggtcctctgccccggatcaccgcgccggccctcgatccgcgtccgcgacagcccgatctcgcgtgtggattgggtacccctctgccccagatcgtcgcctccgcccggcatcagcgtccgtgtccgcgttgtggcgtccgcagtctccatggaaggcaatcccgtgcgtggattaggcacccctctgctggcgccagcaccgcccattcgggaccacgcgcagccctcgccgtgccatgcgccaccattggcctcctcaggtgggacttcccctttcgaattctcagatctgaggccgccgccggatctagaggtgacaacgatttccccgagttcaagcgccattgaccgcagcaagacctgaaggacaccagtgcttccttgattccatcctagacgaaccgaggcccccaaatcaggcatcaacaaactcattaaccgagcgacctgaaagacatgcatatatcagagcaaagtgataatgacgccacaagagaagacttcagggatgatttacttcagtcttacagcttgacgcacaaatcactattgaccctacgaaaattattttgtttaaatactacaaagatatgctgtcacagattaactgtttgcggcctctatgtcttgttaccatgtaagttaagcaaagtatttattacaacctgtgcagtgtataaacctccatatgagcaaataataattattcaaacctcttcctgttccaacattgtaaatgccgacttttctaggctctgcttgttgagtgctttcacatgagcatcaagtaaatctgtgacatcaatataatctcttatgcaggttccatcagttgtgggataatctgttcctttaatctacaggaaggtcatgcataaccatcagctcaatcttatagcgcgctttgacaacaaagtgctctatatttttctccgttgctctaggaaccctttgtgcccacatcaccatatgacaataatagctacaagttaaggaataaataaacacacaatttatagagctaaaaacaagatcttgctgcgatggtattagtgttatggtgatattttaccatggattttgcatatcatattgatgtttgtcgtttcgtatctatgttttgtactaatttataactttcgtggcaattggaatgcatttgctacaggttgtccaccaattggatctactgcaacaagtgctcctccactcgcgtgcatgtataaaatggcaggggttctaccaacaatcaacacacctgtgaagtgaagctgggacgtgtaggttgatccacgacgtgtgcatttgtaggaaccctgattttgttagcttgaagacctgtattttcaaattcctcctcgtccggcgccgcctcacggcagctgcggcggcggcatgatgaacgagaagagcaggtagagggagaggagtgcccggactgcggtgggactagcctctgtggccgctgcaaaggagagggcttcgtcttcaagtagctctcgaaggatatgaccaccagggaacacaaggtcgccaagaacatggccaccaaatacactttaggctgtccaccattggacctactgcaacaagtgctcctccacccgcgtgcatgtataaaatggcaggggttctaccaacaatcaacacacctgtgaagcgaagctgggacgtgtaggtggatccacgacgcgtgcatctgtaggaaccctgattttggattttgtatggaactgcaaagcctgttttaagaagaatttctagcaaaattttggatgcacaatcaacacctcaaaactctctcagctttgtaaccttcattcaggaaagtgttgagagaggtggcatctagaggacgtcatgtcgaacgtgtgaatttttttagaaatatgtatatttgtgtgaagctttttagaaacttgactcccatttattttctatgtcccctctcggctttgtttcctatcatttccatgacttgctatgcatttgcactatatttggcatgtctaaaaccgctacacaaaactttgctatatattttgtctaaaaaatactatatccttgttatgcttgcttgatctttatttttttctggtcttctattcttgtgtggtctatcaagagtgaggcaattatataaggatatatgctttgtcagtattgtctgagtctttgagcgtagcagcaaaagtcttggcacatcattgttttagttattatgacctaaataacccagtttatatatag

SEQ ID NO: 48883 - DNA, 2861 bp, Zea Mays
ccgtattctgccatcctctccctcgcgcaatcgcgtcgtgctcacagccaatgcccccgccaggccctcctcgccccattctctctcctgcaatccccgcggcctcgctccggttctccatcctcgcccacatgtcgtccctaaaccccgccccggctctctccatggaaagcgcgtcctctgcgctcggctctccgcgctcgtccctaaaccccgccccggctctccgctatccatggaacgtgggtcctctgccccggatcaccgcgccggccctcgatccgcgtccgcgacagcccgatctcgcgtgtggattgggtacccctctgccccagatcgtcgcctccgcccggcatcagcgtccgtgtccgcgttgtggcgtccgcagtctccatggaaggcaatcccgtgcgtggattaggcacccctctgctggcgccagcaccgcccattcgggaccacgcgcagccctcgccgtgccatgcgccaccattggcctcctcaggtgggacttcccctttcgaattctcagatctgaggccgccgccggatctagaggtgacaacgatttccccgagttcaagcgccattgaccgcagcaagacctgaaggacaccagtgcttccttgattccatcctagacgaaccgaggcccccaaatcaggcatcaacaaactcattaaccgagcgacctgaaagacatgcatatatcagagcaaagtgataatgacgccacaagagaagacttcagggatgatttacttcagtcttacagcttgacgcacaaatcactattgaccctacgaaaattattttgtttaaatactacaaagatatgctgtcacagattaactgtttgcggcctctatgtcttgttaccatgtaagttaagcaaagtatttattacaacctgtgcagtgtataaacctccatatgagcaaataataattattcaaacctcttcctgttccaacattgtaaatgccgacttttctaggctctgcttgttgagtgctttcacatgagcatcaagtaaatctgtgacatcaatataatctcttatgcaggttccatcagttgtgggataatctgttcctttaatctacaggaaggttgtccaccaattggatctactgcaacaagtgctcctccactcgcgtgcatgtataaaatggcaggggttctaccaacaatcaacacacctgtgaagtgaagctgggacgtgtaggttgatccacgacgtgtgcatttgtaggaaccctgattttgttagcttgaagacctgtattttcaaattcctcctcgtccggcgccgcctcacggcagctgcggcggcggcatgatgaacgagaagagcaggtagagggagaggagtgcccggactgcggtgggactagcctctgtggccgctgcaaaggagagggcttcgtcttcaagtagctctcgaaggatatgaccaccagggaacacaaggtcgccaagaacatggccaccaaatacactttaggctgtccaccattggacctactgcaacaagtgctcctccacccgcgtgcatgtataaaatggcaggggttctaccaacaatcaacacacctgtgaagcgaagctgggacgtgtaggtggatccacgacgcgtgcatctgtaggaaccctgattttggattttgtatggaactgcaaagcctgttttaagaagaatttctagcaaaattttggatgcacaatcaacacctcaaaactctctcagctttgtaaccttcagttacgtttctctgaacctttgcttcaatcatgtgatttatttatctatgtgccttcaattactacaaaaggtttgtctagccatggctccttactgtttacgtttgtttgtttttattttttcatgccatgacaaagaaaacactatcattatcaaatattcaaacacatagagttggtaaaagtttgactacgatattgatgatctttcttggtctaattggagtttttgcacctattcataggctagagagtttatgcactgtcctcctattttggatacactttctgttaacaaaaatgctacacagttgcattctacttaccttgtgattttgatggagctctgttgttgtgcttttttgacatttgttggtcctttgagcattaggtctgcatcatgcattatgttgttctctattgatctctatatcccatattgtggagatcactaaaatgttagtaagttaacttctattcacactttcaattccatcgtccgtgaaaattgataaatatgaatgtgttgacttgactccattttatcttctcatttgagcttgtattcttatttttgaagacattgctgccctgcactgagatttctattgttaataaccaatgtgctatttaaattttgatttattccttacgaatgtctactggtttcaggaaagtgttgagagaggtggcatctagaggacgtcatgtcgaacgtgtgaatttttttagaaatatgtatatttgtgtgaagctttttagaaacttgactcccatttattttctatgtcccctctcggctttgtttcctatcatttccatgacttgctatgcatttgcactatatttggcatgtctaaaaccgctacacaaaactttgctatatattttgtctaaaaaatactatatccttgttatgcttgcttgatctttatttttttctggtcttctattcttgtgtggtctatcaagagtgaggcaattatataaggatatatgctttgtcagtattgtctgagtctttgagcgtagcagcaaaagtcttggcacatcattgttttagttattatgacctaaataacccagtttatatatag

SEQ ID NO: 48884 - DNA, 2857 bp, Zea Mays
ccgtattctgccatcctctccctcgcgcaatcgcgtcgtgctcacagccaatgcccccgccaggccctcctcgccccattctctctcctgcaatccccgcggcctcgctccggttctccatcctcgcccacatgtcgtccctaaaccccgccccggctctctccatggaaagcgcgtcctctgcgctcggctctccgcgctcgtccctaaaccccgccccggctctccgctatccatggaacgtgggtcctctgccccggatcaccgcgccggccctcgatccgcgtccgcgacagcccgatctcgcgtgtggattgggtacccctctgccccagatcgtcgcctccgcccggcatcagcgtccgtgtccgcgttgtggcgtccgcagtctccatggaaggcaatcccgtgcgtggattaggcacccctctgctggcgccagcaccgcccattcgggaccacgcgcagccctcgccgtgccatgcgccaccattggcctcctcaggtgggacttcccctttcgaattctcagatctgaggccgccgccggatctagaggtgacaacgatttccccgagttcaagcgccattgaccgcagcaagacctgaaggacaccagtgcttccttgattccatcctagacgaaccgaggcccccaaatcaggcatcaacaaactcattaaccgagcgacctgaaagacatgcatatatcagagcaaagtgataatgacgccacaagagaagacttcagggatgatttacttcagtcttacagcttgacgcacaaatcactattgaccctacgaaaattattttgtttaaatactacaaagatatgctgtcacagattaactgtttgcggcctctatgtcttgttaccatgtaagttaagcaaagtatttattacaacctgtgcagtgtataaacctccatatgagcaaataataattattcaaacctcttcctgttccaacattgtaaatgccgacttttctaggctctgcttgttgagtgctttcacatgagcatcaagtaaatctgtgacatcaatataatctcttatgcaggttccatcagttgtgggataatctgttcctttaatctacaggaaggttgtccaccaattggatctactgcaacaagtgctcctccactcgcgtgcatgtataaaatggcaggggttctaccaacaatcaacacacctgtgaagtgaagctgggacgtgtaggttgatccacgacgtgtgcatttgtaggaaccctgattttgcttgaagacctgtattttcaaattcctcctcgtccggcgccgcctcacggcagctgcggcggcggcatgatgaacgagaagagcaggtagagggagaggagtgcccggactgcggtgggactagcctctgtggccgctgcaaaggagagggcttcgtcttcaagtagctctcgaaggatatgaccaccagggaacacaaggtcgccaagaacatggccaccaaatacactttaggctgtccaccattggacctactgcaacaagtgctcctccacccgcgtgcatgtataaaatggcaggggttctaccaacaatcaacacacctgtgaagcgaagctgggacgtgtaggtggatccacgacgcgtgcatctgtaggaaccctgattttggattttgtatggaactgcaaagcctgttttaagaagaatttctagcaaaattttggatgcacaatcaacacctcaaaactctctcagctttgtaaccttcagttacgtttctctgaacctttgcttcaatcatgtgatttatttatctatgtgccttcaattactacaaaaggtttgtctagccatggctccttactgtttacgtttgtttgtttttattttttcatgccatgacaaagaaaacactatcattatcaaatattcaaacacatagagttggtaaaagtttgactacgatattgatgatctttcttggtctaattggagtttttgcacctattcataggctagagagtttatgcactgtcctcctattttggatacactttctgttaacaaaaatgctacacagttgcattctacttaccttgtgattttgatggagctctgttgttgtgcttttttgacatttgttggtcctttgagcattaggtctgcatcatgcattatgttgttctctattgatctctatatcccatattgtggagatcactaaaatgttagtaagttaacttctattcacactttcaattccatcgtccgtgaaaattgataaatatgaatgtgttgacttgactccattttatcttctcatttgagcttgtattcttatttttgaagacattgctgccctgcactgagatttctattgttaataaccaatgtgctatttaaattttgatttattccttacgaatgtctactggtttcaggaaagtgttgagagaggtggcatctagaggacgtcatgtcgaacgtgtgaatttttttagaaatatgtatatttgtgtgaagctttttagaaacttgactcccatttattttctatgtcccctctcggctttgtttcctatcatttccatgacttgctatgcatttgcactatatttggcatgtctaaaaccgctacacaaaactttgctatatattttgtctaaaaaatactatatccttgttatgcttgcttgatctttatttttttctggtcttctattcttgtgtggtctatcaagagtgaggcaattatataaggatatatgctttgtcagtattgtctgagtctttgagcgtagcagcaaaagtcttggcacatcattgttttagttattatgacctaaataacccagtttatatatag

SEQ ID NO: 48885 - DNA, 2580 bp, Zea Mays
ccgtattctgccatcctctccctcgcgcaatcgcgtcgtgctcacagccaatgcccccgccaggccctcctcgccccattctctctcctgcaatccccgcggcctcgctccggttctccatcctcgcccacatgtcgtccctaaaccccgccccggctctctccatggaaagcgcgtcctctgcgctcggctctccgcgctcgtccctaaaccccgccccggctctccgctatccatggaacgtgggtcctctgccccggatcaccgcgccggccctcgatccgcgtccgcgacagcccgatctcgcgtgtggattgggtacccctctgccccagatcgtcgcctccgcccggcatcagcgtccgtgtccgcgttgtggcgtccgcagtctccatggaaggcaatcccgtgcgtggattaggcacccctctgctggcgccagcaccgcccattcgggaccacgcgcagccctcgccgtgccatgcgccaccattggcctcctcaggtgggacttcccctttcgaattctcagatctgaggccgccgccggatctagaggtgacaacgatttccccgagttcaagcgccattgaccgcagcaagacctgaaggacaccagtgcttccttgattccatcctagacgaaccgaggcccccaaatcaggcatcaacaaactcattaaccgagcgacctgaaagacatgcatatatcagagcaaagtgataatgacgccacaagagaagacttcagggatgatttacttcagtcttacagcttgacgcacaaatcactattgaccctacgaaaattattttgtttaaatactacaaagatatgctgtcacagattaactgtttgcggcctctatgtcttgttaccatgttccatcagttgtgggataatctgttcctttaatctacaggaaggttgtccaccaattggatctactgcaacaagtgctcctccactcgcgtgcatgtataaaatggcaggggttctaccaacaatcaacacacctgtgaagtgaagctgggacgtgtaggttgatccacgacgtgtgcatttgtaggaaccctgattttgttagcttgaagacctgtattttcaaattcctcctcgtccggcgccgcctcacggcagctgcggcggcggcatgatgaacgagaagagcaggtagagggagaggagtgcccggactgcggtgggactagcctctgtggccgctgcaaaggagagggcttcgtcttcaagtagctctcgaaggatatgaccaccagggaacacaaggtcgccaagaacatggccaccaaatacactttaggctgtccaccattggacctactgcaacaagtgctcctccacccgcgtgcatgtataaaatggcaggggttctaccaacaatcaacacacctgtgaagcgaagctgggacgtgtaggtggatccacgacgcgtgcatctgtaggaaccctgattttggtatggtttctacattcaaattcatcagtatgatataagacaatctgtttacaagttttggtaaggtttacaattatggtatgtctttgacattctggccggtatttaagagtagccctctcttcatatcattgaaaggtaaaactattagtggcacacattggttttttcctttgttttcaacatgtaacattatattaggggtatgtgtagtttagggtaagtaatatactcctttgtgctcagtaagtaattgatagaaggtagaaacatatgtgctgtttagggtttacctctttatgatttctggctagccacaatattttcacattgcaaatcaagtccttagtaccctggtaatcaaactaaaatgacagagcatcaagcaaattcattgtgcacctgcatgttgtatgttaaataaataaatttttgcaggggttctaccaactatcaacacacctgtgttttgtcagagcatcaggaaaagagtatcactaattcactatgtgttgtaggtatccactaactttgttggactaaagagcccagaccaatcgacccattttcgtggaggattttgtatggaactgcaaagcctgttttaagaagaatttctagcaaaattttggatgcacaatcaacacctcaaaactctctcagctttgtaaccttcagaaagtgttgagagaggtggcatctagaggacgtcatgtcgaacgtgtgaatttttttagaaatatgtatatttgtgtgaagctttttagaaacttgactcccatttattttctatgtcccctctcggctttgtttcctatcatttccatgacttgctatgcatttgcactatatttggcatgtctaaaaccgctacacaaaactttgctatatattttgtctaaaaaatactatatccttgttatgcttgcttgatctttatttttttctggtcttctattcttgtgtggtctatcaagagtgaggcaattatataaggatatatgctttgtcagtattgtctgagtctttgagcgtagcagcaaaagtcttggcacatcattgttttagttattatgacctaaataacccagtttatatatag

SEQ ID NO: 48886 - DNA, 2965 bp, Zea Mays
ccgtattctgccatcctctccctcgcgcaatcgcgtcgtgctcacagccaatgcccccgccaggccctcctcgccccattctctctcctgcaatccccgcggcctcgctccggttctccatcctcgcccacatgtcgtccctaaaccccgccccggctctctccatggaaagcgcgtcctctgcgctcggctctccgcgctcgtccctaaaccccgccccggctctccgctatccatggaacgtgggtcctctgccccggatcaccgcgccggccctcgatccgcgtccgcgacagcccgatctcgcgtgtggattgggtacccctctgccccagatcgtcgcctccgcccggcatcagcgtccgtgtccgcgttgtggcgtccgcagtctccatggaaggcaatcccgtgcgtggattaggcacccctctgctggcgccagcaccgcccattcgggaccacgcgcagccctcgccgtgccatgcgccaccattggcctcctcaggtgggacttcccctttcgaattctcagatctgaggccgccgccggatctagaggtgacaacgatttccccgagttcaagcgccattgaccgcagcaagacctgaaggacaccagtgcttccttgattccatcctagacgaaccgaggcccccaaatcaggcatcaacaaactcattaaccgagcgacctgaaagacatgcatatatcagagcaaagtgataatgacgccacaagagaagacttcagggatgatttacttcagtcttacagcttgacgcacaaatcactattgaccctacgaaaattattttgtttaaatactacaaagatatgctgtcacagattaactgtttgcggcctctatgtcttgttaccatgttccatcagttgtgggataatctgttcctttaatctacaggaaggttgtccaccaattggatctactgcaacaagtgctcctccactcgcgtgcatgtataaaatggcaggggttctaccaacaatcaacacacctgtgaagtgaagctgggacgtgtaggttgatccacgacgtgtgcatttgtaggaaccctgattttgttagcttgaagacctgtattttcaaattcctcctcgtccggcgccgcctcacggcagctgcggcggcggcatgatgaacgagaagagcaggtagagggagaggagtgcccggactgcggtgggactagcctctgtggccgctgcaaaggagagggcttcgtcttcaagtagctctcgaaggatatgaccaccagggaacacaaggtcgccaagaacatggccaccaaatacactttaggctgtccaccattggacctactgcaacaagtgctcctccacccgcgtgcatgtataaaatggcaggggttctaccaacaatcaacacacctgtgaagcgaagctgggacgtgtaggtggatccacgacgcgtgcatctgtaggaaccctgattttggtatggtttctacattcaaattcatcagtatgatataagacaatctgtttacaagttttggtaaggtttacaattatggtatgtctttgacattctggccggtatttaagagtagccctctcttcatatcattgaaaggtaaaactattagtggcacacattggttttttcctttgttttcaacatgtaacattatattaggggtatgtgtagtttagggtaagtaatatactcctttgtgctcagtaagtaattgatagaaggtagaaacatatgtgctgtttagggtttacctctttatgatttctggctagccacaatattttcacattgcaaatcaagtccttagtaccctggtaatcaaactaaaatgacagagcatcaagcaaattcattgtgcacctgcatgttgtatgttaaataaataaatttttgcaggggttctaccaactatcaacacacctgtgttttgtcagagcatcaggaaaagagtatcactaattcactatgtgttgtaggtatccactaactttgttggactaaagagcccagaccaatcgacccattttcgtggaggtcatcatccttctttgttgagccatctgggtgaccttgcaaattggataagtgccaaagaatacctactgcatatgaattttgagcctttatcaggagctgaataagaactttgttcatagaatcacactgtttatctatagacacccacaatagaatacctactgctcattatggagaaaacattcttgtgatacccctcacatggcagccacaattgtgctaagtgtgaagatataacaatttcttgaaggggtgttaacataaatatgtttgttgaattccaccatcacttaagcattcattttactgttagtttgaattgcaatccctcataattttatcatgtgtgcttaactgcttatgcatatacatatcttgataggattttgtatggaactgcaaagcctgttttaagaagaatttctagcaaaattttggatgcacaatcaacacctcaaaactctctcagctttgtaaccttcagaaagtgttgagagaggtggcatctagaggacgtcatgtcgaacgtgtgaatttttttagaaatatgtatatttgtgtgaagctttttagaaacttgactcccatttattttctatgtcccctctcggctttgtttcctatcatttccatgacttgctatgcatttgcactatatttggcatgtctaaaaccgctacacaaaactttgctatatattttgtctaaaaaatactatatccttgttatgcttgcttgatctttatttttttctggtcttctattcttgtgtggtctatcaagagtgaggcaattatataaggatatatgctttgtcagtattgtctgagtctttgagcgtagcagcaaaagtcttggcacatcattgttttagttattatgacctaaataacccagtttatatatag

SEQ ID NO: 48887 - DNA, 2247 bp, Zea Mays
ccgtattctgccatcctctccctcgcgcaatcgcgtcgtgctcacagccaatgcccccgccaggccctcctcgccccattctctctcctgcaatccccgcggcctcgctccggttctccatcctcgcccacatgtcgtccctaaaccccgccccggctctctccatggaaagcgcgtcctctgcgctcggctctccgcgctcgtccctaaaccccgccccggctctccgctatccatggaacgtgggtcctctgccccggatcaccgcgccggccctcgatccgcgtccgcgacagcccgatctcgcgtgtggattgggtacccctctgccccagatcgtcgcctccgcccggcatcagcgtccgtgtccgcgttgtggcgtccgcagtctccatggaaggcaatcccgtgcgtggattaggcacccctctgctggcgccagcaccgcccattcgggaccacgcgcagccctcgccgtgccatgcgccaccattggcctcctcaggtgggacttcccctttcgaattctcagatctgaggccgccgccggatctagaggtgacaacgatttccccgagttcaagcgccattgaccgcagcaagacctgaaggacaccagtgcttccttgattccatcctagacgaaccgaggcccccaaatcaggcatcaacaaactcattaaccgagcgacctgaaagacatgcatatatcagagcaaagtgataatgacgccacaagagaagacttcagggatgatttacttcagtcttacagcttgacgcacaaatcactattgaccctacgaaaattattttgtttaaatactacaaagatatgctgtcacagattaactgtttgcggcctctatgtcttgttaccatgtaagttaagcaaagtatttattacaacctgtgcagtgtataaacctccatatgagcaaataataattattcaaacctcttcctgttccaacattgtaaatgccgacttttctaggctctgcttgttgagtgctttcacatgagcatcaagtaaatctgtgacatcaatataatctcttatgcaggttccatcagttgtgggataatctgttcctttaatctacaggaaggttgtccaccaattggatctactgcaacaagtgctcctccactcgcgtgcatgtataaaatggcaggggttctaccaacaatcaacacacctgtgaagtgaagctgggacgtgtaggttgatccacgacgtgtgcatttgtaggaaccctgattttgttagcttgaagacctgtattttcaaattcctcctcgtccggcgccgcctcacggcagctgcggcggcggcatgatgaacgagaagagcaggtagagggagaggagtgcccggactgcggtgggactagcctctgtggccgctgcaaaggagagggcttcgtcttcaagtagctctcgaaggatatgaccaccagggaacacaaggtcgccaagaacatggccaccaaatacactttaggctgtccaccattggacctactgcaacaagtgctcctccacccgcgtgcatgtataaaatggcaggggttctaccaacaatcaacacacctgtgaagcgaagctgggacgtgtaggtggatccacgacgcgtgcatctgtaggaaccctgattttggtatccactaactttgttggactaaagagcccagaccaatcgacccattttcgtggaggattttgtatggaactgcaaagcctgttttaagaagaatttctagcaaaattttggatgcacaatcaacacctcaaaactctctcagctttgtaaccttcagaaagtgttgagagaggtggcatctagaggacgtcatgtcgaacgtgtgaatttttttagaaatatgtatatttgtgtgaagctttttagaaacttgactcccatttattttctatgtcccctctcggctttgtttcctatcatttccatgacttgctatgcatttgcactatatttggcatgtctaaaaccgctacacaaaactttgctatatattttgtctaaaaaatactatatccttgttatgcttgcttgatctttatttttttctggtcttctattcttgtgtggtctatcaagagtgaggcaattatataaggatatatgctttgtcagtattgtctgagtctttgagcgtagcagcaaaagtcttggcacatcattgttttagttattatgacctaaataacccagtttatatatag

SEQ ID NO: 48888 - DNA, 3383 bp, Zea Mays
catcctctccctcgcgcaatcgcgtcgtgctcacagccaatgcccccgccaggccctcctcgccccattctctctcctgcaatccccgcggcctcgctccggttctccatcctcgcccacatgtcgtccctaaaccccgccccggctctctccatggaaagcgcgtcctctgcgctcggctctccgcgctcgtccctaaaccccgccccggctctccgctatccatggaacgtgggtcctctgccccggatcaccgcgccggccctcgatccgcgtccgcgacagcccgatctcgcgtgtggattgggtacccctctgccccagatcgtcgcctccgcccggcatcagcgtccgtgtccgcgttgtggcgtccgcagtctccatggaaggcaatcccgtgcgtggattaggcacccctctgctggcgccagcaccgcccattcgggaccacgcgcagccctcgccgtgccatgcgccaccattggcctcctcaggtgggacttcccctttcgaattctcagatctgaggccgccgccggatctagaggtgacaacgatttccccgagttcaagcgccattgaccgcagcaagacctgaaggacaccagtgcttccttgattccatcctagacgaaccgaggcccccaaatcaggcatcaacaaactcattaaccgagcgacctgaaagacatgcatatatcagagcaaagtgataatgacgccacaagagaagacttcagggatgatttacttcagtcttacagcttgacgcacaaatcactattgaccctacgaaaattattttgtttaaatactacaaagatatgctgtcacagattaactgtttgcggcctctatgtcttgttaccatgtaagttaagcaaagtatttattacaacctgtgcagtgtataaacctccatatgagcaaataataattattcaaacctcttcctgttccaacattgtaaatgccgacttttctaggctctgcttgttgagtgctttcacatgagcatcaagtaaatctgtgacatcaatataatctcttatgcaggttccatcagttgtgggataatctgttcctttaatctacaggaaggtcatgcataaccatcagctcaatcttatagcgcgctttgacaacaaagtgctctatatttttctccgttgctctaggaaccctttgtgcccacatcaccatatgacaataatagctacaagttaaggaataaataaacacacaatttatagagctaaaaacaagatcttgctgcgatggtattagtgttatggtgatattttaccatggattttgcatatcatattgatgtttgtcgtttcgtatctatgttttgtactaatttataactttcgtggcaattggaatgcatttgctacaggttgtccaccaattggatctactgcaacaagtgctcctccactcgcgtgcatgtataaaatggcaggggttctaccaacaatcaacacacctgtgaagtgaagctgggacgtgtaggttgatccacgacgtgtgcatttgtaggaaccctgattttgctgcggcggcggcatgatgaacgagaagagcaggtagagggagaggagtgcccggactgcggtgggactagcctctgtggccgctgcaaaggagagggcttcgtcttcaagtagctctcgaaggatatgaccaccagggaacacaaggtcgccaagaacatggccaccaaatacactttaggctgtccaccattggacctactgcaacaagtgctcctccacccgcgtgcatgtataaaatggcaggggttctaccaacaatcaacacacctgtgaagcgaagctgggacgtgtaggtggatccacgacgcgtgcatctgtaggaaccctgattttggtatggtttctacattcaaattcatcagtatgatataagacaatctgtttacaagttttggtaaggtttacaattatggtatgtctttgacattctggccggtatttaagagtagccctctcttcatatcattgaaaggtaaaactattagtggcacacattggttttttcctttgttttcaacatgtaacattatattaggggtatgtgtagtttagggtaagtaatatactcctttgtgctcagtaagtaattgatagaaggtagaaacatatgtgctgtttagggtttacctctttatgatttctggctagccacaatattttcacattgcaaatcaagtccttagtaccctggtaatcaaactaaaatgacagagcatcaagcaaattcattgtgcacctgcatgttgtatgttaaataaataaatttttgcaggggttctaccaactatcaacacacctgtgttttgtcagagcatcaggaaaagagtatcactaattcactatgtgttgtaggtatccactaactttgttggactaaagagcccagaccaatcgacccattttcgtggaggtcatcatccttctttgttgagccatctgggtgaccttgcaaattggataagtgccaaagaatacctactgcatatgaattttgagcctttatcaggagctgaataagaactttgttcatagaatcacactgtttatctatagacacccacaatagaatacctactgctcattatggagaaaacattcttgtgatacccctcacatggcagccacaattgtgctaagtgtgaagatataacaatttcttgaaggggtgttaacataaatatgtttgttgaattccaccatcacttaagcattcattttactgttagtttgaattgcaatccctcataattttatcatgtgtgcttaactgcttatgcatatacatatcttgataggattttgtatggaactgcaaagcctgttttaagaagaatttctagcaaaattttggatgcacaatcaacacctcaaaactctctcagctttgtaaccttcagaaagtgttgagagaggtggcatctagaggacgtcatgtcgaacgtgtgaatttttttagaaatatgtatatttgtgtgaagctttttagaaacttgactcccatttattttctatgtcccctctcggctttgtttcctatcatttccatgacttgctatgcatttgcactatatttggcatgtctaaaaccgctacacaaaactttgctatatattttgtctaaaaaatactatatccttgttatgcttgcttgatctttatttttttctggtcttctattcttgtgtggtctatcaagagtgaggcaattatataaggatatatgctttgtcagtattgtctgagtctttgagcgtagcagcaaaagtcttggcacatcattgttttagttattatgacctaaataacccagtttatatatag

SEQ ID NO: 48889 - DNA, 737 bp, Zea Mays
gacgcgttcatcagcttctttagctcttttagcctcttctaaggcgtcatgagactctttctcattttttctaacagcttcatcagctatttctcggccacccttcagccatacttcggaataaaacttcccacctagtgtagtagctttggctgaagggtttttaatatcgttggctgagaaggaaaattctggctgagcaacaaccttggcatgatcacaaccgaccttttctagaattgacacggccccacgggcaccggcaaaggcgcaaaaatcccctctgtcactaagaatctcttcaaaggcttcggtcttgccgttaatccactggataactccatcggagtcaccgtagatgaatttctgctctgaagaaaatgcaccaactttggaaaagctgttcttcaaattcttagcgtattccatagccacatcatagcatttttctttagttgcatgaagctcgtcaacatttctttgtgcccttgatcgttcgatttcagatatttcatgttttgtcagctccacattaaaatttccagttgcttcggcaactttcttttctaactcttgcatttcagctttgtgcgcttctgcttgagcggatagcttaacttcgctggatttcagcctttcgaccaaagatagcaaaatcttgtcttttgcgagagcttcgtttctcaaggttataacctccgatcggaggtttccaagtgccatccgataactctcgt

SEQ ID NO: 48890 - DNA, 3508 bp, Zea Mays
cttcacaccaaatccacgagcctcgtagctgacggcaatcaagccgccgcctttccagccattgtactgcaccacgacggttggctatcccctgagcgccgggttcctccgctgctcgactgcagtaaagcagatgatcaaactgaaaagcaccaaaaggagggtagttaaaagtaatagtgatgttttttggctaggatatggtcaaaaaaacagcatgaatttcagggtcagccacatcactgttgtcatatagggatgaggtacatatggagttcatttgtgtgggcatgtgtttaataaaatatcatctctctggtggtgttttcttttggagctcattaagatatgtcttctgctctttgtgagcccaggaaaaaacaattaaatatagagtaaaattcaatggaaatgcctaaccagtgtgagaaatgtcagctcctactttctctctggtattctcaaggcatttgtgttagaggcttcagttagcagtggcttcagttagtaggtagtagtggctaagcagtagcagtttcagttagtagtggagctatcatataattaagcaaagatggagaggacagctgttttagtgttcttggatccgttcgcataattcagataatggaaagaacctgtaaaaaagagggcatgatctaagcagcctttgtcaaattcaaataatggaaaggaaaggaggggttatctgtaattgcacaattcaataactgagtgtgatgcattctaattcaaaaaaggagggattatacaccagattgaaatgagcttgctcaaatgaagacctggcaccgtgaagctcctgattgagctaaaagataaaaagggttatgaagtcgtcaccttcggattaaaggatctgggcagttttcttcccttctaattcaaggacttgggcttgtttcttcccttctgattcaaggacttgggcacatattctcctttctacttcagcctgcatctccatagcctgcctaatccctgttggaggagttatgtcccctgcattgccaaaataaaaaataaataaaaaacattagaagcaaaccatatattataactcaaattattaaacacgaaaaagcaacacattgatctcatagtggatacacttcatgcccaatctgtggctgccattgatggcactcctttttatctctgcagatgtgtgttcacaacctgaaagaaaacatgttatgtagtgacacaaacatgcaaagcatagagtttgagagattgaaccatcaaccaacataattcacacatccaatttagtgcgtcctattgacaacgcatggtgctttttataatgtccccatttccctattctttatgccatttgggagttgatatttgttaatacatacaaaaccaattacgacactacctatatgtgtgtgccaagtttcctaaatcatgcaaaaccaagataaatcagctacaactactattggtgcaacctttcaactgtgctgttacagctttcttgaagccatctaatgtggtaaccttgatatacatagactcttacagtatggccaaataaacataaactaaagagctcagatgctaggcaactatagaacaccgtctaaacgacgctattatgtgcaagcacgctatgtgtgaaatagatggagtaattttctttagcttctactaaactctgtcatgctctcgatcacttttagttttagagaagagagtacaaacatgccatatagggattttctttagcagtcgccaatcagttatgtacgtacttcatgaacacaccattttctagcaaatcctttatctcacaaaaccctctataaaaattgatttgaagttggaaacgaagtaccaaagagcaactcggtaagatcataaaactttttcaagcactgaaaaattgctgcagccatgtcccagtcatcatcagatggagaaattttcctatctgggaatgtgaggtaacgacagaaggggtttaccaagtacgttagcttcattagttgttagacatcgatatgtccatgtctcgatgaaaatccaactaacaacgtataacaagtagatggtaatgtgaaaaactggaatttgtagaaaatccaaatgcatttctgaccaaacaaagctcaaatagacattgattcctaaaaggaaaatcagaattcttctagttccagactatggggtaggactctacctagcaagaagagacagtgcaagtgcaaaagtactagtatcctgtacaatgctgcttagtttagcctattacatagaggcatgcaagtgcaagatcaacaatgtctgtattagtctgtttctcaacaatgtttgtataagtcaagaagtattcaaggcaaggcaaaccttcttctctgagagtatctttggttgcttgcaaatgtctagtgtatttggaaggtccatataaatccctttgaagagcatgcaaatataggatagaaagcttggttagaaacaatatttatccacgctgaaaaatcagttatcttctaactcagttcaacttaccatttcttcttgtagctaggatagccaattcattgaaaatacatccatggaccaggggtggatggcgcacatccgaggatcaaaatagggattgcaatttctaaagtggggggatcgttttacctgtgccctactgttgtcgctggctgcttctgcccacctgcacggtaccccctgttggctgttggcgtgcagcactcggtggccaatgcttcacgccggcaacctccaccgaaaccctagcagcagcccacgcctccaagtccctaatcaccgatccggcctccaggggatcgcctgctgcccaccgacagtagatttggtcgctgtgccagtcgattcagtcatcgacccggtagatttggctgctccggccgtcgatcgcacgtcacggctgggggcggctttgatgggtggcagcggctggcacggtgtgggcgagctgggcgcgtgtggcgtccgcgcatcgcctgtcacggcaagcaaatgcaggggtcacggggaactcgcggcgggggctgcaggacggggagcgcgacgtccatgtggcacatgtcgcggcagggagaggcaggtgtcgcggagaaagcgtggcgggggtgggtgcgcgtggatccacggatcgcatttatggtggataggcggatccgcggcatccggatctacgacatccggatctgcgacgcaggcagtgcgcgttgatagcgaggagcagaggggaggaggctggggatccgtggagcgacgcgactgtaggtgttgatggcggcgtgcagagggggaggagggtgcggtgcgtgcgccatggatggaatgctgggggaggcgcggtttctgggggacaggatttcaccgtggcgacgccatggatggaaggggcacctgagggaggcacgttttacgaatggaaggccatggatggaagtgggcgtgcgcgttgatggcaggcgggcgcagcgcgtgg

SEQ ID NO: 48891 - DNA, 2202 bp, Zea Mays
aagttcgtgtgtgtggagactgaggctgaacttcagctaaacgtcttcggtcactcgtgctggtcgcgcggcgatctacgcctctccgtcctccaaacgaaaccctaacccgcgcatccaacctccatccatcctccgagccccaaactccaaaccctagacccctccccctgccttcgcggccgatgggcgcagatgagcagccatctccgacgcggaaacgcgaccgcgaggaaggggaggacctctccgacgggggcgccgccgagaagcggccgcgcgccgaggtcgcgtccctgctggggctggccacctacgaggacgaggaggaagacgaagcggccaggggtcacacgaatggccgacacgcggtggagcctgagctagaggacgacgaggatgatgatgatgaggacgacgacgtgaggagggctcctgagaggaggcccagacaggtagagctgcgccgggactgcccatacctcgacaccgtgaacagacaggttcttgattttgatttcgagaagttctgttcaatctccttgtcaaatttgaatgtgtatgcgtgcttggtctgtggaaaatatttccaaggaagagggttgaaatctcatgcatatacgcacagccttgaagcaggccatcacgtgttcattaatcttcaaactgagaaggcttactgtcttcctgatggatatgagattaatgatccatcgttagaagatattcgacatgttctgaatccaaggttcactaaggagcaggttctaaatcttgacaaaaataagcagtggtctagagcacttgatggctccaattatctacctggaatggtgggtcttaacaacatcaaggagactgattttgtgaatgtcacaatacagtcattaatgagagttacacctctgagaaatttctttctaatccctgaaaactatcagcatagcaaatcaccattggttcatcgttttggggaattgacacgtaagatttggcatgctaggaacttcaagggccaggttagtccacatgaatttctgcaagcagttatgaaggccagcgacaaaaagtttcagattggtgtacagtcagatccagtggaatttatgacatggctcttaaacacactgcatgcgaaactaaaaagttcaaagaagaaaaacagaagcataatacacgattgttttcagggagaacttgaagttgttaaggaggttcataggaagcatataatggaaaaaagagaggatggcggtgagctgaatggtgaggcaggttcagtggtgggaactgcagatggaattgttactgaaacatccaaggtcccattcctgatgctcggtcttgacctgccacctccacctcttttcaaagacgccatggagaaaaatatcattccacaggtaccattgtttaacatactgaagaagttcgatggtgagacagttacagaggttgtccgaccttccattgcccgaatgaggtaccgagtcactagactgccgaagtatctgatccttcatatgcgaaggtttaccaaaaataacttttttgtcgagaaaaaccctactctagttaattttcctgtgaagaacttggagttgaaggactacattccattacctaagccgaaagagaatcataagctacgttcaaagtatgacctcatagcaaacattgtccatgatggcaaacctggcgagggatgctacagagtatttgtacagcggaaatcagaagaggcctggtatgagatgcaggatctccatgttactgagacccttcctcaaatggttgctctctcagaaacctacatgcaaatatacgagcaacacgaatgagtaatggacagtggtcatcctatggtcagtctgtttgcttaacagagatcagaatatcacaaactaatccttatctttggagcagctttttttggggcagaattttgtagtatcttcacacatgtccagacttaatttcttgacaagcagagatcgagggaatgtacttgggtcatcaagtcaatgctatggaggctgaaacatcgtgaattgtttttagagctgctttgatagaggaacgatttcccacatatttcatgtttgtagtgcagcactgcagcctgtatctgttgtgaaccggaccggcaaatcacagtttcaaacaattgcggcagggtggttctggtccagttgtttcaaa

SEQ ID NO: 48892 - DNA, 2221 bp, Zea Mays
aagttcgtgtgtgtggagactgaggctgaacttcagctaaacgtcttcggtcactcgtgctggtcgcgcggcgatctacgcctctccgtcctccaaacgaaaccctaacccgcgcatccaacctccatccatcctccgagccccaaactccaaaccctagacccctccccctgccttcgcggccgatgggcgcagatgagcagccatctccgacgcggaaacgcgaccgcgaggaaggggaggacctctccgacgggggcgccgccgagaagcggccgcgcgccgaggtcgcgtccctgctggggctggccacctacgaggacgaggaggaagacgaagcggccaggggtcacacgaatggccgacacgcggtggagcctgagctagaggacgacgaggatgatgatgatgaggacgacgacgtgaggagggctcctgagaggaggcccagacaggttcttgattttgatttcgagaagttctgttcaatctccttgtcaaatttgaatgtgtatgcgtgcttggtctgtggaaaatatttccaaggaagagggttgaaatctcatgcatatacgcacagccttgaagcaggccatcacgtgttcattaatcttcaaactgagaaggcttactgtcttcctgatggatatgagattaatgatccatcgttagaagatattcgacatgttctgaatccaaggttcactaaggagcaggttctaaatcttgacaaaaataagcagtggtctagagcacttgatggctccaattatctacctggaatggtgggtcttaacaacatcaaggagactgattttgtgaatgtcacaatacagtcattaatgagagttacacctctgagaaatttctttctaatccctgaaaactatcagcatagcaaatcaccattggttcatcgttttggggaattgacacgtaagatttggcatgctaggaacttcaagggccaggttagtccacatgaatttctgcaagcagttatgaaggccagcgacaaaaagtttcagattggtgtacagtcagatccagtggaatttatgacatggctcttaaacacactgcatgcgaaactaaaaagttcaaagaagaaaaacagaagcataatacacgattgttttcagggagaacttgaagttgttaaggaggttcataggaagcatataatggaaaaaagagaggatggcggtgagctgaatggtgaggcaggttcagtggtgggaactgcagatggaattgttactgaaacatccaaggtcccattcctgatgctcggtcttgacctgccacctccacctcttttcaaagacgccatggagaaaaatatcattccacaggtaccattgtttaacatactgaagaagttcgatggtgagacagttacagaggttgtccgaccttccattgcccgaatgaggtaccgagtcactagactgccgaagtatctgatccttcatatgcgaaggtttaccaaaaataacttttttgtcgagaaaaaccctactctagttaattttcctgtgaagaacttggagttgaaggactacattccattacctaagccgaaagagaatcataagctacgttcaaagtatgacctcatagcaaacattgtccatgatggcaaacctggcgagggatgctacagagtatttgtacagcggaaatcagaagaggcctggtatgagatgcaggatctccatgttactgagacccttcctcaaatggttgctctctcagaaacctacatgcaaatatacgagcaacacgaatgagtaatggacagtggtcatcctatggtcagtctgtttgcttaacagagatcagaatatcacaaactaatccttatctttggagcagctttttttggggcagaattttgtagtatcttcacacatgtccagacttaatttcttgacaagcagagatcgagggaatgtacttgggtcatcaagtcaatgctatggaggctgaaacatcgtgaattgtttttagagctgctttgatagaggaacgatttcccacatatttcatgtttgtagtgcagcactgcagcctgtatctgttgtgaaccggtagagcagggttccagctgtatggtttagtattgcttttcgaagccttgagtttgtttctgtacaggaccggcaaatcacagtttcaaacaattgcggcagggtggttctggtccagttgtttcaaa

SEQ ID NO: 48893 - DNA, 931 bp, Zea Mays
taactattttgggatggtgtttcttcaatattccttacaccttacatataagaccacctgtgaaggtaccattgtttaacatactgaagaagttcgatggtgagacagttacagaggttgtccgaccttccattgcccgaatgaggtaccgagtcactagactgccgaagtatctgatccttcatatgcgaaggtttaccaaaaataacttttttgtcgagaaaaaccctactctagttaattttcctgtgaagaacttggagttgaaggactacattccattacctaagccgaaagagaatcataagctacgttcaaagtatgacctcatagcaaacattgtccatgatggcaaacctggcgagggatgctacagagtatttgtacagcggaaatcagaagaggcctggtatgagatgcaggatctccatgttactgagacccttcctcaaatggttgctctctcagaaacctacatgcaaatatacgagcaacacgaatgagtaatggacagtggtcatcctatggtcagtctgtttgcttaacagagatcagaatatcacaaactaatccttatctttggagcagctttttttggggcagaattttgtagtatcttcacacatgtccagacttaatttcttgacaagcagagatcgagggaatgtacttgggtcatcaagtcaatgctatggaggctgaaacatcgtgaattgtttttagagctgctttgatagaggaacgatttcccacatatttcatgtttgtagtgcagcactgcagcctgtatctgttgtgaaccggtagagcagggttccagctgtatggtttagtattgcttttcgaagccttgagtttgtttctgtacaggaccggcaaatcacagtttcaaacaattgcggcagggtggttctggtccagttgtttcaaa

SEQ ID NO: 48894 - DNA, 537 bp, Zea Mays
agccaaataacggaaccccaaaaccgtgcgctttggtgttaggtgtgctgtatctatcctgtccaggcctttcacctacccaatctcctccaggttcaccatcaggtggtggcagtggcagcaactccggtcatcacactctgtcggtcggtttctcaggattcatgagcttcttgtcgctagccttgtggtctgtattagcataaagtttaggatgctgcagtggacattgcctgtcttatcccacaagatgatttgcacctacgacacaatcaacatttgtcttgctgtgtattgatatggccagccagtagactgatgtctctgaaccatgtgcttgcattagactgcacaattggtccttcgcccaattgttccaaagagtgcttccatgaacttagaccgaagagtgtctccaaggtcagctgtgggaaggttcttaagtccttcgcccaattgttccaaacctctgcaagattattggtaatgtgatcacattttatctcctctgaaaatttgcaattggtccatttcaaa

SEQ ID NO: 48895 - DNA, 520 bp, Zea Mays
tcgtaaatgatggtggcccaacactgcttcacatgaacagtctgttgggcctgcctaacagggtgatgctcgcaatgttcaccatcaggtggtggcagtggcagcaactccggtcatcacactctgtcggtcggtttctcaggattcatgagcttcttgtcgctagccttgtggtctgtattagcataaagtttaggatgctgcagtggacattgcctgtcttatcccacaagatgatttgcacctacgacacaatcaacatttgtcttgctgtgtattgatatggccagccagtagactgatgtctctgaaccatgtgcttgcattagactgcacaattggtccttcgcccaattgttccaaagagtgcttccatgaacttagaccgaagagtgtctccaaggtcagctgtgggaaggttcttaagtccttcgcccaattgttccaaacctctgcaagattattggtaatgtgatcacattttatctcctctgaaaatttgcaattggtccatttcaaa

SEQ ID NO: 48896 - DNA, 2840 bp, Zea Mays
ttcctttgatattttccaattagtgctgaaaaatgaaaaaggttattggttgattttaaagtattttgcttcattgtgcacctattatgcgtgcaactagttgatcccattgtcagccaaatagccctctaaactgtggagtggaattctgtttgctttactagaaacttatatacaatttgactacatctctccctggatcctgttgctttcccttcgctgctcaatgcctcattttagtgaattgactagttgcttcagaatttatgctgagattgtcgattgatactgcattttggtgatagtgtacactatttttggctgtgccaggttcaatgaaaatgtaatgaacaagccaggttttgtggatgtatatccagcttcacgaataacaaggaatatacagcatcatttcgagtctgtttcccgttttaatactagcaaactgatgaacactgagaagcaaaaaggcctaaggattgtaacagaaccaagaaatctgtcatcagcactaagatggatttctgatgaggaagtcagaaaacaggtatatatcgttgggaactctgaacctcgtgaaaatattggcgttcttaatgaacttatacatgctcgtgatgaacttgcaaagattatgggatgcaaatcttatgctgaatttgctattcgtcctaacatggccgcgtcagccgatgtggttatgtcatttcttgaaaatttgagcaacactgttaagcataaagctgaagaggaatttaagaccatacataatttcaagagaagaacatgtaatgaaaagagtgccgatctagaaccctgggatgaggattacttcattggaatgatgaaatcatctgtatatgacctggacgcttcagttattgcaaaatactttcccttgtcgcagtgcctaaaagggttaaatgttctcgttgaatcattatttggtgcaacatttcatcaaattcctatgagggatggggagtcatggcatccagatgtgataaagctccgtctccatcatcctgatgagggtgatttaggattcatgtatctggacctctactccagaaaggggaaacatccaggatgcgcacattttgctatccaaggggggcggagattatcagactcaaactaccaattgccggtgcttgtagaaaaactgcaaggcttaaccatggggatgttgaaactctttttcatgagtttgggcatgcccttcactctctgttgtcaagaacggaatatcagcatttctctggtactagggttgctcttgatgtggctgaaaccccctcaaacctatttgaatattatgcctgggactatcgtgtcttgaagacatttgctctagatgaaacaactggagatgcaataccagaaaagctggtaaaggcactaaatgcttctcggaacatgtttcctgctactgagctccagaggcagatcttctactctataatggacctaaccttgtttggcgagcaatcatccaagcctatggacacgatttccactgttgccgatttgagaaggaagcatacaagtgggaaatacgcagaaggcacacactggcatacacgatttactcatctcgtaacctacggtgctggctactatacctatctatatgctagatgttttgccacaactatatggcaagaagtatgccaagaagacccgttgtcccgcagtgcaggcagtgccatcagggacaaattcttgcggttcggcgggtcaaaggacccatcatccctgctgaaggattttgcaggtgatgccgtcattagaaactccgggagtggaataatcccgaacgctagttccttgtgcaaagaaattggattgtgaaatagcactgtgggggcggaggctggcatctttctgcttgagcttggctgaagggccaagaactaaacctcgagggcttgaggtagtttgagggagattggagatgatttaatcctctcctattcaattcacctctaaccggacaagtccgaacaagtcatgaaggggcagagtcgctggagttccggtgcttgacctctcggcatacattaatggtgtggtgctagcggaagatggttctcctagacatactttcttcaaagtttcacctgcggatggttttgcaatctgtcaaattttactagaggacggttgacggtaccatattattactcccattgcctgggatttttccttcaaaatgttatgatgaagtctgtcagccctgtagcttatagcactgattcataggagccataggtcttccttgctcgtttcatggaaatgagaccccgtttggtaaagattagtgcctttatttttgtcctatttagtctctgaattgccaaaaggtgggactaaaacataaacagaactattttagtctctagtctctcaaggagtgactaaaagagagtaaaccacataaatttcaccttttgtctctcctttattttagttgtactaatagtgtgagaatgctaaaagatattttgacactcttatatatgttttgaatacttttagtctctacaaacaaacagggtagagactaaactttagtccttggcttaaaggaaccaaactgggcctaagaaagatcttgaatgcaaggcagctttgtatcaccgacctgaacagcctgttcagatacttgttcgtatcactattctactacatgtttatttgtgacagctccaattagtggaaattgaatccaaatcatatttatcgtgaaataactctattagtgaatctgagctctatcacaaaattgtttggtttacataacaactttatgttatattagagaacctggatcgtcc

SEQ ID NO: 48897 - DNA, 2785 bp, Zea Mays
attatgcgtgcaactagttgatcccattgtcagccaaatagccctctaaactgtggagtggaattctgtttgctttactagaaacttatatacaatttgactacatctctccctggatcctgttgctttcccttcgctgctcaatgcctcattttagtgaattgactagttgcttcagaatttatgctgagattgtcgattgatactgcattttggtgatagtgtacactatttttggctgtgccaggttcaatgaaaatgtaatgaacaagccaggttttgtggatgtatatccagcttcacgaataacaaggaatatacagcatcatttcgagtctgtttcccgttttaatactagcaaactgatgaacactgagaagcaaaaaggcctaaggattgtaacagaaccaagaaatctgtcatcagcactaagatggatttctgatgaggaagtcagaaaacaggtatatatcgttgggaactctgaacctcgtgaaaatattggcgttcttaatgaacttatacatgctcgtgatgaacttgcaaagattatgggatgcaaatcttatgctgaatttgctattcgtcctaacatggccgcgtcagccgatgtggttatgtcatttcttgaaaatttgagcaacactgttaagcataaagctgaagaggaatttaagaccatacataatttcaagagaagaacatgtaatgaaaagagtgccgatctagaaccctgggatgaggattacttcattggaatgatgaaatcatctgtatatgacctggacgcttcagttattgcaaaatactttcccttgtcgcagtgcctaaaagggttaaatgttctcgttgaatcattatttggtgcaacatttcatcaaattcctatgagggatggggagtcatggcatccagatgtgataaagctccgtctccatcatcctgatgagggtgatttaggattcatgtatctggacctctactccagaaaggggaaacatccaggatgcgcacattttgctatccaaggggggcggagattatcagactcaaactaccaattgccgatcattgccttaatatgcaacttctcaggtgcttgtagaaaaactgcaaggcttaaccatggggatgttgaaactctttttcatgagtttgggcatgcccttcactctctgttgtcaagaacggaatatcagcatttctctggtactagggttgctcttgatgtggctgaaaccccctcaaacctatttgaatattatgcctgggactatcgtgtcttgaagacatttgctctagatgaaacaactggagatgcaataccagaaaagctggtaaaggcactaaatgcttctcggaacatgtttcctgctactgagctccagaggcagatcttctactctataatggacctaaccttgtttggcgagcaatcatccaagcctatggacacgatttccactgttgccgatttgagaaggaagcatacaagtgggaaatacgcagaaggcacacactggcatacacgatttactcatctcgtaacctacggtgctggctactatacctatctatatgctagatgttttgccacaactatatggcaagaagtatgccaagaagacccgttgtcccgcagtgcaggcagtgccatcagggacaaattcttgcggttcggcgggtcaaaggacccatcatccctgctgaaggattttgcaggtgatgccgtcattagaaactccgggagtggaataatcccgaacgctagttccttgtgcaaagaaattggattgtgaaatagcactgtgggggcggaggctggcatctttctgcttgagcttggctgaagggccaagaactaaacctcgagggcttgaggtagtttgagggagattggagatgatttaatcctctcctattcaattcacctctaaccggacaagtccgaacaagtcatgaaggggcagagtcgctggagttccggtgcttgacctctcggcatacattaatggtgtggtgctagcggaagatggttctcctagacatactttcttcaaagtttcacctgcggatggttttgcaatctgtcaaattttactagaggacggttgacggtaccatattattactcccattgcctgggatttttccttcaaaatgttatgatgaagtctgtcagccctgtagcttatagcactgattcataggagccataggtcttccttgctcgtttcatggaaatgagaccccgtttggtaaagattagtgcctttatttttgtcctatttagtctctgaattgccaaaaggtgggactaaaacataaacagaactattttagtctctagtctctcaaggagtgactaaaagagagtaaaccacataaatttcaccttttgtctctcctttattttagttgtactaatagtgtgagaatgctaaaagatattttgacactcttatatatgttttgaatacttttagtctctacaaacaaacagggtagagactaaactttagtccttggcttaaaggaaccaaactgggcctaagaaagatcttgaatgcaaggcagctttgtatcaccgacctgaacagcctgttcagatacttgttcgtatcactattctactacatgtttatttgtgacagctccaattagtggaaattgaatccaaatcatatttatcgtgaaataactctattagtgaatctgagctctatcacaaaattgtttggtttacataacaactttatgttatattagagaacctggatcgtcc

SEQ ID NO: 48898 - DNA, 2692 bp, Zea Mays
cagaatttatgctgagattgtcgattgatactgcattttggtgatagtgtacactatttttggctgtgccaggttcaatgaaaatgtaatgaacaagccaggttttgtggatgtatatccagcttcacgaataacaaggaatatacagcatcatttcgagtctgtttcccgttttaatactagcaaactgatgaacactgagaagcaaaaaggcctaaggattgtaacagaaccaagaaatctgtcatcagcactaagatggatttctgatgaggaagtcagaaaacaggtatatatcgttgggaactctgaacctcgtgaaaatattggcgttcttaatgaacttatacatgctcgtgatgaacttgcaaagattatgggatgcaaatcttatgctgaatttgctattcgtcctaacatggccgcgtcagccgatgtggttatgtcatttcttgaaaatttgagcaacactgttaagcataaagctgaagaggtttgaatggatccagctaatactggcatattttggcaaaatgcactgcggctcctgttgaaatgcatcattaaattctatgatccatctctcttgataacatctcttatgcaggaatttaagaccatacataatttcaagagaagaacatgtaatgaaaagagtgccgatctagaaccctgggatgaggattacttcattggaatgatgaaatcatctgtatatgacctggacgcttcagttattgcaaaatactttcccttgtcgcagtgcctaaaagggttaaatgttctcgttgaatcattatttggtgcaacatttcatcaaattcctatgagggatggggagtcatggcatccagatgtgataaagctccgtctccatcatcctgatgagggtgatttaggattcatgtatctggacctctactccagaaaggggaaacatccaggatgcgcacattttgctatccaaggggggcggagattatcagactcaaactaccaattgccggtgcttgtagaaaaactgcaaggcttaaccatggggatgttgaaactctttttcatgagtttgggcatgcccttcactctctgttgtcaagaacggaatatcagcatttctctggtactagggttgctcttgatgtggctgaaaccccctcaaacctatttgaatattatgcctgggactatcgtgtcttgaagacatttgctctagatgaaacaactggagatgcaataccagaaaagctggtaaaggcactaaatgcttctcggaacatgtttcctgctactgagctccagagatcttctactctataatggacctaaccttgtttggcgagcaatcatccaagcctatggacacgatttccactgttgccgatttgagaaggaagcatacaagtgggaaatacgcagaaggcacacactggcatacacgatttactcatctcgtaacctacggtgctggctactatacctatctatatgctagatgttttgccacaactatatggcaagaagtatgccaagaagacccgttgtcccgcagtgcaggcagtgccatcagggacaaattcttgcggttcggcgggtcaaaggacccatcatccctgctgaaggattttgcaggtgatgccgtcattagaaactccgggagtggaataatcccgaacgctagttccttgtgcaaagaaattggattgtgaaatagcactgtgggggcggaggctggcatctttctgcttgagcttggctgaagggccaagaactaaacctcgagggcttgaggtagtttgagggagattggagatgatttaatcctctcctattcaattcacctctaaccggacaagtccgaacaagtcatgaaggggcagagtcgctggagttccggtgcttgacctctcggcatacattaatggtgtggtgctagcggaagatggttctcctagacatactttcttcaaagtttcacctgcggatggttttgcaatctgtcaaattttactagaggacggttgacggtaccatattattactcccattgcctgggatttttccttcaaaatgttatgatgaagtctgtcagccctgtagcttatagcactgattcataggagccataggtcttccttgctcgtttcatggaaatgagaccccgtttggtaaagattagtgcctttatttttgtcctatttagtctctgaattgccaaaaggtgggactaaaacataaacagaactattttagtctctagtctctcaaggagtgactaaaagagagtaaaccacataaatttcaccttttgtctctcctttattttagttgtactaatagtgtgagaatgctaaaagatattttgacactcttatatatgttttgaatacttttagtctctacaaacaaacagggtagagactaaactttagtccttggcttaaaggaaccaaactgggcctaagaaagatcttgaatgcaaggcagctttgtatcaccgacctgaacagcctgttcagatacttgttcgtatcactattctactacatgtttatttgtgacagctccaattagtggaaattgaatccaaatcatatttatcgtgaaataactctattagtgaatctgagctctatcacaaaattgtttggtttacataacaactttatgttatattagagaacctggatcgtcc

SEQ ID NO: 48899 - DNA, 2537 bp, Zea Mays
gtgatagtgtacactatttttggctgtgccaggttcaatgaaaatgtaatgaacaagccaggttttgtggatgtatatccagcttcacgaataacaaggaatatacagcatcatttcgagtctgtttcccgttttaatactagcaaactgatgaacactgagaagcaaaaaggcctaaggattgtaacagaaccaagaaatctgtcatcagcactaagatggatttctgatgaggaaaaaacaggtatatatcgttgggaactctgaacctcgtgaaaatattggcgttcttaatgaacttatacatgctcgtgatgaacttgcaaagattatgggatgcaaatcttatgctgaatttgctattcgtcctaacatggccgcgtcagccgatgtggttatgtcatttcttgaaaatttgagcaacactgttaagcataaagctgaagaggaatttaagaccatacataatttcaagagaagaacatgtaatgaaaagagtgccgatctagaaccctgggatgaggattacttcattggaatgatgaaatcatctgtatatgacctggacgcttcagttattgcaaaatactttcccttgtcgcagtgcctaaaagggttaaatgttctcgttgaatcattatttggtgcaacatttcatcaaattcctatgagggatggggagtcatggcatccagatgtgataaagctccgtctccatcatcctgatgagggtgatttaggattcatgtatctggacctctactccagaaaggggaaacatccaggatgcgcacattttgctatccaaggggggcggagattatcagactcaaactaccaattgccggtgcttgtagaaaaactgcaaggcttaaccatggggatgttgaaactctttttcatgagtttgggcatgcccttcactctctgttgtcaagaacggaatatcagcatttctctggtactagggttgctcttgatgtggctgaaaccccctcaaacctatttgaatattatgcctgggactatcgtgtcttgaagacatttgctctagatgaaacaactggagatgcaataccagaaaagctggtaaaggcactaaatgcttctcggaacatgtttcctgctactgagctccagaggcagatcttctactctataatggacctaaccttgtttggcgagcaatcatccaagcctatggacacgatttccactgttgccgatttgagaaggaagcatacaagtgggaaatacgcagaaggcacacactggcatacacgatttactcatctcgtaacctacggtgctggctactatacctatctatatgctagatgttttgccacaactatatggcaagaagtatgccaagaagacccgttgtcccgcagtgcaggcagtgccatcagggacaaattcttgcggttcggcgggtcaaaggacccatcatccctgctgaaggattttgcaggtgatgccgtcattagaaactccgggagtggaataatcccgaacgctagttccttgtgcaaagaaattggattgtgaaatagcactgtgggggcggaggctggcatctttctgcttgagcttggctgaagggccaagaactaaacctcgagggcttgaggtagtttgagggagattggagatgatttaatcctctcctattcaattcacctctaaccggacaagtccgaacaagtcatgaaggggcagagtcgctggagttccggtgcttgacctctcggcatacattaatggtgtggtgctagcggaagatggttctcctagacatactttcttcaaagtttcacctgcggatggttttgcaatctgtcaaattttactagaggacggttgacggtaccatattattactcccattgcctgggatttttccttcaaaatgttatgatgaagtctgtcagccctgtagcttatagcactgattcataggagccataggtcttccttgctcgtttcatggaaatgagaccccgtttggtaaagattagtgcctttatttttgtcctatttagtctctgaattgccaaaaggtgggactaaaacataaacagaactattttagtctctagtctctcaaggagtgactaaaagagagtaaaccacataaatttcaccttttgtctctcctttattttagttgtactaatagtgtgagaatgctaaaagatattttgacactcttatatatgttttgaatacttttagtctctacaaacaaacagggtagagactaaactttagtccttggcttaaaggaaccaaactgggcctaagaaagatcttgaatgcaaggcagctttgtatcaccgacctgaacagcctgttcagatacttgttcgtatcactattctactacatgtttatttgtgacagctccaattagtggaaattgaatccaaatcatatttatcgtgaaataactctattagtgaatctgagctctatcacaaaattgtttggtttacataacaactttatgttatattagagaacctggatcgtcc

SEQ ID NO: 48900 - DNA, 2717 bp, Zea Mays
caggttcaatgaaaatgtaatgaacaagccaggttttgtggatgtatatccagcttcacgaataacaaggaatatacagcatcatttcgagtctgtttcccgttttaatactagcaaactgatgaacactgagaagcaaaaaggcctaaggattgtaacagaaccaagaaatctgtcatcagcactaagatggatttctgatgaggaagtaacttttcttccacttgcagaacatctcttacattcatattaccaaattttgtatcttggataaagatgtctctatagcatcgaacaattcttgtatttcttatgtcaccactaacctttcgtctggatttattcaatgagtacagttgtatattattagtccagtgccagtggaaagctaactattttaaaatttccaaaggtcagaaaacaggtatatatcgttgggaactctgaacctcgtgaaaatattggcgttcttaatgaacttatacatgctcgtgatgaacttgcaaagattatgggatgcaaatcttatgctgaatttgctattcgtcctaacatggccgcgtcagccgatgtggttatgtcatttcttgaaaatttgagcaacactgttaagcataaagctgaagaggaatttaagaccatacataatttcaagagaagaacatgtaatgaaaagagtgccgatctagaaccctgggatgaggattacttcattggaatgatgaaatcatctgtatatgacctggacgcttcagttattgcaaaatactttcccttgtcgcagtgcctaaaagggttaaatgttctcgttgaatcattatttggtgcaacatttcatcaaattcctatgagggatggggagtcatggcatccagatgtgataaagctccgtctccatcatcctgatgagggtgatttaggattcatgtatctggacctctactccagaaaggggaaacatccaggatgcgcacattttgctatccaaggggggcggagattatcagactcaaactaccaattgccggtgcttgtagaaaaactgcaaggcttaaccatggggatgttgaaactctttttcatgagtttgggcatgcccttcactctctgttgtcaagaacggaatatcagcatttctctggtactagggttgctcttgatgtggctgaaaccccctcaaacctatttgaatattatgcctgggactatcgtgtcttgaagacatttgctctagatgaaacaactggagatgcaataccagaaaagctggtaaaggcactaaatgcttctcggaacatgtttcctgctactgagctccagaggcagatcttctactctataatggacctaaccttgtttggcgagcaatcatccaagcctatggacacgatttccactgttgccgatttgagaaggaagcatacaagtgggaaatacgcagaaggcacacactggcatacacgatttactcatctcgtaacctacggtgctggctactatacctatctatatgctagatgttttgccacaactatatggcaagaagtatgccaagaagacccgttgtcccgcagtgcaggcagtgccatcagggacaaattcttgcggttcggcgggtcaaaggacccatcatccctgctgaaggattttgcaggtgatgccgtcattagaaactccgggagtggaataatcccgaacgctagttccttgtgcaaagaaattggattgtgaaatagcactgtgggggcggaggctggcatctttctgcttgagcttggctgaagggccaagaactaaacctcgagggcttgaggtagtttgagggagattggagatgatttaatcctctcctattcaattcacctctaaccggacaagtccgaacaagtcatgaaggggcagagtcgctggagttccggtgcttgacctctcggcatacattaatggtgtggtgctagcggaagatggttctcctagacatactttcttcaaagtttcacctgcggatggttttgcaatctgtcaaattttactagaggacggttgacggtaccatattattactcccattgcctgggatttttccttcaaaatgttatgatgaagtctgtcagccctgtagcttatagcactgattcataggagccataggtcttccttgctcgtttcatggaaatgagaccccgtttggtaaagattagtgcctttatttttgtcctatttagtctctgaattgccaaaaggtgggactaaaacataaacagaactattttagtctctagtctctcaaggagtgactaaaagagagtaaaccacataaatttcaccttttgtctctcctttattttagttgtactaatagtgtgagaatgctaaaagatattttgacactcttatatatgttttgaatacttttagtctctacaaacaaacagggtagagactaaactttagtccttggcttaaaggaaccaaactgggcctaagaaagatcttgaatgcaaggcagctttgtatcaccgacctgaacagcctgttcagatacttgttcgtatcactattctactacatgtttatttgtgacagctccaattagtggaaattgaatccaaatcatatttatcgtgaaataactctattagtgaatctgagctctatcacaaaattgtttggtttacataacaactttatgttatattagagaacctggatcgtcc

SEQ ID NO: 48901 - DNA, 2540 bp, Zea Mays
caggttcaatgaaaatgtaatgaacaagccaggttttgtggatgtatatccagcttcacgaataacaaggaatatacagcatcatttcgagtctgtttcccgttttaatactagcaaactgatgaacactgagaagcaaaaaggcctaaggattgtaacagaaccaagaaatctgtcatcagcactaagatggatttctgatgaggaaaaaacaggtatatatcgttgggaactctgaacctcgtgaaaatattggcgttcttaatgaacttatacatgctcgtgatgaacttgcaaagattatgggatgcaaatcttatgctgaatttgctattcgtcctaacatggccgcgtcagccgatgtggttatgtcatttcttgaaaatttgagcaacactgttaagcataaagctgaagaggaatttaagaccatacataatttcaagagaagaacatgtaatgaaaagagtgccgatctagaaccctgggatgaggattacttcattggaatgatgaaatcatctgtatatgacctggacgcttcagttattgcaaaatactttcccttgtcgcagtgcctaaaagggttaaatgttctcgttgaatcattatttggtgcaacatttcatcaaattcctatgagggatggggagtcatggcatccagatgtgataaagctccgtctccatcatcctgatgagggtgatttaggattcatgtatctggacctctactccagaaaggggaaacatccaggatgcgcacattttgctatccaaggggggcggagattatcagactcaaactaccaattgccgatcattgccttaatatgcaacttctcaggtgcttgtagaaaaactgcaaggcttaaccatggggatgttgaaactctttttcatgagtttgggcatgcccttcactctctgttgtcaagaacggaatatcagcatttctctggtactagggttgctcttgatgtggctgaaaccccctcaaacctatttgagtatatattatgcctgggactatcgtgtcttgaagacatttgctctagatgaaacaactggagatgcaataccagaaaagctggtaaaggcactaaatgcttctcggaacatgtttcctgctactgagctccagaggcagatcttctactctataatggacctaaccttgtttggcgagcaatcatccaagcctatggacacgatttccactgttgccgatttgagaaggaagcatacaagtgggaaatacgcagaaggcacacactggcatacacgatttactcatctcgtaacctacggtgctggctactatacctatctatatgctagatgttttgccacaactatatggcaagaagtatgccaagaagacccgttgtcccgcagtgcaggcagtgccatcagggacaaattcttgcggttcggcgggtcaaaggacccatcatccctgctgaaggattttgcaggtgatgccgtcattagaaactccgggagtggaataatcccgaacgctagttccttgtgcaaagaaattggattgtgaaatagcactgtgggggcggaggctggcatctttctgcttgagcttggctgaagggccaagaactaaacctcgagggcttgaggtagtttgagggagattggagatgatttaatcctctcctattcaattcacctctaaccggacaagtccgaacaagtcatgaaggggcagagtcgctggagttccggtgcttgacctctcggcatacattaatggtgtggtgctagcggaagatggttctcctagacatactttcttcaaagtttcacctgcggatggttttgcaatctgtcaaattttactagaggacggttgacggtaccatattattactcccattgcctgggatttttccttcaaaatgttatgatgaagtctgtcagccctgtagcttatagcactgattcataggagccataggtcttccttgctcgtttcatggaaatgagaccccgtttggtaaagattagtgcctttatttttgtcctatttagtctctgaattgccaaaaggtgggactaaaacataaacagaactattttagtctctagtctctcaaggagtgactaaaagagagtaaaccacataaatttcaccttttgtctctcctttattttagttgtactaatagtgtgagaatgctaaaagatattttgacactcttatatatgttttgaatacttttagtctctacaaacaaacagggtagagactaaactttagtccttggcttaaaggaaccaaactgggcctaagaaagatcttgaatgcaaggcagctttgtatcaccgacctgaacagcctgttcagatacttgttcgtatcactattctactacatgtttatttgtgacagctccaattagtggaaattgaatccaaatcatatttatcgtgaaataactctattagtgaatctgagctctatcacaaaattgtttggtttacataacaactttatgttatattagagaacctggatcgtcc

SEQ ID NO: 48902 - DNA, 743 bp, Zea Mays
aggttcaatgaaaatgtaatgaacaagccaggttttgtggatgtatatccagcttcacgaataacaaggaatatacagcatcatttcgagtctgtttcccgttttaatactagcaaactgatgaacactgagaagcaaaaaggcctaaggattgtaacagaaccaagaaatctgtcatcagcactaagatggatttctgatgaggaaaaaacaggtatatatcgttgggaactctgaacctcgtgaaaatattggcgttcttaatgaacttatacatgctcgtgatgaacttgcaaagattatgggatgcaaatcttatgctgaatttgctattcgtcctaacatggccgcgtcagccgatgtggttatgtcatttcttgaaaatttgagcaacactgttaagcataaagctgaagaggaatttaagaccatacataatttcaagagaagaacatgtaatgaaaagagtgccgatctagaaccctgggatgaggattacttcattggaatgatgaaatcatctgtatatgacctggacgcttcagttattgcaaaatactttcccttgtcgcagtgcctaaaagggttaaatgttctcgttgaatcattatttggtgcaacatttcatcaaattcctatgagggatggggagtcatggcatccagatgtgataaagctccgtctccatcatcctgatgagctgcagctcttggaaatatgcagatgttaccactatcaccatg

SEQ ID NO: 48903 - DNA, 1261 bp, Zea Mays
ctccatccaaaggagttatcactgaccgctcgatcaactataggcggccttgattgagcaaaaggaaacggcgaagggatgcaagcaccctggaacccttctattttgcactgacttccacggctcgcctcgcttccccatcccactctctgtccctccggcgagtggcggcggcagagacggaggccgagtgagcagtacaacgccgccgacaccaatcacgagggtatatcaactacaagtagagggaggccaagcacgaaaccatcaaagctgaccaactgagcgcccgccgcaatgctctcgcgcgccgccgccatccgtcgcggcgctgcggcggcgttctccacagtctcggagaaaccggagacggggctatacggcttcgacgtgcttcgcacggcgaaggggttccgccgcttcgtggacgacgccatccatcggtcggacgaactcgtggcacgcgtcgcgcggctgccgtcgtccaccgagatagtgcggaccatggacgagatttccaatacagtttgttctgtcattgattcggccgagctgtgcaggaatacacaccctgatagggagtttgtggatgaggcagataaggcgtcgatgaggatttatgagcatcttcaggtgagcttggcattgaacatggcttgataaatgatgtggacttggactgttatctgtattagtggcgtaaacaatcaacatctctgcatgtacctgaatacaaacactactttgtacaatgctgtactgaaagctgagggtgaaagtgtcctgctcacagaggaagctcgaagggcagcaactaccttgcatattgactttcaaaaaggagggattcatcttcctaaagataaacttgagaatgctaatcagctgaaccttgagattgcccagctgggtagaaagtaggtacattaattggacacttttgctttctatataagctgggtattacctctgtcaaacaaatattaattggacactttctgtttatactcgtaccgtatttgttgtcaaactgctttgtaatctgttattttagttgcacgttttcaagctatctattggcaagtaatttcatcacttaaatgacagggctttttggtaagctagatatgttccaattcttgatgtttgcacaagccctagagtctcttatgttggatagactgaaaccctaaccctaatcttgggttgggagtatattaaatagaagagttaggtgggccaaagcccattacagaagggg

SEQ ID NO: 48904 - DNA, 1045 bp, Zea Mays
agcaccctggaacccttctattttgcactgacttccacggctcgcctcgcttccccatcccactctctgtccctccggcgagtggcggcggcagagacggaggccgagtgagcagtacaacgccgccgacaccaatcacgagggtatatcaactacaagtagagggaggccaagcacgaaaccatcaaagctgaccaactgagcgcccgccgcaatgctctcgcgcgccgccgccatccgtcgcggcgctgcggcggcgttctccacagtctcggagaaaccggagacggggctatacggcttcgacgtgcttcgcacggcgaaggggttccgccgcttcgtggacgacgccatccatcggtcggacgaactcgtggcacgcgtcgcgcggctgccgtcgtccaccgagatagtgcggaccatggacgagatttccaatacagtttgttctgtcattgattcggccgagctgtgcaggaatacacaccctgatagggagtttgtggatgaggcagataaggcgtcgatgaggatttatgagcatcttcagctgagggtgaaagtgtcctgctcacagaggaagctcgaagggcagcaactaccttgcatattgactttcaaaaaggagggattcatcttcctaaagataaacttgagaatgctaatcagctgaaccttgagattgcccagctgggtagaaagtaggtacattaattggacacttttgctttctatataagctgggtattacctctgtcaaacaaatattaattggacactttctgtttatactcgtaccgtatttgttgtcaaactgctttgtaatctgttattttagttgcacgttttcaagctatctattggcaagtaatttcatcacttaaatgacagggctttttggtaagctagatatgttccaattcttgatgtttgcacaagccctagagtctcttatgttggatagactgaaaccctaaccctaatcttgggttgggagtatattaaatagaagagttaggtgggccaaagcccattacagaagggg

SEQ ID NO: 48905 - DNA, 1001 bp, Zea Mays
ctattttgcactgacttccacggctcgcctcgcttccccatcccactctctgtccctccggcgagtggcggcggcagagacggaggccgagtgagcagtacaacgccgccgacaccaatcacgagggtatatcaactacaagtagagggaggccaagcacgaaaccatcaaagctgaccaactgagcgcccgccgcaatgctctcgcgcgccgccgccatccgtcgcggcgctgcggcggcgttctccacagtctcggagaaaccggagacggggctatacggcttcgacgtgcttcgcacggcgaaggggttccgccgcttcgtggacgacgccatccatcggtcggacgaactcgtggcacgcgtcgcgcggctgccgtcgtccaccgagatagtgcggaccatggacgagatttccaatacagtttgttctgtcattgattcggccgagctgtgcaggaatacacaccctgatagggagtttgtggatgaggcagataaggcgtcgatgaggatttatgagcatcttcagaggaagctcgaagggcagcaactaccttgcatattgactttcaaaaaggagggattcatcttcctaaagataaacttgagaatgctaatcagctgaaccttgagattgcccagctgggtagaaagtaggtacattaattggacacttttgctttctatataagctgggtattacctctgtcaaacaaatattaattggacactttctgtttatactcgtaccgtatttgttgtcaaactgctttgtaatctgttattttagttgcacgttttcaagctatctattggcaagtaatttcatcacttaaatgacagggctttttggtaagctagatatgttccaattcttgatgtttgcacaagccctagagtctcttatgttggatagactgaaaccctaaccctaatcttgggttgggagtatattaaatagaagagttaggtgggccaaagcccattacagaagggg

SEQ ID NO: 48906 - DNA, 1046 bp, Zea Mays
ttgcactgacttccacggctcgcctcgcttccccatcccactctctgtccctccggcgagtggcggcggcagagacggaggccgagtgagcagtacaacgccgccgacaccaatcacgagggtatatcaactacaagtagagggaggccaagcacgaaaccatcaaagctgaccaactgagcgcccgccgcaatgctctcgcgcgccgccgccatccgtcgcggcgctgcggcggcgttctccacagtctcggagaaaccggagacggggctatacggcttcgacgtgcttcgcacggcgaaggggttccgccgcttcgtggacgacgccatccatcggtcggacgaactcgtggcacgcgtcgcgcggctgccgtcgtccaccgagatagtgcggaccatggacgagatttccaatacagtttgttctgtcattgattcggccgagctgtgcaggaatacacaccctgatagataaggcgtcgatgaggatttatgagcatcttcagtacctgaatacaaacactactttgtacaatgctgtactgaaagctgagggtgaaagtgtcctgctcacagaggaagctcgaagggcagcaactaccttgcatattgactttcaaaaaggagggattcatcttcctaaagataaacttgagaatgctaatcagctgaaccttgagattgcccagctgggtagaaagtaggtacattaattggacacttttgctttctatataagctgggtattacctctgtcaaacaaatattaattggacactttctgtttatactcgtaccgtatttgttgtcaaactgctttgtaatctgttattttagttgcacgttttcaagctatctattggcaagtaatttcatcacttaaatgacagggctttttggtaagctagatatgttccaattcttgatgtttgcacaagccctagagtctcttatgttggatagactgaaaccctaaccctaatcttgggttgggagtatattaaatagaagagttaggtgggccaaagcccattacagaagggg

SEQ ID NO: 48907 - DNA, 1874 bp, Zea Mays
atggggtgcgcgcaggggaagtcctcgcggggctcgcccgcccgcagcgacggccgcggcgtggaccgcctgaagcgcgacaacgactaccgccccggctccagcgtgtcccgcctctccgacccgctcccggccaccgccgagagcgttccggctccggcagctccgccgaccaaagagcacgcccggcgagccgctgccgtcgtcccaggagggaagacaccggacgacggcaacggcgacgccgcggcacagcaggcgacgacggccgcaacgccggcgaccccgccactgctcccgccacacccgccgcggcgcgaggacgagctgcgtctggaccaccccaacgtgatgaagctggagggcatcgccacctcccggatgcaccgcagcatctacctcgtcttcgacttcatgtactccgacctcggcaggctcgtcttgcgctcccaacagcgcctcaccgagccgcagatcaagtgctacatgcagcagctgctcgcggggctgcagcactgccacgagcgcggcatcctgcaccgggacatcaagggctccaacctgctgatcgaccgccacggcgtgctcaagatcggcgacttcggcctcgccaactactacggcgctgggcgccggcacccgctcaccagccgcgtcgtcacgctctggtaccgcgcgcctgagctgctgctgggctccaccagctacggcgtcggcatcgacctctggagcgcggggtgcctcctcgccgagatgttcttcggcaagcccctcatgcccggcagcggcgaggtggatcagctgctgaagatcttcaggctgtgcgggtcgccgccggacgactactggcggaagatgaagctgtccccgtcgttcaagccccccaagccgtacaaggcaacgacgggcgagcggttccgcgacctgccgccatcgtcgctcggcctgctcgccactctcctcgcgctcgacccggccgcgcgcggcaccgccgggcaggccctgcagagcagcttcttcaccacgccgccgatgccgtgcgacctctcgtcgctccccgtcgtgtacaaggaggaggaggaggtcgactcgaggaagccgaggacgaggcagcgctcgcataggcggaaggacggcaacggcaagcggtcggagaccaacagcgggtctcctcctgagaaagaggcgcagcccatgcagccgttggacattaccatttctctgtccggtccaggtttccagcgcttgggtctcggtgcatctccactacgtgcccccctgaatttgttccaggaccaggaggatgatgaattaactggcacggcgaactcagtaactgacacgacgcgagaacatgacataggccaaggatcagctgccgctgtgatgactgccgctaaagcctcttctggcgttcacgactcatcatcatcagagaaaaccatcgtcaacggctcatccagcacagtcgcgaagcagctgccgacggcccgccactcgggcagcgacgacgacgatcacgggaacatccacctggttccggctccggacgaggaggaggccgatggcgagccggcgtccggcagcggcgtgaaccgcgtcggcccggagagcaagtcgtctgctttcgtgtcggacttcgaggcggccgccgcggcgctacgcgcgtcggaggaactcccttcttccaattaagcagtaggttcttgtggatcggctgttcttctccggctgagcttgagcattcctctgaatttgttcttctccggctgttcttccaatgagcttgagactgatgcctcatatcattgcacgcaccaataatcatctcttcagaaaaaagatgaatcattgttttatttgttttattatat

SEQ ID NO: 48908 - DNA, 715 bp, Zea Mays
gtcgccttcaagtagcctgcatttcggccggccgcccgcccgccgctctagaggtgtcgccatcttcgttgccaattggcgaagcctgacgcctccatccagctgcgacattgccagtagacaccgctaactcatggccctgctcccgctgttcctcaggccggtggttcggttcgcggcgcgcgtggtggaaggtgggccggcggtcgcggtggcaacgatcctgcaccgcgccggcgcactgcccaggaaccggggcctggagcgcctcgtccgagacgacgcgctccacggccgcggacaggactgcatcgccagcttcgtcgtcggcgtcatgcgctgcctctgctagtagattcggttgcctagctagagctagagagaggggaagtggactccattgttcggagaaaattcaccttgaaatttgtagcaggaaacttgaattgcaatgctgaccctttacctcacctctcaagtcaaggcattacagctaaacgacaagttttaacaatccgacaaaatttcgcagacaaaattattcagcgttacgggaaaagtgtacctccagcaaacaaacgtacagatctatataagcagttgaagagaaagcatccctgcaaatttatcatcatttacacattttagccaatgcgatttccagggaactgtcaaccaaggatcaactcttcagctgaaagaacgtgtacacaag

SEQ ID NO: 48909 - DNA, 2022 bp, Zea Mays
aataaacagctaactgcagtctgaaggatccagtttcctaggtttcaatggaactaatgttttcctaagggaaacaatgtttttcactctctgttggtttcaatgaaccaaactgttttccttacaatttttttccctgttcatggttctcaggaatggttatcaaagacactctggtaatgaggacccagtttttttttcttttttagagtgacgagttcctgggtttagggtttagggaagccccaaaccctaataggtattctaacaggtagcacaaagcaaatttcatactacattgatcacgaatatgagatttgtcctaagtcaatttttcacaaaaaaaattgacaggtaatatctgtaaaaaggttataccaaatgaaaagaactatatgttgtaaaagtaactttagataatgaatctacctgtgttgtcaacatacataaaaaattatattaactgtcaaagttggaaaaaacaacttaggacaggcctccatgagcttatatttacaatcgggacttcagaagtagattataaagttctcaatcacagtgtttgccggtattatcacatcctagacaagtatgaaaactcttgaatacaccagactggcttagtgacaggacaacataaactatattgagtaaaatgcattccaggtccttcaacttatctctcattgtcaattcgatccataaactaacaaagtatgtctcttaagagtctaatctctattcgggtctctctattaggtcctagcagattgtcgtggctaaactaggcccacatgtcagtcgtggtggtcgattggacccatccacccttctccctcctcgaccccttcctcgccaccgcactggagcagacaagctcgccggtgtccatgtgctccacgatgaatcagcacaagatgcagacgagttcgccggcgtcgaccagcccggacgcccacagtcctgccgagctgatcatcgggtcgtccctgttggtgccctccagcagcgcaagccgcgtgtacctaccgcatacctcggtggtgaggtatgcgtcacgcgggcactccagctccacgtgcgtgcgggcctcgccagccatggccggcgcgaagagggagccttggatcaggacagcggggcccaggccccttttctactagactagatctgccccttattggaagcactggctgcaatactgttgggaattcataatcctgttggttcttgtggcctgcagatagagcaggagctggactgtggtgaaaactgaaaagctttgattcgtggtcgtggacgccgctgctaatgcccttgctggagggtgaaggatcccatggtttgatggtctgtgctatcggggacctcgttggtggcgtgcaagatgtatgccatggggaaggtgggtagcctaatctcctccagcgtgtactatgtccccacctgttccacctgttcgatggcagcagtaggacgtcaccttcaagagctggtcatggtacgtgtggtccggcaagttctagggggttctcaagtcaagagagaaggtggtcagcgtctccgtcaatggcatcgaagcagggttccacatgtacctggacaccaatgacgaggcttacttcctcagtaaagcggaccacgaggtcggcctctgtgaggttgggcccccgcgagcatgagggacgagagcaggcgggacggggaggtggcgagcacagaaacgacggctgtgcggaacaacatgagcgtggtaccatcgatggaggcgaacggtccccacatcgtcggcttccccctccctacgtcggtttaacgaagaagagctgtttcagtcgtaacgggtttgattgggtccgttagggcctaaccgagacccgaacagagattaggcccctaaaagacataaattattagtttatggaccgaattgaagagacaagtttaagtaccaagaatgcattttactcaactatattacttgaggtattaagagaccactgtaaagcagttgttcatgac

SEQ ID NO: 48910 - DNA, 224 bp, Zea Mays
gcgggtaggggtggagccgtggaggggtggatagtttttgagggggagaggttggtgggaggtgaagtacggtgcacgaaacaacgggcgcggaggtgaggtgagctatcaattggtgggcagaggaaaaggggaggagcaggggggagagcgttgggctgggttggtgcccgacgggggcggggacgcggtcgctgctgaagccgcgaagaagccaaatgcaa

SEQ ID NO: 48911 - DNA, 1940 bp, Zea Mays
gttgttttttcgaacccgacccaactctgtcctcacttctctcgggagccgggactcgggagattacttcgccgccgtcgcctcgcctccgcaaccgcgacacgacacacaccagcgccgccaccgcggaaggagcaaggttgaagaagaagcggcacccgccacagatacgccgcgcggcggcgccatggccgagctgcggcacgccacggcggcgacccgcgccaccagttccccatccaagcgcgacgccgaggccgcgtccgcgtcctcgcccttggtcgcgtccccccgcgtcgacggcggcaaggacggcctccgcccccagccaagaacgcgccgtacctgtgccgcaaggaggggattcggctccactgccccagggtgaggcagcgggactctctgtgggagaatcctcatgctgcagcaacttggtggaagccgtgtgctgagcgtcagagtcatgaagtctcagacctcgtgtcagagaatgaaacttctgggtttatatttattcatgccgagggtggattaaaccagcaacgtatagctgtatatatgtaatgctgttgcaattgctaagataatgaatgccacacttattctgccagtgctaaagcaggaccaaatatggaaagatcaaacgaaattcgaagacatctttgatgtagaccattttataaattatttgaaggaggatgtgcgcattgttcgagatattcctgactggtttacagaaaaggatgagcttttcactagtataaagcgcactgtgaaaaatgtcccaaagtatgcatcagcacaattttatattgataatgtctttccaaggatcaaagagaaaaagataatgtcaatcaagccgtttgttgataggttaggatatgataatgttccaatggagattaaccgactgaggtgccgagttaattatcatgctttgaagtttctacctgacattgaagagatggctgacaagctagcaacaaggatgaggaatcgaacaggaagtttaaatccatacatggctcttcatttgcgatttgagaaaggaatggtgggcctttcattttgtgattttgctggaactagggaggagaaagctatgatggctacttacagacagcagcaatggccaaggcggtacaagaatggatctcacttatggtcactagcactagaaaagagaaaagaaggccgctgtccgcttgagccgggggaaataggaattattttgcgtgagatggggtatactaaggaaactcagatatatgttgcatcagggcaggtgtatggtggaaacaacagaatggcacccttgagaaatatgttccccaatctggttagcaaagaagatcttgctagcaaggaggagatggagcctttcaagaagcatgtaactagtcttgctgcactggacttcttggtgtgcctgaagtcggatgtgttcgtcatgacccacggtggcaatttcgccaagctgatcatcggctaccgccgctacatgggccgccacaggctcaagtcaatcaagccagacaagggtctcatgtccaagttcttcggggacccttacatgccttgggcgactttcgtggagaacgtgatgatcacccatgagacacgaaccgggctccccgaatccaccttcccacactatgacctatgggagaaccctctcaccccttgcatgtgtagagcttaaattatagactacgagtgatggtgcatagttattctttgttcatttgctgatatgcaaactgcaaattttgtgtagttttttaccactttttgatgtacgatttttttttaccaaagcaaagttcagttcatgcacaatcctcggcacggatacattgccatccactcattcggagcagcagaagcgccgcctgatcctgtcgtcgttaaggctatctccaaccctttgccctctc

SEQ ID NO: 48912 - DNA, 2268 bp, Zea Mays
cgaacccgacccaactctgtcctcacttctctcgggagccgggactcgggagattacttcgccgccgtcgcctcgcctccgcaaccgcgacacgacacacaccagcgccgccaccgcggaaggagcaaggttgaagaagaagcggcacccgccacagatacgccgcgcggcggcgccatggccgagctgcggcacgccacggcggcgacccgcgccaccagttccccatccaagcgcgacgccgaggccgcgtccgcgtcctcgcccttggtcgcgtccccccgcgtcgacggcggcaaggacggcctccgcccccagccaagaacgcgccgtacctgtgccgcaaggaggggattcggctccactgccccagggtgaggcagcgggactctctgtgggagaatcctcatgctgcagcaacttggtggaagccgtgtgctgagcgtcagagtcatgaagtctcagacctcgtgtcagagaatgaaacttctgggtttatatttattcatgccgagggtggattaaaccagcaacgtatagctgtatatatgtaatgctgttgcaattgctaagataatgaatgccacacttattctgccagtgctaaagcaggaccaaatatggaaagatcaaacgaaattcgaagacatctttgatgtagaccattttataaattatttgaaggaggatgtgcgcattgttcgagatattcctgactggtttacagaaaaggatgagcttttcactagtataaagttagtctcttcattttcagctatccattgtgtcttaactgttacttactgaatagcttgttgctaaaaattacacacaagttttatactgatattggtgttatctacagtataaagttactctccttttgtcatcaatataagcattatgattgttagtgaggattattacacctcaaccgcatgaaccagaagtgcaacctgactggaaattactgctggacttctattctccatcttttgtttttgcaagagttattatccttacagaaagttgatgtagctagagattgtgtttgtaactctctccttaaggttttgtatgtttgttgtaacaggcgcactgtgaaaaatgtcccaaagtatgcatcagcacaattttatattgataatgtctttccaaggatcaaagagaaaaagataatgtcaatcaagccgtttgttgataggttaggatatgataatgttccaatggagattaaccgactgaggtgccgagttaattatcatgctttgaagtttctacctgacattgaagagatggctgacaagctagcaacaaggatgaggaatcgaacaggaagtttaaatccatacatggctcttcatttgcgatttgagaaaggaatggtgggcctttcattttgtgattttgctggaactagggaggagaaagctatgatggctacttacagacagcagcaatggccaaggcggtacaagaatggatctcacttatggtcactagcactagaaaagagaaaagaaggccgctgtccgcttgagccgggggaaataggaattattttgcgtgagatggggtatactaaggaaactcagatatatgttgcatcagggcaggtgtatggtggaaacaacagaatggcacccttgagaaatatgttccccaatctggttagcaaagaagatcttgctagcaaggaggagatggagcctttcaagaagcatgtaactagtcttgctgcactggacttcttggtgtgcctgaagtcggatgtgttcgtcatgacccacggtggcaatttcgccaagctgatcatcggctaccgccgctacatgggccgccacaggctcaagtcaatcaagccagacaagggtctcatgtccaagttcttcggggacccttacatgccttgggcgactttcgtggagaacgtgatgatcacccatgagacacgaaccgggctccccgaatccaccttcccacactatgacctatgggagaaccctctcaccccttgcatgtgtagagcttaaattatagactacgagtgatggtgcatagttattctttgttcatttgctgatatgcaaactgcaaattttgtgtagttttttaccactttttgatgtacgatttttttttaccaaagcaaagttcagttcatgcacaatcctcggcacggatacattgccatccactcattcggagcagcagaagcgccgcctgatcctgtcgtcgttaaggctatctccaaccctttgccctctc

SEQ ID NO: 48913 - DNA, 1865 bp, Zea Mays
cgacccaactctgtcctcacttctctcgggagccgggactcgggagattacttcgccgccgtcgcctcgcctccgcaaccgcgacacgacacacaccagcgccgccaccgcggaaggagcaaggttgaagaagaagcggcacccgccacagatacgccgcgcggcggcgccatggccgagctgcggcacgccacggcggcgacccgcgccaccagttccccatccaagcgcgacgccgaggccgcgtccgcgtcctcgcccttggtcgcgtccccccgcgtcgacggcggcaaggacggcctccgcccccagccaagaacgcgccgtacctgtgccgcaaggaggggattcggctccactgccccagggtgaggcagcgggactctctgtgggagaatcctcatgctgcagcaacttggtggaagccgtgtgctgagcgtcagagtcatgaagtctcagacctcgtgtcagagaatgaaacttctgggtttatatttattcatgccgagggtggattaaaccagcaacgtatagcttgctaaagcaggaccaaatatggaaagatcaaacgaaattcgaagacatctttgatgtagaccattttataaattatttgaaggaggatgtgcgcattgttcgagatattcctgactggtttacagaaaaggatgagcttttcactagtataaagcgcactgtgaaaaatgtcccaaagtatgcatcagcacaattttatattgataatgtctttccaaggatcaaagagaaaaagataatgtcaatcaagccgtttgttgataggttaggatatgataatgttccaatggagattaaccgactgaggtgccgagttaattatcatgctttgaagtttctacctgacattgaagagatggctgacaagctagcaacaaggatgaggaatcgaacaggaagtttaaatccatacatggctcttcatttgcgatttgagaaaggaatggtgggcctttcattttgtgattttgctggaactagggaggagaaagctatgatggctacttacagacagcagcaatggccaaggcggtacaagaatggatctcacttatggtcactagcactagaaaagagaaaagaaggccgctgtccgcttgagccgggggaaataggaattattttgcgtgagatggggtatactaaggaaactcagatatatgttgcatcagggcaggtgtatggtggaaacaacagaatggcacccttgagaaatatgttccccaatctggttagcaaagaagatcttgctagcaaggaggagatggagcctttcaagaagcatgtaactagtcttgctgcactggacttcttggtgtgcctgaagtcggatgtgttcgtcatgacccacggtggcaatttcgccaagctgatcatcggctaccgccgctacatgggccgccacaggctcaagtcaatcaagccagacaagggtctcatgtccaagttcttcggggacccttacatgccttgggcgactttcgtggagaacgtgatgatcacccatgagacacgaaccgggctccccgaatccaccttcccacactatgacctatgggagaaccctctcaccccttgcatgtgtagagcttaaattatagactacgagtgatggtgcatagttattctttgttcatttgctgatatgcaaactgcaaattttgtgtagttttttaccactttttgatgtacgatttttttttaccaaagcaaagttcagttcatgcacaatcctcggcacggatacattgccatccactcattcggagcagcagaagcgccgcctgatcctgtcgtcgttaaggctatctccaaccctttgccctctc

SEQ ID NO: 48914 - DNA, 2076 bp, Zea Mays
cgacccaactctgtcctcacttctctcgggagccgggactcgggagattacttcgccgccgtcgcctcgcctccgcaaccgcgacacgacacacaccagcgccgccaccgcggaaggagcaaggttgaagaagaagcggcacccgccacagatacgccgcgcggcggcgccatggccgagctgcggcacgccacggcggcgacccgcgccaccagttccccatccaagcgcgacgccgaggccgcgtccgcgtcctcgcccttggtcgcgtccccccgcgtcgacggcggcaaggacggcctccgcccccagccaaggtggtcactcccgcccccccttccgctccctcctcgcgctcgaggaccccaggtcccccacggcttccgcctcctaccggattctcgtcgccgcaatcgcctgcttcgcgctcactgcgctcttcttcgcgcctttcgtctggacacgcctcaacgcgccgtacctgtgccgcaaggaggggattcggctccactgccccagggtgaggcagcgggactctctgtgggagaatcctcatgctgcagcaacttggtggaagccgtgtgctgagcgtcagagtcatgaagtctcagacctcgtgtcagagaatgaaacttctgggtttatatttattcatgccgagggtggattaaaccagcaacgtatagctgtatatatgtaatgctgttgcaattgctaagataatgaatgccacacttattctgccagtgctaaagcaggaccaaatatggaaagatcaaacgaaattcgaagacatctttgatgtagaccattttataaattatttgaaggaggatgtgcgcattgttcgagatattcctgactggtttacagaaaaggatgagcttttcactagtataaagcgcactgtgaaaaatgtcccaaagtatgcatcagcacaattttatattgataatgtctttccaaggatcaaagagaaaaagataatgtcaatcaagccgtttgttgataggttaggatatgataatgttccaatggagattaaccgactgaggtgccgagttaattatcatgctttgaagtttctacctgacattgaagagatggctgacaagctagcaacaaggatgaggaatcgaacaggaagtttaaatccatacatggctcttcatttgcgatttgagaaaggaatggtgggcctttcattttgtgattttgctggaactagggaggagaaagctatgatggctacttacagacagcagcaatggccaaggcggtacaagaatggatctcacttatggtcactagcactagaaaagagaaaagaaggccgctgtccgcttgagccgggggaaataggaattattttgcgtgagatggggtatactaaggaaactcagatatatgttgcatcagggcaggtgtatggtggaaacaacagaatggcacccttgagaaatatgttccccaatctggttagcaaagaagatcttgctagcaaggaggagatggagcctttcaagaagcatgtaactagtcttgctgcactggacttcttggtgtgcctgaagtcggatgtgttcgtcatgacccacggtggcaatttcgccaagctgatcatcggctaccgccgctacatgggccgccacaggctcaagtcaatcaagccagacaagggtctcatgtccaagttcttcggggacccttacatgccttgggcgactttcgtggagaacgtgatgatcacccatgagacacgaaccgggctccccgaatccaccttcccacactatgacctatgggagaaccctctcaccccttgcatgtgtagagcttaaattatagactacgagtgatggtgcatagttattctttgttcatttgctgatatgcaaactgcaaattttgtgtagttttttaccactttttgatgtacgatttttttttaccaaagcaaagttcagttcatgcacaatcctcggcacggatacattgccatccactcattcggagcagcagaagcgccgcctgatcctgtcgtcgttaaggctatctccaaccctttgccctctc

SEQ ID NO: 48915 - DNA, 2072 bp, Zea Mays
cgacccaactctgtcctcacttctctcgggagccgggactcgggagattacttcgccgccgtcgcctcgcctccgcaaccgcgacacgacacacaccagcgccgccaccgcggaaggagcaaggttgaagaagaagcggcacccgccacagatacgccgcgcggcggcgccatggccgagctgcggcacgccacggcggcgacccgcgccaccagttccccatccaagcgcgacgccgaggccgcgtccgcgtcctcgcccttggtcgcgtccccccgcgtcgacggcggcaaggacggcctccgcccccagccaaggtggtcactcccgcccccccttccgctccctcctcgcgctcgaggaccccaggtcccccacggcttccgcctcctaccggattctcgtcgccgcaatcgcctgcttcgcgctcactgcgctcttcttcgcgcctttcgtctggacacgcctcaacgcgccgtacctgtgccgcaaggaggggattcggctccactgccccagggtgaggcagcgggactctctgtgggagaatcctcatgctgcagcaacttggtggaagccgtgtgctgagcgtcagagtcatgaagtctcagacctcgtgtcagagaatgaaacttctgggtttatatttattcatgccgagggtggattaaaccagcaacgtatagctatatgtaatgctgttgcaattgctaagataatgaatgccacacttattctgccagtgctaaagcaggaccaaatatggaaagatcaaacgaaattcgaagacatctttgatgtagaccattttataaattatttgaaggaggatgtgcgcattgttcgagatattcctgactggtttacagaaaaggatgagcttttcactagtataaagcgcactgtgaaaaatgtcccaaagtatgcatcagcacaattttatattgataatgtctttccaaggatcaaagagaaaaagataatgtcaatcaagccgtttgttgataggttaggatatgataatgttccaatggagattaaccgactgaggtgccgagttaattatcatgctttgaagtttctacctgacattgaagagatggctgacaagctagcaacaaggatgaggaatcgaacaggaagtttaaatccatacatggctcttcatttgcgatttgagaaaggaatggtgggcctttcattttgtgattttgctggaactagggaggagaaagctatgatggctacttacagacagcagcaatggccaaggcggtacaagaatggatctcacttatggtcactagcactagaaaagagaaaagaaggccgctgtccgcttgagccgggggaaataggaattattttgcgtgagatggggtatactaaggaaactcagatatatgttgcatcagggcaggtgtatggtggaaacaacagaatggcacccttgagaaatatgttccccaatctggttagcaaagaagatcttgctagcaaggaggagatggagcctttcaagaagcatgtaactagtcttgctgcactggacttcttggtgtgcctgaagtcggatgtgttcgtcatgacccacggtggcaatttcgccaagctgatcatcggctaccgccgctacatgggccgccacaggctcaagtcaatcaagccagacaagggtctcatgtccaagttcttcggggacccttacatgccttgggcgactttcgtggagaacgtgatgatcacccatgagacacgaaccgggctccccgaatccaccttcccacactatgacctatgggagaaccctctcaccccttgcatgtgtagagcttaaattatagactacgagtgatggtgcatagttattctttgttcatttgctgatatgcaaactgcaaattttgtgtagttttttaccactttttgatgtacgatttttttttaccaaagcaaagttcagttcatgcacaatcctcggcacggatacattgccatccactcattcggagcagcagaagcgccgcctgatcctgtcgtcgttaaggctatctccaaccctttgccctctc

SEQ ID NO: 48916 - DNA, 1955 bp, Zea Mays
cgacccaactctgtcctcacttctctcgggagccgggactcgggagattacttcgccgccgtcgcctcgcctccgcaaccgcgacacgacacacaccagcgccgccaccgcggaaggagcaaggttgaagaagaagcggcacccgccacagatacgccgcgcggcggcgccatggccgagctgcggcacgccacggcggcgacccgcgccaccagttccccatccaagcgcgacgccgaggccgcgtccgcgtcctcgcccttggtcgcgtccccccgcgtcgacggcggcaaggacggcctccgcccccagccaaggtggtcactcccgcccccccttccgctccctcctcgcgctcgaggaccccaggtcccccacggcttccgcctcctaccggattctcgtcgccgcaatcgcctgcttcgcgctcactgcgctcttcttcgcgcctttcgtctggacacgcctcaacgcgccgtacctgtgccgcaaggaggggattcggctccactgccccagggtgaggcagcgggactctctgtgggagaatcctcatgctgcagcaacttggtggaagccgtgtgctgagcgtcagagtcatgaagtctcagacctcgtgtcagagaatgaaacttctgggtttatatttattcatgccgagggtggattaaaccagcaacgtatagctatatgtaatgctgttgcaattgctaagataatgaatgccacacttattctgccagtgctaaagcaggaccaaatatggaaagatcaaacgaaattcgaagacatctttgatgtagaccattttataaattatttgaaggaggatgtgcgcattgttcgagatattcctgactggtttacagaaaaggatgagcttttcactagtataaaatatgataatgttccaatggagattaaccgactgaggtgccgagttaattatcatgctttgaagtttctacctgacattgaagagatggctgacaagctagcaacaaggatgaggaatcgaacaggaagtttaaatccatacatggctcttcatttgcgatttgagaaaggaatggtgggcctttcattttgtgattttgctggaactagggaggagaaagctatgatggctacttacagacagcagcaatggccaaggcggtacaagaatggatctcacttatggtcactagcactagaaaagagaaaagaaggccgctgtccgcttgagccgggggaaataggaattattttgcgtgagatggggtatactaaggaaactcagatatatgttgcatcagggcaggtgtatggtggaaacaacagaatggcacccttgagaaatatgttccccaatctggttagcaaagaagatcttgctagcaaggaggagatggagcctttcaagaagcatgtaactagtcttgctgcactggacttcttggtgtgcctgaagtcggatgtgttcgtcatgacccacggtggcaatttcgccaagctgatcatcggctaccgccgctacatgggccgccacaggctcaagtcaatcaagccagacaagggtctcatgtccaagttcttcggggacccttacatgccttgggcgactttcgtggagaacgtgatgatcacccatgagacacgaaccgggctccccgaatccaccttcccacactatgacctatgggagaaccctctcaccccttgcatgtgtagagcttaaattatagactacgagtgatggtgcatagttattctttgttcatttgctgatatgcaaactgcaaattttgtgtagttttttaccactttttgatgtacgatttttttttaccaaagcaaagttcagttcatgcacaatcctcggcacggatacattgccatccactcattcggagcagcagaagcgccgcctgatcctgtcgtcgttaaggctatctccaaccctttgccctctc

SEQ ID NO: 48917 - DNA, 2257 bp, Zea Mays
attgatttttttcccaaatgatgaggatgagacagatgacatagttgaggtggctcttgctgaacttgagatgatagaacaatatagtgccttcatgtctcctgtcgcggctgcggacagcatgacacccaaaaagttcatggcgcttgtctctgctaaaatccaaacatacttttgcaggggcgggtcgatccagagggcggtgcggaggatggccggcggcggcggcggccggaggagacccggcgccttggcggacccgaggaccggcgacgcgtcgtcggcgtcggctagctgctccggggatgataccagcattggtagtgccactgccaagagggaaggggcacgaaggtgcatcatgcagcggtacaggtcccagctcgagcaggaagtcaagaaactgcaaaggcaactgcaagaagagattgatttacatctggcgttggcagatgccattacatataatgcggcgctgatacttaagtcgtctataaagcttccagataaggcgcatgagctattaattagcatatcctctttggaaatcgctatcacaaagcttgaagaggatctaaatcacctgcattaccaattataccatgcaaggaatgaaaggtttcttgcggaaaataagccaggatacttgctacctacaagatcagattgtcaaccctccacagcttgcaattgtacatgggaagaacctgaacaaatgttaagagaattgatattcagagattatcactcagtccaagaagatttttcaactgaacctgaagatcaacaggatgatgaaaaatacgttaaaggtagagaacgtgtatctctaaatatgctgctagaaaagcaccaagatatttcttcaactgggctgtttgtacaccgagatgaagagatgcaagaggcatgctctatggaaaaagaaggcgaagaagatcagaagatagatatgttaccatttaacctgcccaatttgaagaaaggcaacatgagtgaaaatctgtggaataatccaaatcagctctctgaagagatggtgctctccatgaaagatatattccttaatttatctacatcttccaagatgtcaccagaggagcctttttctaattcatcttcatcagcagagcatctatctggttcaacattgactactttgtcggattcatctgtaatagcctcagtgcagcccagtccttcaatgtacctgaaccacgatgatggtaactttgacccgtacaatgttaatggaaaggaagcacagagagacattggcagctatagttcagtagctgaagtgtcttggatgtatattggcaatgaacaacttgaatatgcatctggagctctgagaaagttcaggtttcttgtggagcaactatcaaaggttgacacttcttgtatgaactgtgatgaacggttagcattttggattaacctttacaatgcattaatcatgcatgcctatttggcatacggtgtccctgaaaacgacattaagcttttcgcgctaatgcaaaaggcctgttacacgatctgtgggcagcctgtcagtgcagctgaaatagagtttgtgattctgaagtccttgatgctggcccttcacaaatttaaaacatcagagaatctcaagaaatattcaatcgatggtactgagcctcgtgtgctctttgcactctgttgtgggatgttctcttcgcctgcggtaaggattttctctgctgaaaatgttcgagccgagctacaagaatcaatgagagactacatccgagcatctgttggtgtcaatgacaagggggagcttatggtccccaagttactgcagagctatgccaagggcattgtggaggactctctgcttgccgactggatctgccgtcatctaacactagaccaactcgctgcagtccaagatacatcgtcgtcacatacacagcgccttcttggagtgcgcagtttcagcgtcatcccattcgattcaagattccggtacctgttcttgttcgacaacagtagatgacagaactgcattgctcaatgtgcacaaagccaagagtgggcgggggggggggggggggggggggggtgtggaattagccatgctgtacattttgtaatttttttggggggtgtgggggtcactaggattcttctctgtatataaaattcagttaacttttgtacgtcgagcaaacccaaaatataactgtagattcgcagatggttcatattggcatattgattttacaaggcg

SEQ ID NO: 48918 - DNA, 2623 bp, Zea Mays
attgatttttttcccaaatgatgaggatgagacagatgacatagttgaggtggctcttgctgaacttgagatgatagaacaatatagtgccttcatgtctcctgtcgcggctgcggacagcatgacacccaaaaagttcatggcgcttgtctctgctaaaatccaaacatacttttgcaggggcgggtcgatccagagggcggtgcggaggatggccggcggcggcggcggccggaggagacccggcgccttggcggacccgaggaccggcgacgcgtcgtcggcgtcggctagctgctccggggatgataccagcattggtagtgccactgccaagagggaaggggcacgaaggtgcatcatgcagcggtacaggtcccagctcgagcaggaagtcaagaaactgcaaaggcaactgcaagaagagattgatttacatctggcgttggcagatgccattacatataatgcggcgctgatacttaagtcgtctataaagcttccagataaggcgcatgagctattaattagcatatcctctttggaaatcgctatcacaaagcttgaagaggatctaaatcacctgcattaccaattataccatgcaaggaatgaaaggtttcttgcggaaaataagccaggatacttgctacctacaagatcagattgtcaaccctccacagcttgcaattgtacatgggaagaacctgaacaaatgttaagagaattgatattcagagattatcactcagtccaagaagatttttcaactgaacctgaagatcaacaggatgatgaaaaatacgttaaagatgcaagaggcatgctctatggaaaaagaaggcgaagaagatcagaagatagatatgttaccatttaacctgcccaatttgaagaaaggcaacatgagtgaaaatctgtggaataatccaaatcagctctctgaagagatggtgctctccatgaaagatatattccttaatttatctacatcttccaagatgtcaccagaggagcctttttctaattcatcttcatcagcagagcatctatctggttcaacattgactactttgtcggattcatctgtaatagcctcagtgcagcccagtccttcaatgtacctgaaccacgatgatggtaactttgacccgtacaatgttaatggaaaggaagcacagagagacattggcagctatagttcagtagctgaagtgtcttggatgtatattggcaatgaacaacttgaatatgcatctggagctctgagaaagttcaggtttcttgtggagcaactatcaaaggttgacacttcttgtatgaactgtgatgaacggttagcattttggattaacctttacaatgcattaatcatgcatgtaagtacgatctatcacctttttttaagaatgtcactaagtacttgtttagagatagaacttgatgctttctttcaatcattgttgtcaacataatatgcaccctgaacaccatgcgtgtttactggaactttattaggcctatttggcatacggtgtccctgaaaacgacattaagcttttcgcgctaatgcaaaaggcctgttacacgatctgtgggcagcctgtcagtgcagctgaaatagagtttgtgattctgaaggtgaagactccagtgcaccggccacaactctccttgatgctggcccttcacaaatttaaaacatcagagaatctcaagaaatattcaatcgatggtactgagcctcgtgtgctctttgcactctgttgtgggatgttctcttcgcctgcggtaagtgattgagtaaaaaatggaactctgttacagaaactaaagctatggcctataggtagataattcttggggtgctttcatgtagttgctggagatagaaaaattctcagcagctagtactacatggtttagaataactgagcgtggatctaaagacctttttttcataaagtttgtgaaacaataaaatttgtttccagtgtgcacagtaaagctgccataatacttaaaccatgtttttttattaatatttgggaaatgatgacttcctaccacccaggtaaggattttctctgctgaaaatgttcgagccgagctacaagaatcaatgagagactacatccgagcatctgttggtgtcaatgacaagggggagcttatggtccccaagttactgcagagctatgccaagggcattgtggaggactctctgcttgccgactggatctgccgtcatctaacactagaccaactcgctgcagtccaagatacatcgtcgtcacatacacagcgccttcttggagtgcgcagtttcagcgtcatcccattcgattcaagattccggtacctgttcttgttcgacaacagtagatgacagaactgcattgctcaatgtgcacaaagccaagagtgggcgggggggggggggggggggggggggtgtggaattagccatgctgtacattttgtaatttttttggggggtgtgggggtcactaggattcttctctgtatataaaattcagttaacttttgtacgtcgagcaaacccaaaatataactgtagattcgcagatggttcatattggcatattgattttacaaggcg

SEQ ID NO: 48919 - DNA, 2428 bp, Zea Mays
attgatttttttcccaaatgatgaggatgagacagatgacatagttgaggtggctcttgctgaacttgagatgatagaacaatatagtgccttcatgtctcctgtcgcggctgcggacagcatgacacccaaaaagttcatggcgcttgtctctgctaaaatccaaacatacttttgcaggggcgggtcgatccagagggcggtgcggaggatggccggcggcggcggcggccggaggagacccggcgccttggcggacccgaggaccggcgacgcgtcgtcggcgtcggctagctgctccggggatgataccagcattggtagtgccactgccaagagggaaggggcacgaaggtgcatcatgcagcggtacaggtcccagctcgagcaggaagtcaagaaactgcaaaggcaactgcaagaagagattgatttacatctggcgttggcagatgccattacatataatgcggcgctgatacttaagtcgtctataaagcttccagataaggcgcatgagctattaattagcatatcctctttggaaatcgctatcacaaagcttgaagaggatctaaatcacctgcattaccaattataccatgcaaggaatgaaaggtttcttgcggaaaataagccaggatacttgctacctacaagatcagattgtcaaccctccacagcttgcaattgtacatgggaagaacctgaacaaatgttaagagaattgatattcagagattatcactcagtccaagaagatttttcaactgaacctgaagatcaacaggatgatgaaaaatacgttaaaggtagagaacgtgtatctctaaatatgctgctagaaaagcaccaagatatttcttcaactgggctgtttgtacaccgagatgaagagatgcaagaggcatgctctatggaaaaagaaggcgaagaagatcagaagatagatatgttaccatttaacctgcccaatttgaagaaaggcaacatgagtgaaaatctgtggaataatccaaatcagctctctgaagagatggtgctctccatgaaagatatattccttaatttatctacatcttccaagatgtcaccagaggagcctttttctaattcatcttcatcagcagagcatctatctggttcaacattgactactttgtcggattcatctgtaatagcctcagtgcagcccagtccttcaatgtacctgaaccacgatgatggtaactttgacccgtacaatgttaatggaaaggaagcacagagagacattggcagctatagttcagtagctgaagtgtcttggatgtatattggcaatgaacaacttgaatatgcatctggagctctgagaaagttcaggtttcgagtttcttgtggagcaactatcaaaggttgacacttcttgtatgaactgtgatgaacggttagcattttggattaacctttacaatgcattaatcatgcatgtaagtacgatctatcacctttttttaagaatgtcactaagtacttgtttagagatagaacttgatgctttctttcaatcattgttgtcaacataatatgcaccctgaacaccatgcgtgtttactggaactttattaggcctatttggcatacggtgtccctgaaaacgacattaagcttttcgcgctaatgcaaaaggcctgttacacgatctgtgggcagcctgtcagtgcagctgaaatagagtttgtgattctgaaggtgaagactccagtgcaccggccacaactctccttgatgctggcccttcacaaatttaaaacatcagagaatctcaagaaatattcaatcgatggtactgagcctcgtgtgctctttgcactctgttgtgggatgttctcttcgcctgcggattttctctgctgaaaatgttcgagccgagctacaagaatcaatgagagactacatccgagcatctgttggtgtcaatgacaagggggagcttatggtccccaagttactgcagagctatgccaagggcattgtggaggactctctgcttgccgactggatctgccgtcatctaacactagaccaactcgctgcagtccaagatacatcgtcgtcacatacacagcgccttcttggagtgcgcagtttcagcgtcatcccattcgattcaagattccggtacctgttcttgttcgacaacagtagatgacagaactgcattgctcaatgtgcacaaagccaagagtgggcgggggggggggggggggggggggggtgtggaattagccatgctgtacattttgtaatttttttggggggtgtgggggtcactaggattcttctctgtatataaaattcagttaacttttgtacgtcgagcaaacccaaaatataactgtagattcgcagatggttcatattggcatattgattttacaaggcg

SEQ ID NO: 48920 - DNA, 2189 bp, Zea Mays
attgatttttttcccaaatgatgaggatgagacagatgacatagttgaggtggctcttgctgaacttgagatgatagaacaatatagtgccttcatgtctcctgtcgcggctgcggacagcatgacacccaaaaagttcatggcgcttgtctctgctaaaatccaaacatacttttgcaggggcgggtcgatccagagggcggtgcggaggatggccggcggcggcggcggccggaggagacccggcgccttggcggacccgaggaccggcgacgcgtcgtcggcgtcggctagctgctccggggatgataccagcattggtagtgccactgccaagagggaaggggcacgaaggtgcatcatgcagcggtacaggtcccagctcgagcaggaagtcaagaaactgcaaaggcaactgcaagaagagattgatttacatctggcgttggcagatgccattacatataatgcggcgctgatacttaagtcgtctataaagcttccagataaggaatgaaaggtttcttgcggaaaataagccaggatacttgctacctacaagatcagattgtcaaccctccacagcttgcaattgtacatgggaagaacctgaacaaatgttaagagaattgatattcagagattatcactcagtccaagaagatttttcaactgaacctgaagatcaacaggatgatgaaaaatacgttaaaggtagagaacgtgtatctctaaatatgctgctagaaaagcaccaagatatttcttcaactgggctgtttgtacaccgagatgaagagatgcaagaggcatgctctatggaaaaagaaggcgaagaagatcagaagatagatatgttaccatttaacctgcccaatttgaagaaaggcaacatgagtgaaaatctgtggaataatccaaatcagctctctgaagagatggtgctctccatgaaagatatattccttaatttatctacatcttccaagatgtcaccagaggagcctttttctaattcatcttcatcagcagagcatctatctggttcaacattgactactttgtcggattcatctgtaatagcctcagtgcagcccagtccttcaatgtacctgaaccacgatgatggtaactttgacccgtacaatgttaatggaaaggaagcacagagagacattggcagctatagttcagtagctgaagtgtcttggatgtatattggcaatgaacaacttgaatatgcatctggagctctgagaaagttcaggtttcttgtggagcaactatcaaaggttgacacttcttgtatgaactgtgatgaacggttagcattttggattaacctttacaatgcattaatcatgcatgcctatttggcatacggtgtccctgaaaacgacattaagcttttcgcgctaatgcaaaaggcctgttacacgatctgtgggcagcctgtcagtgcagctgaaatagagtttgtgattctgaaggtgaagactccagtgcaccggccacaactctccttgatgctggcccttcacaaatttaaaacatcagagaatctcaagaaatattcaatcgatggtactgagcctcgtgtgctctttgcactctgttgtgggatgttctcttcgcctgcggtaaggattttctctgctgaaaatgttcgagccgagctacaagaatcaatgagagactacatccgagcatctgttggtgtcaatgacaagggggagcttatggtccccaagttactgcagagctatgccaagggcattgtggaggactctctgcttgccgactggatctgccgtcatctaacactagaccaactcgctgcagtccaagatacatcgtcgtcacatacacagcgccttcttggagtgcgcagtttcagcgtcatcccattcgattcaagattccggtacctgttcttgttcgacaacagtagatgacagaactgcattgctcaatgtgcacaaagccaagagtgggcgggggggggggggggggggggggggtgtggaattagccatgctgtacattttgtaatttttttggggggtgtgggggtcactaggattcttctctgtatataaaattcagttaacttttgtacgtcgagcaaacccaaaatataactgtagattcgcagatggttcatattggcatattgattttacaaggcg

SEQ ID NO: 48921 - DNA, 2294 bp, Zea Mays
attgatttttttcccaaatgatgaggatgagacagatgacatagttgaggtggctcttgctgaacttgagatgatagaacaatatagtgccttcatgtctcctgtcgcggctgcggacagcatgacacccaaaaagttcatggcgcttgtctctgctaaaatccaaacatacttttgcaggggcgggtcgatccagagggcggtgcggaggatggccggcggcggcggcggccggaggagacccggcgccttggcggacccgaggaccggcgacgcgtcgtcggcgtcggctagctgctccggggatgataccagcattggtagtgccactgccaagagggaaggggcacgaaggtgcatcatgcagcggtacaggtcccagctcgagcaggaagtcaagaaactgcaaaggcaactgcaagaagagattgatttacatctggcgttggcagatgccattacatataatgcggcgctgatacttaagtcgtctataaagcttccagataaggcgcatgagctattaattagcatatcctctttggaaatcgctatcacaaagcttgaagaggatctaaatcacctgcattaccaattataccatgcaaggaatgaaaggtttcttgcggaaaataagccaggatacttgctacctacaagatcagattgtcaaccctccacagcttgcaattgtacatgggaagaacctgaacaaatgttaagagaattgatattcagagattatcactcagtccaagaagatttttcaactgaacctgaagatcaacaggatgatgaaaaatacgttaaaggtagagaacgtgtatctctaaatatgctgctagaaaagcaccaagatatttcttcaactgggctgtttgtacaccgagatgaagagatgcaagaggcatgctctatggaaaaagaaggcgaagaagatcagaagatagatatgttaccatttaacctgcccaatttgaagaaaggcaacatgagtgaaaatctgtggaataatccaaatcagctctctgaagagatggtgctctccatgaaagatatattccttaatttatctacatcttccaagatgtcaccagaggagcctttttctaattcatcttcatcagcagagcatctatctggttcaacattgactactttgtcggattcatctgtaatagcctcagtgcagcccagtccttcaatgtacctgaaccacgatgatggtaactttgacccgtacaatgttaatggaaaggaagcacagagagacattggcagctatagttcagtagctgaagtgtcttggatgtatattggcaatgaacaacttgaatatgcatctggagctctgagaaagttcaggtttcgagtttcttgtggagcaactatcaaaggttgacacttcttgtatgaactgtgatgaacggttagcattttggattaacctttacaatgcattaatcatgcatgcctatttggcatacggtgtccctgaaaacgacattaagcttttcgcgctaatgcaaaaggcctgttacacgatctgtgggcagcctgtcagtgcagctgaaatagagtttgtgattctgaaggtgaagactccagtgcaccggccacaactctccttgatgctggcccttcacaaatttaaaacatcagagaatctcaagaaatattcaatcgatggtactgagcctcgtgtgctctttgcactctgttgtgggatgttctcttcgcctgcggtaaggattttctctgctgaaaatgttcgagccgagctacaagaatcaatgagagactacatccgagcatctgttggtgtcaatgacaagggggagcttatggtccccaagttactgcagagctatgccaagggcattgtggaggactctctgcttgccgactggatctgccgtcatctaacactagaccaactcgctgcagtccaagatacatcgtcgtcacatacacagcgccttcttggagtgcgcagtttcagcgtcatcccattcgattcaagattccggtacctgttcttgttcgacaacagtagatgacagaactgcattgctcaatgtgcacaaagccaagagtgggcgggggggggggggggggggggggggtgtggaattagccatgctgtacattttgtaatttttttggggggtgtgggggtcactaggattcttctctgtatataaaattcagttaacttttgtacgtcgagcaaacccaaaatataactgtagattcgcagatggttcatattggcatattgattttacaaggcg

SEQ ID NO: 48922 - DNA, 2201 bp, Zea Mays
attgatttttttcccaaatgatgaggatgagacagatgacatagttgaggtggctcttgctgaacttgagatgatagaacaatatagtgccttcatgtctcctgtcgcggctgcggacagcatgacacccaaaaagttcatggcgcttgtctctgctaaaatccaaacatacttttgcaggggcgggtcgatccagagggcggtgcggaggatggccggcggcggcggcggccggaggagacccggcgccttggcggacccgaggaccggcgacgcgtcgtcggcgtcggctagctgctccggggatgataccagcattggtagtgccactgccaagagggaaggggcacgaaggtgcatcatgcagcggtacaggtcccagctcgagcaggaagtcaagaaactgcaaaggcaactgcaagaagagattgatttacatctggcgttggcagatgccattacatataatgcggcgctgatacttaagtcgtctataaagcttccagataaggcgcatgagctattaattagcatatcctctttggaaatcgctatcacaaagcttgaagaggatctaaatcacctgcattaccaattataccatgcaaggaatgaaaggtttcttgcggaaaataagccaggatacttgctacctacaagatcagattgtcaaccctccacagcttgcaattgtacatgggaagaacctgaacaaatgttaagagaattgatattcagagattatcactcagtccaagaagatttttcaactgaacctgaagatcaacaggatgatgaaaaatacgttaaagatgcaagaggcatgctctatggaaaaagaaggcgaagaagatcagaagatagatatgttaccatttaacctgcccaatttgaagaaaggcaacatgagtgaaaatctgtggaataatccaaatcagctctctgaagagatggtgctctccatgaaagatatattccttaatttatctacatcttccaagatgtcaccagaggagcctttttctaattcatcttcatcagcagagcatctatctggttcaacattgactactttgtcggattcatctgtaatagcctcagtgcagcccagtccttcaatgtacctgaaccacgatgatggtaactttgacccgtacaatgttaatggaaaggaagcacagagagacattggcagctatagttcagtagctgaagtgtcttggatgtatattggcaatgaacaacttgaatatgcatctggagctctgagaaagttcaggtttcttgtggagcaactatcaaaggttgacacttcttgtatgaactgtgatgaacggttagcattttggattaacctttacaatgcattaatcatgcatgcctatttggcatacggtgtccctgaaaacgacattaagcttttcgcgctaatgcaaaaggcctgttacacgatctgtgggcagcctgtcagtgcagctgaaatagagtttgtgattctgaaggtgaagactccagtgcaccggccacaactctccttgatgctggcccttcacaaatttaaaacatcagagaatctcaagaaatattcaatcgatggtactgagcctcgtgtgctctttgcactctgttgtgggatgttctcttcgcctgcggtaaggattttctctgctgaaaatgttcgagccgagctacaagaatcaatgagagactacatccgagcatctgttggtgtcaatgacaagggggagcttatggtccccaagttactgcagagctatgccaagggcattgtggaggactctctgcttgccgactggatctgccgtcatctaacactagaccaactcgctgcagtccaagatacatcgtcgtcacatacacagcgccttcttggagtgcgcagtttcagcgtcatcccattcgattcaagattccggtacctgttcttgttcgacaacagtagatgacagaactgcattgctcaatgtgcacaaagccaagagtgggcgggggggggggggggggggggggggtgtggaattagccatgctgtacattttgtaatttttttggggggtgtgggggtcactaggattcttctctgtatataaaattcagttaacttttgtacgtcgagcaaacccaaaatataactgtagattcgcagatggttcatattggcatattgattttacaaggcg

SEQ ID NO: 48923 - DNA, 2570 bp, Zea Mays
attgatttttttcccaaatgatgaggatgagacagatgacatagttgaggtggctcttgctgaacttgagatgatagaacaatatagtgccttcatgtctcctgtcgcggctgcggacagcatgacacccaaaaagttcatggcgcttgtctctgctaaaatccaaacatacttttgcaggggcgggtcgatccagagggcggtgcggaggatggccggcggcggcggcggccggaggagacccggcgccttggcggacccgaggaccggcgacgcgtcgtcggcgtcggctagctgctccggggatgataccagcattggtagtgccactgccaagagggaaggggcacgaaggtgcatcatgcagcggtacaggtcccagctcgagcaggaagtcaagaaactgcaaaggcaactgcaagaagagattgatttacatctggcgttggcagatgccattacatataatgcggcgctgatacttaagtcgtctataaagcttccagataaggcgcatgagctattaattagcatatcctctttggaaatcgctatcacaaagcttgaagaggatctaaatcacctgcattaccaattataccatgcaaggaatgaaaggtttcttgcggaaaataagccaggatacttgctacctacaagatcagattgtcaaccctccacagcttgcaattgtacatgggaagaacctgaacaaatgttaagagaattgatattcagagattatcactcagtccaagaagatttttcaactgaacctgaagatcaacaggatgatgaaaaatacgttaaaggtagagaacgtgtatctctaaatatgctgctagaaaagcaccaagatatttcttcaactgggctgtttgtacaccgagatgaagagatgcaagaggcatgctctatggaaaaagaaggcgaagaagatcagaagatagatatgttaccatttaacctgcccaatttgaagaaaggcaacatgagtgaaaatctgtggaataatccaaatcagctctctgaagagatggtgctctccatgaaagatatattccttaatttatctacatcttccaagatgtcaccagaggagcctttttctaattcatcttcatcagcagagcatctatctggttcaacattgactactttgtcggattcatctgtaatagcctcagtgcagcccagtccttcaatgtacctgaaccacgatgatggtaactttgacccgtacaatgttaatggaaaggaagcacagagagacattggcagctatagttcagtagctgaagtgtcttggatgtatattggcaatgaacaacttgaatatgcatctggagctctgagaaagttcaggtttcttgtggagcaactatcaaaggttgacacttcttgtatgaactgtgatgaacggttagcattttggattaacctttacaatgcattaatcatgcatgcctatttggcatacggtgtccctgaaaacgacattaagcttttcgcgctaatgcaaaaggcctgttacacgatctgtgggcagcctgtcagtgcagctgaaatagagtttgtgattctgaaggtgaagactccagtgcaccggccacaactctccttgatgctggcccttcacaaatttaaaacatcagagaatctcaagaaatattcaatcgatggtactgagcctcgtgtgctctttgcactctgttgtgggatgttctcttcgcctgcggtaagtgattgagtaaaaaatggaactctgttacagaaactaaagctatggcctataggtagataattcttggggtgctttcatgtagttgctggagatagaaaaattctcagcagctagtactacatggtttagaataactgagcgtggatctaaagacctttttttcataaagtttgtgaaacaataaaatttgtttccagtgtgcacagtaaagctgccataatacttaaaccatgtttttttattaatatttgggaaatgatgacttcctaccacccaggtaaggattttctctgctgaaaatgttcgagccgagctacaagaatcaatgagagactacatccgagcatctgttggtgtcaatgacaagggggagcttatggtccccaagttactgcagagctatgccaagggcattgtggaggactctctgcttgccgactggatctgccgtcatctaacactagaccaactcgctgcagtccaagatacatcgtcgtcacatacacagcgccttcttggagtgcgcagtttcagcgtcatcccattcgattcaagattccggtacctgttcttgttcgacaacagtagatgacagaactgcattgctcaatgtgcacaaagccaagagtgggcgggggggggggggggggggggggggtgtggaattagccatgctgtacattttgtaatttttttggggggtgtgggggtcactaggattcttctctgtatataaaattcagttaacttttgtacgtcgagcaaacccaaaatataactgtagattcgcagatggttcatattggcatattgattttacaaggcg

SEQ ID NO: 48924 - DNA, 2244 bp, Zea Mays
attgatttttttcccaaatgatgaggatgagacagatgacatagttgaggtggctcttgctgaacttgagatgatagaacaatatagtgccttcatgtctcctgtcgcggctgcggacagcatgacacccaaaaagttcatggcgcttgtctctgctaaaatccaaacatacttttgcaggggcgggtcgatccagagggcggtgcggaggatggccggcggcggcggcggccggaggagacccggcgccttggcggacccgaggaccggcgacgcgtcgtcggcgtcggctagctgctccggggatgataccagcattggtagtgccactgccaagagggaaggggcacgaaggtgcatcatgcagcggtacaggtcccagctcgagcaggaagtcaagaaactgcaaaggcaactgcaagaagagattgatttacatctggcgttggcagatgccattacatataatgcggcgctgatacttaagtcgtctataaagcttccagataaggcgcatgagctattaattagcatatcctctttggaaatcgctatcacaaagcttgaagaggatctaaatcacctgcattaccaattataccatgcaaggaatgaaaggtttcttgcggaaaataagccaggatacttgctacctacaagatcagattgtcaaccctccacagcttgcaattgtacatgggaagaacctgaacaaatgttaagagaattgatattcagagattatcactcagtccaagaagatttttcaactgaacctgaagatcaacaggatgatgaaaaatacgttaaaggtagagaacgtgtatctctaaatatgctgctagaaaagcaccaagatatttcttcaactgggctgtttgtacaccgagatgaagagatgcaagaggcatgctctatggaaaaagaaggcgaagaagatcagaagatagatatgttaccatttaacctgcccaatttgaagaaaggcaacatgagtgaaaatctgtggaataatccaaatcagctctctgaagagatggtgctctccatgaaagatatattccttaatttatctacatcttccaagatgtcaccagaggagcctttttctaattcatcttcatcagcagagcatctatctggttcaacattgactactttgtcggattcatctgtaatagcctcagtgcagcccagtccttcaatgtacctgaaccacgatgatggtaactttgacccgtacaatgttaatggaaaggaagcacagagagacattggcagctatagttcagtagctgaagtgtcttggatgtatattggcaatgaacaacttgaatatgcatctggagctctgagaaagttcaggtttcttgtggagcaactatcaaaggttgacacttcttgtatgaactgtgatgaacggcctatttggcatacggtgtccctgaaaacgacattaagcttttcgcgctaatgcaaaaggcctgttacacgatctgtgggcagcctgtcagtgcagctgaaatagagtttgtgattctgaaggtgaagactccagtgcaccggccacaactctccttgatgctggcccttcacaaatttaaaacatcagagaatctcaagaaatattcaatcgatggtactgagcctcgtgtgctctttgcactctgttgtgggatgttctcttcgcctgcggtaaggattttctctgctgaaaatgttcgagccgagctacaagaatcaatgagagactacatccgagcatctgttggtgtcaatgacaagggggagcttatggtccccaagttactgcagagctatgccaagggcattgtggaggactctctgcttgccgactggatctgccgtcatctaacactagaccaactcgctgcagtccaagatacatcgtcgtcacatacacagcgccttcttggagtgcgcagtttcagcgtcatcccattcgattcaagattccggtacctgttcttgttcgacaacagtagatgacagaactgcattgctcaatgtgcacaaagccaagagtgggcgggggggggggggggggggggggggtgtggaattagccatgctgtacattttgtaatttttttggggggtgtgggggtcactaggattcttctctgtatataaaattcagttaacttttgtacgtcgagcaaacccaaaatataactgtagattcgcagatggttcatattggcatattgattttacaaggcg

SEQ ID NO: 48925 - DNA, 2540 bp, Zea Mays
attgatttttttcccaaatgatgaggatgagacagatgacatagttgaggtggctcttgctgaacttgagatgatagaacaatatagtgccttcatgtctcctgtcgcggctgcggacagcatgacacccaaaaagttcatggcgcttgtctctgctaaaatccaaacatacttttgcaggggcgggtcgatccagagggcggtgcggaggatggccggcggcggcggcggccggaggagacccggcgccttggcggacccgaggaccggcgacgcgtcgtcggcgtcggctagctgctccggggatgataccagcattggtagtgccactgccaagagggaaggggcacgaaggtgcatcatgcagcggtacaggtcccagctcgagcaggaagtcaagaaactgcaaaggcaactgcaagaagagattgatttacatctggcgttggcagatgccattacatataatgcggcgctgatacttaagtcgtctataaagcttccagataaggcgcatgagctattaattagcatatcctctttggaaatcgctatcacaaagcttgaagaggatctaaatcacctgcattaccaattataccatgcaaggaatgaaaggtttcttgcggaaaataagccaggatacttgctacctacaagatcagattgtcaaccctccacagcttgcaattgtacatgggaagaacctgaacaaatgttaagagaattgatattcagagattatcactcagtccaagaagatttttcaactgaacctgaagatcaacaggatgatgaaaaatacgttaaaggtagagaacgtgtatctctaaatatgctgctagaaaagcaccaagatatttcttcaactgggctgtttgtacaccgagatgaagagatgcaagaggcatgctctatggaaaaagaaggcgaagaagatcagaagatagatatgttaccatttaacctgcccaatttgaagaaaggcaacatgagtgaaaatctgtggaataatccaaatcagctctctgaagagatggtgctctccatgaaagatatattccttaatttatctacatcttccaagatgtcaccagaggagcctttttctaattcatcttcatcagcagagcatctatctggttcaacattgactactttgtcggattcatctgtaatagcctcagtgcagcccagtccttcaatgtacctgaaccacgatgatggtaactttgacccgtacaatgttaatggaaaggaagcacagagagacattggcagctatagttcagtagctgaagtgtcttggatgtatattggcaatgaacaacttgaatatgcatctggagctctgagaaagttcaggtttcttgtggagcaactatcaaaggttgacacttcttgtatgaactgtgatgaacggttagcattttggattaacctttacaatgcattaatcatgcatgcctatttggcatacggtgtccctgaaaacgacattaagcttttcgcgctaatgcaaaaggcctgttacacgatctgtgggcagcctgtcagtgcagctgaaatagagtttgtgattctgaagtccttgatgctggcccttcacaaatttaaaacatcagagaatctcaagaaatattcaatcgatggtactgagcctcgtgtgctctttgcactctgttgtgggatgttctcttcgcctgcggtaagtgattgagtaaaaaatggaactctgttacagaaactaaagctatggcctataggtagataattcttggggtgctttcatgtagttgctggagatagaaaaattctcagcagctagtactacatggtttagaataactgagcgtggatctaaagacctttttttcataaagtttgtgaaacaataaaatttgtttccagtgtgcacagtaaagctgccataatacttaaaccatgtttttttattaatatttgggaaatgatgacttcctaccacccaggtaaggattttctctgctgaaaatgttcgagccgagctacaagaatcaatgagagactacatccgagcatctgttggtgtcaatgacaagggggagcttatggtccccaagttactgcagagctatgccaagggcattgtggaggactctctgcttgccgactggatctgccgtcatctaacactagaccaactcgctgcagtccaagatacatcgtcgtcacatacacagcgccttcttggagtgcgcagtttcagcgtcatcccattcgattcaagattccggtacctgttcttgttcgacaacagtagatgacagaactgcattgctcaatgtgcacaaagccaagagtgggcgggggggggggggggggggggggggtgtggaattagccatgctgtacattttgtaatttttttggggggtgtgggggtcactaggattcttctctgtatataaaattcagttaacttttgtacgtcgagcaaacccaaaatataactgtagattcgcagatggttcatattggcatattgattttacaaggcg

SEQ ID NO: 48926 - DNA, 2502 bp, Zea Mays
catcacgcagatgcatgccgcgcgcggcatctcttttccagcgcgaaaaaggatgataccagcattggtagtgccactgccaagagggaaggggcacgaaggtgcatcatgcagcggtacaggtcccagctcgagcaggaagtcaagaaactgcaaaggcaactgcaagaagagattgatttacatctggcgttggcagatgccattacatataatgcggcgctgatacttaagtcgtctataaagcttccagataaggcgcatgagctattaattagcatatcctctttggaaatcgctatcacaaagcttgaagaggatctaaatcacctgcattaccaattataccatgcaaggaatgaaaggtttcttgcggaaaataagccaggatacttgctacctacaagatcagattgtcaaccctccacagcttgcaattgtacatgggaagaacctgaacaaatgttaagagaattgatattcagagattatcactcagtccaagaagatttttcaactgaacctgaagatcaacaggatgatgaaaaatacgttaaagatgcaagaggcatgctctatggaaaaagaaggcgaagaagatcagaagatagatatgttaccatttaacctgcccaatttgaagaaaggcaacatgagtgaaaatctgtggaataatccaaatcagctctctgaagagatggtgctctccatgaaagatatattccttaatttatctacatcttccaagatgtcaccagaggagcctttttctaattcatcttcatcagcagagcatctatctggttcaacattgactactttgtcggattcatctgtaatagcctcagtgcagcccagtccttcaatgtacctgaaccacgatgatggtaactttgacccgtacaatgttaatggaaaggaagcacagagagacattggcagctatagttcagtagctgaagtgtcttggatgtatattggcaatgaacaacttgaatatgcatctggagctctgagaaagttcaggtttcgagttaaacacttgccttcagctattgattacaattaacatattgcatgctgaaaattttacaactaaaaagcactacagtttacttgtaagcggtaataactatttctccccttttctttttgcaggtttcttgtggagcaactatcaaaggttgacacttcttgtatgaactgtgatgaacggttagcattttggattaacctttacaatgcattaatcatgcatgtaagtacgatctatcacctttttttaagaatgtcactaagtacttgtttagagatagaacttgatgctttctttcaatcattgttgtcaacataatatgcaccctgaacaccatgcgtgtttactggaactttattaggcctatttggcatacggtgtccctgaaaacgacattaagcttttcgcgctaatgcaaaaggcctgttacacgatctgtgggcagcctgtcagtgcagctgaaatagagtttgtgattctgaaggtgaagactccagtgcaccggccacaactctccttgatgctggcccttcacaaatttaaaacatcagagaatctcaagaaatattcaatcgatggtactgagcctcgtgtgctctttgcactctgttgtgggatgttctcttcgcctgcggtaagtgattgagtaaaaaatggaactctgttacagaaactaaagctatggcctataggtagataattcttggggtgctttcatgtagttgctggagatagaaaaattctcagcagctagtactacatggtttagaataactgagcgtggatctaaagacctttttttcataaagtttgtgaaacaataaaatttgtttccagtgtgcacagtaaagctgccataatacttaaaccatgtttttttattaatatttgggaaatgatgacttcctaccacccaggtaaggattttctctgctgaaaatgttcgagccgagctacaagaatcaatgagagactacatccgagcatctgttggtgtcaatgacaagggggagcttatggtccccaagttactgcagagctatgccaagggcattgtggaggactctctgcttgccgactggatctgccgtcatctaacactagaccaactcgctgcagtccaagatacatcgtcgtcacatacacagcgccttcttggagtgcgcagtttcagcgtcatcccattcgattcaagattccggtacctgttcttgttcgacaacagtagatgacagaactgcattgctcaatgtgcacaaagccaagagtgggcgggggggggggggggggggggggggtgtggaattagccatgctgtacattttgtaatttttttggggggtgtgggggtcactaggattcttctctgtatataaaattcagttaacttttgtacgtcgagcaaacccaaaatataactgtagattcgcagatggttcatattggcatattgattttacaaggcg

SEQ ID NO: 48927 - DNA, 1112 bp, Zea Mays
aacagttcctgccagtttcagatccagatgccaaagaacaaggccccccaaaccggacgctctattttctagtttctacagcatagtactgccgaaacaacacgcatcactggaacttcctgatcgacgacccaggtttgggagcctccaagaacttgcaacggcctgtgccgctcggttccatctcctcggtcttccgtttccggcttgggcggcgagaagagaaggcgccgcgggcagcggctgccggggttgcgcttatacgcgagcgcgcctggccgcctgctcagggggtgaaacgggccggtaagaacgggaagtgttagcccagaaaaggcccatctacctgtgaacatggatcgcggtgaacgcccgcgacgccttccccggccgcggcggcctccccgcccgcacagccactggccgtgacggagcggcccctcccgttcctcatggattcgcgcgcgttcttcctttctgggcgagggcgaccaccggaaggcagcagccggcaaccgcgactgttgacatttgcgttagagatctggggggaaaaaggcgaaagcaacagccgatcaggcgcccaagattcgcgtttccagtgggcacttgtggagggagtggcaggtgcatcgaagagcactacacactcatcttggcagcgcggtctgtggctgattgagcaagcagcaagtggatggaggaggccggcaggataatggcgcggccgggggtggtgtggcccacggctgtgcccggccggggccgtttacttttggcccccttggtgcgtcgggtgatgtgtacgtctgcggaaggaaagcgtctctgtttgccttggccctacggcgcagcgtctctgttcaaggaaaaaaaaagagtggaattttatatctggtcagatttaaaactatcgtagtttaactaaaactttttaaaaactaatatggcatcaaactagtacgctataaaaacaatataatagtacttatttgttatggtaataaatattagtaactgtatttatttatttatttaccttacgagtcttgactttgggaagatgacctatgggctattattgatggatggatcatgacaaaactatgagg

SEQ ID NO: 48928 - DNA, 1315 bp, Zea Mays
aacagttcctgccagtttcagatccagatgccaaagaacaaggccccccaaaccggacgctctattttctagtttctacagcatagtactgccgaaacaacacgcatcactggaacttcctgatcgacgacccaggtttgggagcctccaagaacttgcaacggcctgtgccgctcggttccatctcctcggtcttccgtttccggcttgggcggcgagaagagaaggcgccgcgggcagcggctgccggggttgcgcttatacgcgagcgcgcctggccgcctgctcagggggtgaaacgggccggtaagaacgggaagtgttagcccagaaaaggcccatctacctgtgaacatggatcgcggtgaacgcccgcgacgccttccccggccgcggcggcctccccgcccgcacagccactggccgtgacggagcggcccctcccgttcctcatggattcgcgcgcgttcttcctttctgggcgagggcgaccaccggaaggcagcagccggcaaccgcgactgttgacatttgcgttagagcatggaggaggaagaggaagaagaagctgtttgctctctctggtggggttgatctttcctcgtcttcttgttccccgaggaatagtggcaaagctctacgtgcaaaagtccaacttcgctgtacgaaggcttagctgttatccttctctgggtcgtcatcaaacttcggaagttgccacagaatatctttttccagagcccagatctggggggaaaaaggcgaaagcaacagccgatcaggcgcccaagattcgcgtttccagtgggcacttgtggagggagtggcaggtgcatcgaagagcactacacactcatcttggcagcgcggtctgtggctgattgagcaagcagcaagtggatggaggaggccggcaggataatggcgcggccgggggtggtgtggcccacggctgtgcccggccggggccgtttacttttggcccccttggtgcgtcgggtgatgtgtacgtctgcggaaggaaagcgtctctgtttgccttggccctacggcgcagcgtctctgttcaaggaaaaaaaaagagtggaattttatatctggtcagatttaaaactatcgtagtttaactaaaactttttaaaaactaatatggcatcaaactagtacgctataaaaacaatataatagtacttatttgttatggtaataaatattagtaactgtatttatttatttatttaccttacgagtcttgactttgggaagatgacctatgggctattattgatggatggatcatgacaaaactatgagg

SEQ ID NO: 48929 - DNA, 859 bp, Zea Mays
gcgcgggcccgtcccggcgctaataatgccaagcccccacctagacgacgcgcccattcctccacctccctccattttgccgccgctgccgctccagcaccagcctgctccggcgcagcacctcagcccaggcgcccatcgcttcgccagtctcatacggccatggaccgcggcggccacgcggcgctgctgctgctgctgctggcgctggcggtggtgaacggcggcagcgagcaggcccagcctcaggagcaggagctggtgctgggcggcacgttccgcgccttctccaacgccagcttctaccagctgcggcggcggatcgaggagccgtgcacgccgccatcgccgagaggttcctcgccgaacacgactccatcatgggcgtggccgcctccgacgaccaggacccctaggccgagcgcggtgggaaccgcgtggggagtttggccccgtcgctcggtcggcacggcagggatggtggcggaatgcgggctcgggctgctttttagattttgtggccgatgggctcttggtgggccgacctgtccgcgggctgacgtgcccacggttcaggttttttttccctccgtgttccgtttgggcgagcaaggaaaggaaccatgctgtgctggtgcagtgatgctgatgcaaatagtaggctgctctacgtatgtgtttttgtccctttttgggatgtcctgaaaactcatgatgtatagcacggtagctcctgcctacttggtagcaggacctctctggctgccacgcatgtttatgcactttcctctttattattatatcaatctattattacacggacggttatggtcgaacagctagggtgtggtaatgagct

SEQ ID NO: 48930 - DNA, 1735 bp, Zea Mays
gcgcgggcccgtcccggcgctaataatgccaagcccccacctagacgacgcgcccattcctccacctccctccattttgccgccgctgccgctccagcaccagcctgctccggcgcagcacctcagcccaggcgcccatcgcttcgccagtctcatacggccatggaccgcggcggccacgcggcgctgctgctgctgctgctggcgctggcggtgatccccgtgacgggcgccgccggcgcggcgttcctggaggaggacgcgatcctgggcgccgtggagcgcgcgatgatgcgcggcggcggggggaagggcgccgcgaccgcgaacgcgagcgggaggcaccagcaccggcgccagcgctacggcgtgggggcgccgtggagggaggagatcgcggggctggcggggcggcccgagctggcggcgtggctgcgctcggtgcggcgccggatccacgagcgccccgagctggcgtacgaggaggtggagaccagccgcctggtccgcgacgagctgggcgcgctgggcgtcgggttccgccaccccgtcgcgcgcaccggcgtcgtcgccacgctcggcaccggccgcccgcccgtcgtcgcgctccgggccgacatggacgcgctgcccatccaggaggccgtggagtgggagcacaggagccgggtccccgggaagatgcacgcgtgcggccacgacgcgcatgtggccatgctgctcggcgccgccagcatcctcaaggctcgcgagcaccaactcaagggcacggtgaagcttctgttccagccggcggaggagtcgggctgcggcgcgaagcggatgatcgaggacggcgcgctggagggcgtggaggccatcttcgccgtgcacgtgtcgcaccagcacccgacgtccgtggtcgggtccaggacgggggccctcctcgccggctgcggcttcttcaaggccgtgatacgcggcggcggcggcggcggcgaccgggcgtccgaccccgtcgtcctggccgccgcctccaccgtcatcagcctgcagggcatcgtctcccgcgaggcggacccgctggactcgcaggtggtgtcggtggcggtggtgaacggcggcagcgagcaggcccagcctcaggagcaggagctggtgctgggcggcacgttccgcgccttctccaacgccagcttctaccagctgcggcggcggatcgaggaggtggtcacgccgccatcgccgagaggttcctcgccgaacacgactccatcatgggcgtggccgcctccgacgaccaggacccctaggccgagcgcggtgggaaccgcgtggggagtttggccccgtcgctcggtcggcacggcagggatggtggcggaatgcgggctcgggctgctttttagattttgtggccgatgggctcttggtgggccgacctgtccgcgggctgacgtgcccacggttcaggttttttttccctccgtgttccgtttgggcgagcaaggaaaggaaccatgctgtgctggtgcagtgatgctgatgcaaatagtaggctgctctacgtatgtgtttttgtccctttttgggatgtcctgaaaactcatgatgtatagcacggtagctcctgcctacttggtagcaggacctctctggctgccacgcatgtttatgcactttcctctttattattatatcaatctattattacacggacggttatggtcgaacagctagggtgtggtaatgagct

SEQ ID NO: 48931 - DNA, 1175 bp, Zea Mays
gcgcgggcccgtcccggcgctaataatgccaagcccccacctagacgacgcgcccattcctccacctccctccattttgccgccgctgccgctccagcaccagcctgctccggcgcagcacctcagcccaggcgcccatcgcttcgccagtctcatacggccatggaccgcggcggccacgcggcgctgctgctgctgctgctggcgctggcggtggtgaacggcggcagcgagcaggcccagcctcaggagcaggagctggtgctgggcggcacgttccgcgccttctccaacgccagcttctaccagctgcggcggcggatcgaggaggtggtcacggcgcaggcgcgcgtgcacgggtgcgccgcgtccgtcgacttcttcgagggccagagcttctacccgccaacggtgaacgacgcgcgcatgtacgcccacgtgcggcgcgtggcgaccgacctcctgggcgcgcaggcgtaccgcgacgtgccgcccatgatgggcgccgaggacttctccttctactcgcaggccgtgcccgccgggttctactacatcggggtgcgcaacgagacgctgggatccgtgcacacgggccactccccctacttcatgatcgacgaggacgtgctccccaccggcgcagccgtgcacgccgccatcgccgagaggttcctcgccgaacacgactccatcatgggcgtggccgcctccgacgaccaggacccctaggccgagcgcggtgggaaccgcgtggggagtttggccccgtcgctcggtcggcacggcagggatggtggcggaatgcgggctcgggctgctttttagattttgtggccgatgggctcttggtgggccgacctgtccgcgggctgacgtgcccacggttcaggttttttttccctccgtgttccgtttgggcgagcaaggaaaggaaccatgctgtgctggtgcagtgatgctgatgcaaatagtaggctgctctacgtatgtgtttttgtccctttttgggatgtcctgaaaactcatgatgtatagcacggtagctcctgcctacttggtagcaggacctctctggctgccacgcatgtttatgcactttcctctttattattatatcaatctattattacacggacggttatggtcgaacagctagggtgtggtaatgagct

SEQ ID NO: 48932 - DNA, 1575 bp, Zea Mays
ctcatgcatgcttcccttcttgagagagaggaaaaaaacgtgatcgtcctttgttctagccccaccacctacacaacactacacttgccctggtcctgtggtcctcgcgacgacgatgcaacggggatggaaacacacgacgtgatggcagacggctggctgttgttgagttcgtcaggaccagcagctgtggtcaccgaatctcgagggaccattcacggccaccgcacccacccatctcagacagacgcagagagagagagagggggagagcagcggccagcggggtaaaccaaaaaaaaggagggctttctggttccttgcccgaaatggcatgagccgttggtaaacccgggggcgagcacgccgatttcgcccggggggagaagatccgcctgagtgcccagaacgggcacttcttccacgcccaaaaagctcgaggacgatgcaatgctgactgtgtgtggctgtggctgcaggaggccgtggagtgggagcacaggagccgggtccccgggaagatgcacgcgtgcggccacgacgcgcatgtggccatgctgctcggcgccgccagcatcctcaaggctcgcgagcaccaactcaagggcacggtgaagcttctgttccagccggcggaggagtcgggctgcggcgcgaagcggatgatcgaggacggcgcgctggagggcgtggaggccatcttcgccgtgcacgtgtcgcaccagcacccgacgtccgtggtcgggtccaggacgggggccctcctcgccggctgcggcttcttcaaggccgtgatacgcggcggcggcggcggcggcgaccgggcgtccgaccccgtcgtcctggccgccgcctccaccgtcatcagcctgcagggcatcgtctcccgcgaggcggacccgctggactcgcaggtggtgtcggtggcggtggtgaacggcggcagcgagcaggcccagcctcaggagcaggagctggtgctgggcggcacgttccgcgccttctccaacgccagcttctaccagctgcggcggcggatcgaggagccgtgcacgccgccatcgccgagaggttcctcgccgaacacgactccatcatgggcgtggccgcctccgacgaccaggacccctaggccgagcgcggtgggaaccgcgtggggagtttggccccgtcgctcggtcggcacggcagggatggtggcggaatgcgggctcgggctgctttttagattttgtggccgatgggctcttggtgggccgacctgtccgcgggctgacgtgcccacggttcaggttttttttccctccgtgttccgtttgggcgagcaaggaaaggaaccatgctgtgctggtgcagtgatgctgatgcaaatagtaggctgctctacgtatgtgtttttgtccctttttgggatgtcctgaaaactcatgatgtatagcacggtagctcctgcctacttggtagcaggacctctctggctgccacgcatgtttatgcactttcctctttattattatatcaatctattattacacggacggttatggtcgaacagctagggtgtggtaatgagct

SEQ ID NO: 48933 - DNA, 1575 bp, Zea Mays
ctcatgcatgcttcccttcttgagagagaggaaaaaaacgtgatcgtcctttgttctagccccaccacctacacaacactacacttgccctggtcctgtggtcctcgcgacgacgatgcaacggggatggaaacacacgacgtgatggcagacggctggctgttgttgagttcgtcaggaccagcagctgtggtcaccgaatctcgagggaccattcacggccaccgcacccacccatctcagacagacgcagagagagagagagggggagagcagcggccagcggggtaaaccaaaaaaaaggagggctttctggttccttgcccgaaatggcatgagccgttggtaaacccgggggcgagcacgccgatttcgcccggggggagaagatccgcctgagtgcccagaacgggcacttcttccacgcccaaaaagctcgaggacgatgcaatgctgactgtgtgtggctgtggctgcaggaggccgtggagtgggagcacaggagccgggtccccgggaagatgcacgcgtgcggccacgacgcgcatgtggccatgctgctcggcgccgccagcatcctcaaggctcgcgagcaccaactcaagggcacggtgaagcttctgttccagccggcggaggagtcgggctgcggcgcgaagcggatgatcgaggacggcgcgctggagggcgtggaggccatcttcgccgtgcacgtgtcgcaccagcacccgacgtccgtggtcgggtccaggacgggggccctcctcgccggctgcggcttcttcaaggccgtgatacgcggcggcggcggcggcggcgaccgggcgtccgaccccgtcgtcctggccgccgcctccaccgtcatcagcctgcagggcatcgtctcccgcgaggcggacccgctggactcgcaggtggtgtcggtggcggtggtgaacggcggcagcgagcaggcccagcctcaggagcaggagctggtgctgggcggcacgttccgcgccttctccaacgccagcttctaccagctgcggcggcggatcgaggaggtggtcacgccgccatcgccgagaggttcctcgccgaacacgactccatcatgggcgtggccgcctccgacgaccaggacccctaggccgagcgcggtgggaaccgcgtggggagtttggccccgtcgctcggtcggcacggcagggatggtggcggaatgcgggctcgggctgctttttagattttgtggccgatgggctcttggtgggccgacctgtccgcgggctgacgtgcccacggttcaggttttttttccctccgtgttccgtttgggcgagcaaggaaaggaaccatgctgtgctggtgcagtgatgctgatgcaaatagtaggctgctctacgtatgtgtttttgtccctttttgggatgtcctgaaaactcatgatgtatagcacggtagctcctgcctacttggtagcaggacctctctggctgccacgcatgtttatgcactttcctctttattattatatcaatctattattacacggacggttatggtcgaacagctagggtgtggtaatgagct

SEQ ID NO: 48934 - DNA, 4225 bp, Zea Mays
ccgctgcgacggtgggagttgcgaggggagagagctgcggcgccgcgcggtccaaccctagcgaaatgacctcggcttccagcggacgctaactgcgggcgacttttgggttcctataggtggacagcttttgagcgaagcgcggcgcctaaagctgtcccaaaagctagctgtttgggagccgcttctgcttctggcggccataaggcgcacacaagctgaaccaaacaggggcgcgtctctcctccggtaccggccggcatgagctccacctcatcgggccgccgcgccccctcatcttcggcggcggtcgcctcgtcgccgggacagaagcgggcgagggatgaggccagcagcgggtccccatccgaccccgacgccgccaaaaaccctcgccgcgcttttgcctcctccccgttcgccgacttcggcacctacatggctgcgaagaacagcaagctcgctgcgcagttcgatgccgacgccaacacctcaggcacggacgccggcggtctattcgatggcgtctccatcttcgtggacggcttcacagtcccttctagccaggagctgaaagagattatgctgaacaatggaggccggtttgtcaactacttttccaggcacacggtaacacacattgtttgcagcaacctgcctgatagcaaaatgaagaatctgagagcattcagcagaggacttcctgttgttaagccagcatgggtggtggattccctggcagagaaccggctcctcaactgtgctccttatcaaataaatcagaatagttcttcaagccgaaagcagatgaagctttcttctttcttttctgagaaacaaaatgaaatatgccacaagggggaacaaaacaaccaaaataaggatattgagttccaaccttcatctgctcaggagggatcacagtatcaaagtggggattgtgaaagtgaagcttcaatggatactttggagctatcaaaggactcgttgtcctcagatgaacagaaggcatcagcatttgaagaaagagagagcggagatttcacggttgatgagggtgaatacgattatgaaactgcctgttcggagagccgtaatgacacagatggtaaccttggtgtgcctcaatcccctaatgcaaagtcaaggtgttcaaacttattcagtacaagatctacaggcagtcatttgtccttgtcattggagaaaagtgcagctaaaccttctggccgaccacattcaaccctaacagatccaaattttgttgagaactatttcaagtactctcgactgcacttcattgggacatggagaaaccggtatcggaagcgcttctcaaatttgctagaagctaaaggcattaagttgagtgctgatcattcagggaagaagaaaacaatcattcatattgatatggattgctttttcgtgtctgtggtcatcagaaatatgccagagctgcatgataaaccagtagcagtttgccattcggacaatcctaaaggaacagcagaaatatcgtctgcaaactatcctgctcgaaactatgggataaaggctggcatgtttgttagagatgctaaagctcggtgccctcacctaatgatcgttccttataactttgatgcatatgaggaggttgctgatcagttctatggtactttgcacaaacattgcagtaaggttcaggctttgagttgtgatgaagcttttttggatatgactgaatgcttacatgacaatcctgaggaagtaacacagagaataagaagtgagatttttcatgcaacaaagtgtactgctagtgcaggaattgctgaaaacatgctcctagctcgattggctactagatctgcaaagccgaatggacaatgctttattccatccgaaaaggctgatgattatctgagtagtctctctatcaaagcacttccaggcattggtcatacagtttcatctaaactgaaaagcaaagaaattgaatattgtagtcaacttcgcaatgtttcaaaggaaacaaaatctgtgggtgccgaaattaactggggagtcagatttaatgacaacaaagatgccgaacattttcttaacaacctttgcaaggaggtttctctacgcttgcagggttgtggagttcagggacgtactattacccttaaggtgaaaacaagaagggaaggtgctggggaaccaataaaatatatgggatgtggtgactgtgaaaccacgagtcgttctatgacgattgcaggtgcaactgacagttttgtcactctccagagaattgcaaaacaattattttcagctcttcatcttgatgtgaaggaagttcgtggaattggactgtcactatcaaagcttgagcatgcagatttgggccggggagcatcgcaaggacatatgcttgaatcgtggcttgcttcaccagccgccaagctcaagaaacagcagagtgagatactggggaatgttaatgttgcagggaccagcggactgaaggatttgagatctggaccatcacatacagcagaagcgaaccttagaaatgataggtctactgtatttcacaatgtcgagctgcctccgttgtcccaacttgatttggaggtcctgaagaaccttcccccagagataatgtctgaaatgaatgaaatgtacaagggagaattacaaagtcttgtggacaccctcaatagtgacaagggcaaggaaaatagttcaaaatctcttgctttgcctgcagttattcgtaagtctgtacctgccgatgcaaagcttcaaggatacagagaccacagagactccatgcatttggaggaggaacatactaaggtgagctgtgtcactggaaataaagtggcgctggaactttttaaacaaagtgcaagcacgtgatttagttgctgtcacctcctcatcttgatatttggaagttggaacctgtttcacactattctaattttacctttacacccgtagggaaaatctgacaaacaactatcagaagctaaaccagccaataatgcttcatgctcaagagttagtgcatcaattgagaaaacaacaaaaagtgttacacaacttgatttgatgcctgattcgctaagccaggcagatctaacagttctgcaggaattacctgaggatgtgaaggctgatttgtttagtgcacttccactgcatagatcaggagatcctgcatgcagcacttccaatgtatctgaaagtaaatcacctaatgtggttagagctgaaaatagatcttctaatgatggtggaactgatgatctgaaaaccccaaggtcttttctcccaccaggaagttctcaaaaatggatcgaacagtttagagttagcagttgcctgattttgaacgtaattgcagagcaacacacagattccagctgtcaacgaccattgtcttctgttctagagcctgtagcttcgttcctacctttgtgtcctaacccaggtagtgaagaatggaatgaaactcattcatgtctctccgagcttcttagacactacatacaactgaaagttgaatatgatattgaagagctctacaaatgtttttgccttttgaaaagattctcgtcagcatcagagttttttctggatctacatgatagcatccttcctttcctacaggattctatcagccagcattacggtgggacactgcaattctagctccttgctcaagttgtagccattctattttgctagaaaggaagaagcaatgccgtgaatgtgcggagagacgtgttatgacaatctgcgcctccaagcagctactcaaatcccgtgctggcagattccttggacgcgtttataactttattataactaattgatgccaatgctggaagttttattgatatattcattgcatctatggatcaatagatgccatgtggttcgatatatcattcgtggagcaatggtttgaagggacctttgctgtgctttgatgttcccaggcgaatttcatgtttgcttcataacccatatgaatttcatgttatctttgtgttgctaccaaaaaggttcctggtttgaagttctttgcgtcaaattttcacctatgatctgaagtaccatccgtgcatcctagttattggaagctttacatgagctaatatatgcattatctagtgccatggacctctggtagaaatgcaaccagtctttgaaagcaaatcacaatcagcataaaataaag

SEQ ID NO: 48935 - DNA, 4088 bp, Zea Mays
ggcgcacacaagctgaaccaaacaggggcgcgtctctcctccggtaccggccggcatgagctccacctcatcgggccgccgcgccccctcatcttcggcggcggtcgcctcgtcgccgggacagaagcgggcgagggatgaggccagcagcgggtccccatccgaccccgacgccgccaaaaaccctcgccgcgcttttgcctcctccccgttcgccgacttcggcacctacatggctgcgaagaacagcaagctcgctgcgcagttcgatgccgacgccaacacctcaggcacggacgccggcggtctattcgatggcgtctccatcttcgtggacggcttcacagtcccttctagccaggagctgaaagagattatgctgaacaatggaggccggtttgtcaactacttttccaggcacacggtaacacacattgtttgcagcaacctgcctgatagcaaaatgaagaatctgagagcattcagcagaggacttcctgttgttaagccagcatgggtggtggattccctggcagagaaccggctcctcaactgtgctccttatcaaataaatcagaatagttcttcaagccgaaagcagatgaagctttcttctttcttttctgagaaacaaaatgaaatatgccacaagggggaacaaaacaaccaaaataaggatattgagttccaaccttcatctgctcaggagggatcacagtatcaaagtggggattgtgaaagtgaagcttcaatggatactttggagctatcaaaggactcgttgtcctcagatgaacagaaggcatcagcatttgaagaaagagagagcggagatttcacggttgatgagggtgaatacgattatgaaactgcctgttcggagagccgtaatgacacagatggtaaccttggtgtgcctcaatcccctaatgcaaagtcaaggtgttcaaacttattcagtacaagatctacaggcagtcatttgtccttgtcattggagaaaagtgcagctaaaccttctggccgaccacattcaaccctaacagatccaaattttgttgagaactatttcaagtactctcgactgcacttcattgggacatggagaaaccggtatcggaagcgcttctcaaatttgctagaagctaaaggcattaagttgagtgctgatcattcagggaagaagaaaacaatcattcatattgatatggattgctttttcgtgtctgtggtcatcagaaatatgccagagctgcatgataaaccagtagcagtttgccattcggacaatcctaaaggaacagcagaaatatcgtctgcaaactatcctgctcgaaactatgggataaaggctggcatgtttgttagagatgctaaagctcggtgccctcacctaatgatcgttccttataactttgatgcatatgaggaggttgctgatcagttctatggtactttgcacaaacattgcagtaaggttcaggctttgagttgtgatgaagcttttttggatatgactgaatgcttacatgacaatcctgaggaagtaacacagagaataagaagtgagatttttcatgcaacaaagtgtactgctagtgcaggaattgctgaaaacatgctcctagctcgattggctactagatctgcaaagccgaatggacaatgctttattccatccgaaaaggaattgtgaagagaatacactgcctgcaacattcgtctgttcccaacagacctaaaaagaagcttggagaaaatcactagtggtgccactccctctaaaaggatgtactttgtactacatgctgctgatgattatctgagtagtctctctatcaaagcacttccaggcattggtcatacagtttcatctaaactgaaaagcaaagaaattgaatattgtagtcaacttcgcaatgtttcaaaggatgccctccacaaggatttcggaaaaaagactggtgatcttttatggaattattgtagaggaattgatcattcaattgttggatctgttcaggaaacaaaatctgtgggtgccgaaattaactggggagtcagatttaatgacaacaaagatgccgaacattttcttaacaacctttgcaaggaggtttctctacgcttgcagggttgtggagttcagggacgtactattacccttaaggtgaaaacaagaagggaaggtgctggggaaccaataaaatatatgggatgtggtgactgtgaaaccacgagtcgttctatgacgattgcaggtgcaactgacagttttgtcactctccagagaattgcaaaacaattattttcagctcttcatcttgatgtgaaggaagttcgtggaattggactgtcactatcaaagcttgagcatgcagatttgggccggggagcatcgcaaggacatatgcttgaatcgtggcttgcttcaccagccgccaagctcaagaaacagcagagtgagatactggggaatgttaatgttgcagggaccagcggactgaaggatttgagatctggaccatcacatacagcagaagcgaaccttagaaatgataggtctactgtatttcacaatgtcgagctgcctccgttgtcccaacttgatttggaggtcctgaagaaccttcccccagagataatgtctgaaatgaatgaaatgtacaagggagaattacaaagtcttgtggacaccctcaatagtgacaagggcaaggaaaatagttcaaaatctcttgctttgcctgcagttattcgtaagtctgtacctgccgatgcaaagcttcaaggatacagagaccacagagactccatgcatttggaggaggaacatactaagggaaaatctgacaaacaactatcagaagctaaaccagccaataatgcttcatgctcaagagttagtgcatcaattgagaaaacaacaaaaagtgttacacaacttgatttgatgcctgattcgctaagccaggcagatctaacagttctgcaggaattacctgaggatgtgaaggctgatttgtttagtgcacttccactgcatagatcaggagatcctgcatgcagcacttccaatgtatctgaaagtaaatcacctaatgtggttagagctgaaaatagatcttctaatgatggtggaactgatgatctgaaaaccccaaggtcttttctcccaccaggaagttctcaaaaatggatcgaacagtttagagttagcagttgcctgattttgaacgtaattgcagagcaacacacagattccagctgtcaacgaccattgtcttctgttctagagcctgtagcttcgttcctacctttgtgtcctaacccaggtagtgaagaatggaatgaaactcattcatgtctctccgagcttcttagacactacatacaactgaaagttgaatatgatattgaagagctctacaaatgtttttgccttttgaaaagattctcgtcagcatcagagttttttctggatctacatgatagcatccttcctttcctacaggattctatcagccagcattacggtgggacactgcaattctagctccttgctcaagttgtagccattctattttgctagaaaggaagaagcaatgccgtgaatgtgcggagagacgtgttatgacaatctgcgcctccaagcagctactcaaatcccgtgctggcagattccttggacgcgtttataactttattataactaattgatgccaatgctggaagttttattgatatattcattgcatctatggatcaatagatgccatgtggttcgatatatcattcgtggagcaatggtttgaagggacctttgctgtgctttgatgttcccaggcgaatttcatgtttgcttcataacccatatgaatttcatgttatctttgtgttgctaccaaaaaggttcctggtttgaagttctttgcgtcaaattttcacctatgatctgaagtaccatccgtgcatcctagttattggaagctttacatgagctaatatatgcattatctagtgccatggacctctggtagaaatgcaaccagtctttgaaagcaaatcacaatcagcataaaataaag

SEQ ID NO: 48936 - DNA, 3873 bp, Zea Mays
cgcacacaagctgaaccaaacaggggcgcgtctctcctccggtaccggccggcatgagctccacctcatcgggccgccgcgccccctcatcttcggcggcggtcgcctcgtcgccgggacagaagcgggcgagggatgaggccagcagcgggtccccatccgaccccgacgccgccaaaaaccctcgccgcgcttttgcctcctccccgttcgccgacttcggcacctacatggctgcgaagaacagcaagctcgctgcgcagttcgatgccgacgccaacacctcaggcacggacgccggcggtctattcgatggcgtctccatcttcgtggacggcttcacagtcccttctagccaggagctgaaagagattatgctgaacaatggaggccggtttgtcaactacttttccaggcacacggtaacacacattgtttgcagcaacctgcctgatagcaaaatgaagaatctgagagcattcagcagaggacttcctgttgttaagccagcatgggtggtggattccctggcagagaaccggctcctcaactgtgctccttatcaaataaatcagaatagttcttcaagccgaaagcagatgaagctttcttctttcttttctgagaaacaaaatgaaatatgccacaagggggaacaaaacaaccaaaataaggatattgagttccaaccttcatctgctcaggagggatcacagtatcaaagtggggattgtgaaagtgaagcttcaatggatactttggagctatcaaaggactcgttgtcctcagatgaacagaaggcatcagcatttgaagaaagagagagcggagatttcacggttgatgagggtgaatacgattatgaaactgcctgttcggagagccgtaatgacacagatggtaaccttggtgtgcctcaatcccctaatgcaaagtcaaggtgttcaaacttattcagtacaagatctacaggcagtcatttgtccttgtcattggagaaaagtgcagctaaaccttctggccgaccacattcaaccctaacagatccaaattttgttgagaactatttcaagtactctcgactgcacttcattgggacatggagaaaccggtatcggaagcgcttctcaaatttgctagaagctaaaggcattaagttgagtgctgatcattcagggaagaagaaaacaatcattcatattgatatggattgctttttcgtgtctgtggtcatcagaaatatgccagagctgcatgataaaccagtagcagtttgccattcggacaatcctaaaggaacagcagaaatatcgtctgcaaactatcctgctcgaaactatgggataaaggctggcatgtttgttagagatgctaaagctcggtgccctcacctaatgatcgttccttataactttgatgcatatgaggaggttgctgatcagttctatggtactttgcacaaacattgcagtaaggttcaggctttgagttgtgatgaagcttttttggatatgactgaatgcttacatgacaatcctgaggaagtaacacagagaataagaagtgagatttttcatgcaacaaagtgtactgctagtgcaggaattgctgaaaacatgctcctagctcgattggctactagatctgcaaagccgaatggacaatgctttattccatccgaaaaggctgatgattatctgagtagtctctctatcaaagcacttccaggcattggtcatacagtttcatctaaactgaaaagcaaagaaattgaatattgtagtcaacttcgcaatgtttcaaaggatgccctccacaaggatttcggaaaaaagactggtgatcttttatggaattattgtagaggaattgatcattcaattgttggatctgttcaggaaacaaaatctgtgggtgccgaaattaactggggagtcagatttaatgacaacaaagatgccgaacattttcttaacaacctttgcaaggaggtttctctacgcttgcagggttgtggagttcagggacgtactattacccttaaggtgaaaacaagaagggaaggtgctggggaaccaataaaatatatgggatgtggtgactgtgaaaccacgagtcgttctatgacggtgcaactgacagttttgtcactctccagagaattgcaaaacaattattttcagctcttcatcttgatgtgaaggaagttcgtggaattggactgtcactatcaaagcttgagcatgcagatttgggccggggagcatcgcaaggacatatgcttgaatcgtggcttgcttcaccagccgccaagctcaagaaacagcagagtgagatactggggaatgttaatgttgcagggaccagcggactgaaggatttgagatctggaccatcacatacagcagaagcgaaccttagaaatgataggtctactgtatttcacaatgtcgagctgcctccgttgtcccaacttgatttggaggtcctgaagaaccttcccccagagataatgtctgaaatgaatgaaatgtacaagggagaattacaaagtcttgtggacaccctcaatagtgacaagggcaaggaaaatagttcaaaatctcttgctttgcctgcagttattcgtaagtctgtacctgccgatgcaaagcttcaaggatacagagaccacagagactccatgcatttggaggaggaacatactaagggaaaatctgacaaacaactatcagaagctaaaccagccaataatgcttcatgctcaagagttagtgcatcaattgagaaaacaacaaaaagtgttacacaacttgatttgatgcctgattcgctaagccaggcagatctaacagttctgcaggaattacctgaggatgtgaaggctgatttgtttagtgcacttccactgcatagatcaggagatcctgcatgcagcacttccaatgtatctgaaagtaaatcacctaatgtggttagagctgaaaatagatcttctaatgatggtggaactgatgatctgaaaaccccaagagcaacacacagattccagctgtcaacgaccattgtcttctgttctagagcctgtagcttcgttcctacctttgtgtcctaacccaggtagtgaagaatggaatgaaactcattcatgtctctccgagcttcttagacactacatacaactgaaagttgaatatgatattgaagagctctacaaatgtttttgccttttgaaaagattctcgtcagcatcagagttttttctggatctacatgatagcatccttcctttcctacaggattctatcagccagcattacggtgggacactgcaattctagctccttgctcaagttgtagccattctattttgctagaaaggaagaagcaatgccgtgaatgtgcggagagacgtgttatgacaatctgcgcctccaagcagctactcaaatcccgtgctggcagattccttggacgcgtttataactttattataactaattgatgccaatgctggaagttttattgatatattcattgcatctatggatcaatagatgccatgtggttcgatatatcattcgtggagcaatggtttgaagggacctttgctgtgctttgatgttcccaggcgaatttcatgtttgcttcataacccatatgaatttcatgttatctttgtgttgctaccaaaaaggttcctggtttgaagttctttgcgtcaaattttcacctatgatctgaagtaccatccgtgcatcctagttattggaagctttacatgagctaatatatgcattatctagtgccatggacctctggtagaaatgcaaccagtctttgaaagcaaatcacaatcagcataaaataaag

SEQ ID NO: 48937 - DNA, 3884 bp, Zea Mays
cgcacacaagctgaaccaaacaggggcgcgtctctcctccggtaccggccggcatgagctccacctcatcgggccgccgcgccccctcatcttcggcggcggtcgcctcgtcgccgggacagaagcgggcgagggatgaggccagcagcgggtccccatccgaccccgacgccgccaaaaaccctcgccgcgcttttgcctcctccccgttcgccgacttcggcacctacatggctgcgaagaacagcaagctcgctgcgcagttcgatgccgacgccaacacctcaggcacggacgccggcggtctattcgatggcgtctccatcttcgtggacggcttcacagtcccttctagccaggagctgaaagagattatgctgaacaatggaggccggtttgtcaactacttttccaggcacacggtaacacacattgtttgcagcaacctgcctgatagcaaaatgaagaatctgagagcattcagcagaggacttcctgttgttaagccagcatgggtggtggattccctggcagagaaccggctcctcaactgtgctccttatcaaataaatcagaatagttcttcaagccgaaagcagatgaagctttcttctttcttttctgagaaacaaaatgaaatatgccacaagggggaacaaaacaaccaaaataaggatattgagttccaaccttcatctgctcaggagggatcacagtatcaaagtggggattgtgaaagtgaagcttcaatggatactttggagctatcaaaggactcgttgtcctcagatgaacagaaggcatcagcatttgaagaaagagagagcggagatttcacggttgatgagggtgaatacgattatgaaactgcctgttcggagagccgtaatgacacagatggtaaccttggtgtgcctcaatcccctaatgcaaagtcaaggtgttcaaacttattcagtacaagatctacaggcagtcatttgtccttgtcattggagaaaagtgcagctaaaccttctggccgaccacattcaaccctaacagatccaaattttgttgagaactatttcaagtactctcgactgcacttcattgggacatggagaaaccggtatcggaagcgcttctcaaatttgctagaagctaaaggcattaagttgagtgctgatcattcagggaagaagaaaacaatcattcatattgatatggattgctttttcgtgtctgtggtcatcagaaatatgccagagctgcatgataaaccagtagcagtttgccattcggacaatcctaaaggaacagcagaaatatcgtctgcaaactatcctgctcgaaactatgggataaaggctggcatgtttgttagagatgctaaagctcggtgccctcacctaatgatcgttccttataactttgatgcatatgaggaggttgctgatcagttctatggtactttgcacaaacattgcagtaaggttcaggctttgagttgtgatgaagcttttttggatatgactgaatgcttacatgacaatcctgaggaagtaacacagagaataagaagtgagatttttcatgcaacaaagtgtactgctagtgcaggaattgctgaaaacatgctcctagctcgattggctactagatctgcaaagccgaatggacaatgctttattccatccgaaaaggaaacaaaatctgtgggtgccgaaattaactggggagtcagatttaatgacaacaaagatgccgaacattttcttaacaacctttgcaaggaggtttctctacgcttgcagggttgtggagttcagggacgtactattacccttaaggtgaaaacaagaagggaaggtgctggggaaccaataaaatatatgggatgtggtgactgtgaaaccacgagtcgttctatgacgattgcaggtgcaactgacagttttgtcactctccagagaattgcaaaacaattattttcagctcttcatcttgatgtgaaggaagttcgtggaattggactgtcactatcaaagcttgagcatgcagatttgggccggggagcatcgcaaggacatatgcttgaatcgtggcttgcttcaccagccgccaagctcaagaaacagcagagtgagatactggggaatgttaatgttgcagggaggtggaaggggttctttataaaattgctgctgctgttagatacgagatggacgtaccggatttaaaatgtgcatcggactgaaggatttgagatctggaccatcacatacagcagaagcgaaccttagaaatgataggtctactgtatttcacaatgtcgagctgcctccgttgtcccaacttgatttggaggtcctgaagaaccttcccccagagataatgtctgaaatgaatgaaatgtacaagggagaattacaaagtcttgtggacaccctcaatagtgacaagggcaaggaaaatagttcaaaatctcttgctttgcctgcagttattcgtaagtctgtacctgccgatgcaaagcttcaaggatacagagaccacagagactccatgcatttggaggaggaacatactaaggtgagctgtgtcactggaaataaagtggcgctggaactttttaaacaaagtgcaagcacgtgatttagttgctgtcacctcctcatcttgatatttggaagttggaacctgtttcacactattctaattttacctttacacccgtagggaaaatctgacaaacaactatcagaagctaaaccagccaataatgcttcatgctcaagagttagtgcatcaattgagaaaacaacaaaaagtgttacacaacttgatttgatgcctgattcgctaagccaggcagatctaacagttctgcaggaattacctgaggatgtgaaggctgatttgtttagtgcacttccactgcatagatcaggagatcctgcatgcagcacttccaatgtatctgaaagtaaatcacctaatgtggttagagctgaaaatagatcttctaatgatggtggaactgatgatctgaaaaccccaagagcaacacacagattccagctgtcaacgaccattgtcttctgttctagagcctgtagcttcgttcctacctttgtgtcctaacccaggtagtgaagaatggaatgaaactcattcatgtctctccgagcttcttagacactacatacaactgaaagttgaatatgatattgaagagctctacaaatgtttttgccttttgaaaagattctcgtcagcatcagagttttttctggatctacatgatagcatccttcctttcctacaggattctatcagccagcattacggtgggacactgcaattctagctccttgctcaagttgtagccattctattttgctagaaaggaagaagcaatgccgtgaatgtgcggagagacgtgttatgacaatctgcgcctccaagcagctactcaaatcccgtgctggcagattccttggacgcgtttataactttattataactaattgatgccaatgctggaagttttattgatatattcattgcatctatggatcaatagatgccatgtggttcgatatatcattcgtggagcaatggtttgaagggacctttgctgtgctttgatgttcccaggcgaatttcatgtttgcttcataacccatatgaatttcatgttatctttgtgttgctaccaaaaaggttcctggtttgaagttctttgcgtcaaattttcacctatgatctgaagtaccatccgtgcatcctagttattggaagctttacatgagctaatatatgcattatctagtgccatggacctctggtagaaatgcaaccagtctttgaaagcaaatcacaatcagcataaaataaag

SEQ ID NO: 48938 - DNA, 4222 bp, Zea Mays
caagctgaaccaaacaggggcgcgtctctcctccggtaccggccggcatgagctccacctcatcgggccgccgcgccccctcatcttcggcggcggtcgcctcgtcgccgggacagaagcgggcgagggatgaggccagcagcgggtccccatccgaccccgacgccgccaaaaaccctcgccgcgcttttgcctcctccccgttcgccgacttcggcacctacatggctgcgaagaacagcaagctcgctgcgcagttcgatgccgacgccaacacctcaggcacggacgccggcggtctattcgatggcgtctccatcttcgtggacggcttcacagtcccttctagccaggagctgaaagagattatgctgaacaatggaggccggtttgtcaactacttttccaggcacacggtaacacacattgtttgcagcaacctgcctgatagcaaaatgaagaatctgagagcattcagcagaggacttcctgttgttaagccagcatgggtggtggattccctggcagagaaccggctcctcaactgtgctccttatcaaataaatcagaatagttcttcaagccgaaagcagatgaagctttcttctttcttttctgagaaacaaaatgaaatatgccacaagggggaacaaaacaaccaaaataaggatattgagttccaaccttcatctgctcaggagggatcacagtatcaaagtggggattgtgaaagtgaagcttcaatggatactttggagctatcaaaggactcgttgtcctcagatgaacagaaggcatcagcatttgaagaaagagagagcggagatttcacggttgatgagggtgaatacgattatgaaactgcctgttcggagagccgtaatgacacagatggtaaccttggtgtgcctcaatcccctaatgcaaagtcaaggtgttcaaacttattcagtacaagatctacaggcagtcatttgtccttgtcattggagaaaagtgcagctaaaccttctggccgaccacattcaaccctaacagatccaaattttgttgagaactatttcaagtactctcgactgcacttcattgggacatggagaaaccggtatcggaagcgcttctcaaatttgctagaagctaaaggcattaagttgagtgctgatcattcagggaagaagaaaacaatcattcatattgatatggattgctttttcgtgtctgtggtcatcagaaatatgccagagctgcatgataaaccagtagcagtttgccattcggacaatcctaaaggaacagcagaaatatcgtctgcaaactatcctgctcgaaactatgggataaaggctggcatgtttgttagagatgctaaagctcggtgccctcacctaatgatcgttccttataactttgatgcatatgaggaggttgctgatcagttctatggtactttgcacaaacattgcagtaaggttcaggctttgagttgtgatgaagcttttttggatatgactgaatgcttacatgacaatcctgaggaagtaacacagagaataagaagtgagatttttcatgcaacaaagtgtactgctagtgcaggaattgctgaaaacatgctcctagctcgattggctactagatctgcaaagccgaatggacaatgctttattccatccgaaaagaagatggcccaatgtttcttagagcgatcaacactgagggaatatccaagaccaaggagtatattgcagagaagatgttagcagtaattgatgaggttggggcacaaaatgttgtgcaagtgatcactgacaatgctgccaattgcagagccgctgccgtcataattgagcagaagcaccctcatattttttggaccccttgtgttgtgcatactttgaaatcttgctttgaagaacatatgtgctgctagggaaattgaagatgtgctttatacttaattccagtggattagcgaagtcattggagatgccagcatgattaaaaattccatcatgaatcactccatgaggctgatgattatctgagtagtctctctatcaaagcacttccaggcattggtcatacagtttcatctaaactgaaaagcaaagaaattgaatattgtagtcaacttcgcaatgtttcaaaggatgccctccacaaggatttcggaaaaaagactggtgatcttttatggaattattgtagaggaattgatcattcaattgttggatctgttcaggaaacaaaatctgtgggtgccgaaattaactggggagtcagatttaatgacaacaaagatgccgaacattttcttaacaacctttgcaaggaggtttctctacgcttgcagggttgtggagttcagggacgtactattacccttaaggtgaaaacaagaagggaaggtgctggggaaccaataaaatatatgggatgtggtgactgtgaaaccacgagtcgttctatgacgattgcaggtgcaactgacagttttgtcactctccagagaattgcaaaacaattattttcagctcttcatcttgatgtgaaggaagttcgtggaattggactgtcactatcaaagcttgagcatgcagatttgggccggggagcatcgcaaggacatatgcttgaatcgtggcttgcttcaccagccgccaagctcaagaaacagcagagtgagatactggggaatgttaatgttgcagggaccagcggactgaaggatttgagatctggaccatcacatacagcagaagcgaaccttagaaatgataggtctactgtatttcacaatgtcgagctgcctccgttgtcccaacttgatttggaggtcctgaagaaccttcccccagagataatgtctgaaatgaatgaaatgtacaagggagaattacaaagtcttgtggacaccctcaatagtgacaagggcaaggaaaatagttcaaaatctcttgctttgcctgcagttattcgtaagtctgtacctgccgatgcaaagcttcaaggatacagagaccacagagactccatgcatttggaggaggaacatactaagggaaaatctgacaaacaactatcagaagctaaaccagccaataatgcttcatgctcaagattctgcaggaattacctgaggatgtgaaggctgatttgtttagtgcacttccactgcatagatcaggagatcctgcatgcagcacttccaatgtatctgaaagtaaatcacctaatgtggttagagctgaaaatagatcttctaatgatggtggaactgatgatctgaaaaccccaaggtcttttctcccaccaggaagttctcaaaaatggatcgaacagtttagagttagcagttgcctgattttgaacgtaattgcagagcaacacacagattccagctgtcaacgaccattgtcttctgttctagagcctgtagcttcgttcctacctttgtgtcctaacccaggtagtgaagaatggaatgaaactcattcatgtctctccgagcttcttagacactacatacaactgaaagttgaatatgatattgaagagctctacaaatgtttttgccttttgaaaagattctcgtcagcatcagagttttttctggatctacatgatagcatccttcctttcctacaggattctatcagccagcattacggtgggacactgcaattctagctccttgctcaagttgtagccattctattttgctagaaaggaagaagcaatgccgtgaatgtgcggagagacgtgttatgacaatctgcgcctccaagcagctactcaaatcccgtgctggcagattccttggacgcgtttataactttattataactaattgatgccaatgctggaagttttattgatatattcattgcatctatggatcaatagatgccatgtggttcgatatatcattcgtggagcaatggtttgaagggacctttgctgtgctttgatgttcccaggcgaatttcatgtttgcttcataacccatatgaatttcatgttatctttgtgttgctaccaaaaaggttcctggtttgaagttctttgcgtcaaattttcacctatgatctgaagtaccatccgtgcatcctagttattggaagctttacatgagctaatatatgcattatctagtgccatggacctctggtagaaatgcaaccagtctttgaaagcaaatcacaatcagcataaaataaag

SEQ ID NO: 48939 - DNA, 4602 bp, Zea Mays
caagctgaaccaaacaggggcgcgtctctcctccggtaccggccggcatgagctccacctcatcgggccgccgcgccccctcatcttcggcggcggtcgcctcgtcgccgggacagaagcgggcgagggatgaggccagcagcgggtccccatccgaccccgacgccgccaaaaaccctcgccgcgcttttgcctcctccccgttcgccgacttcggcacctacatggctgcgaagaacagcaagctcgctgcgcagttcgatgccgacgccaacacctcaggcacggacgccggcggtctattcgatggcgtctccatcttcgtggacggcttcacagtcccttctagccaggagctgaaagagattatgctgaacaatggaggccggtttgtcaactacttttccaggcacacggtaacacacattgtttgcagcaacctgcctgatagcaaaatgaagaatctgagagcattcagcagaggacttcctgttgttaagccagcatgggtggtggattccctggcagagaaccggctcctcaactgtgctccttatcaaataaatcagaatagttcttcaagccgaaagcagatgaagctttcttctttcttttctgagaaacaaaatgaaatatgccacaagggggaacaaaacaaccaaaataaggatattgagttccaaccttcatctgctcaggagggatcacagtatcaaagtggggattgtgaaagtgaagcttcaatggatactttggagctatcaaaggactcgttgtcctcagatgaacagaaggcatcagcatttgaagaaagagagagcggagatttcacggttgatgagggtgaatacgattatgaaactgcctgttcggagagccgtaatgacacagatggtaaccttggtgtgcctcaatcccctaatgcaaagtcaaggtgttcaaacttattcagtacaagatctacaggcagtcatttgtccttgtcattggagaaaagtgcagctaaaccttctggccgaccacattcaaccctaacagatccaaattttgttgagaactatttcaagtactctcgactgcacttcattgggacatggagaaaccggtatcggaagcgcttctcaaatttgctagaagctaaaggcattaagttgagtgctgatcattcagggaagaagaaaacaatcattcatattgatatggattgctttttcgtgtctgtggtcatcagaaatatgccagagctgcatgataaaccagtagcagtttgccattcggacaatcctaaaggaacagcagaaatatcgtctgcaaactatcctgctcgaaactatgggataaaggctggcatgtttgttagagatgctaaagctcggtgccctcacctaatgatcgttccttataactttgatgcatatgaggaggttgctgatcagttctatggtactttgcacaaacattgcagtaaggttcaggctttgagttgtgatgaagcttttttggatatgactgaatgcttacatgacaatcctgaggaagtaacacagagaataagaagtgagatttttcatgcaacaaagtgtactgctagtgcaggaattgctgaaaacatgctcctagctcgattggctactagatctgcaaagccgaatggacaatgctttattccatccgaaaagaagatggcccaatgtttcttagagcgatcaacactgagggaatatccaagaccaaggagtatattgcagagaagatgttagcagtaattgatgaggttggggcacaaaatgttgtgcaagtgatcactgacaatgctgccaattgcagagccgctgccgtcataattgagcagaagcaccctcatattttttggaccccttgtgttgtgcatactttgaaatcttgctttgaagaacatatgtgctgctagggaaattgaagatgtgctttatacttaattccagtggattagcgaagtcattggagatgccagcatgattaaaaattccatcatgaatcactccatgaggaattgtgaagagaatacactgcctgcaacattcgtctgttcccaacagacctaaaaagaagcttggaggttcggatatcacatctatgttgttcaatatctctatgaaaatattggctgttgaatcagttattttttctgggagttgatttaatagttctactcattcccacaagcttgttgggtattgaattgagttactaatttgtttgtctttccttgaattcctacctgattaaagaaaatcactagtggtgccactccctctaaaaggatgtactttgtactacatgctgctgatgattatctgagtagtctctctatcaaagcacttccaggcattggtcatacagtttcatctaaactgaaaagcaaagaaattgaatattgtagtcaacttcgcaatgtttcaaaggatgccctccacaaggatttcggaaaaaagactggtgatcttttatggaattattgtagaggaattgatcattcaattgttggatctgttcaggaaacaaaatctgtgggtgccgaaattaactggggagtcagatttaatgacaacaaagatgccgaacattttcttaacaacctttgcaaggaggtttctctacgcttgcagggttgtggagttcagggacgtactattacccttaaggtgaaaacaagaagggaaggtgctggggaaccaataaaatatatgggatgtggtgactgtgaaaccacgagtcgttctatgacgattgcaggtgcaactgacagttttgtcactctccagagaattgcaaaacaattattttcagctcttcatcttgatgtgaaggaagttcgtggaattggactgtcactatcaaagcttgagcatgcagatttgggccggggagcatcgcaaggacatatgcttgaatcgtggcttgcttcaccagccgccaagctcaagaaacagcagagtgagatactggggaatgttaatgttgcagggaccagcggactgaaggatttgagatctggaccatcacatacagcagaagcgaaccttagaaatgataggtctactgtatttcacaatgtcgagctgcctccgttgtcccaacttgatttggaggtcctgaagaaccttcccccagagataatgtctgaaatgaatgaaatgtacaagggagaattacaaagtcttgtggacaccctcaatagtgacaagggcaaggaaaatagttcaaaatctcttgctttgcctgcagttattcgtaagtctgtacctgccgatgcaaagcttcaaggatacagagaccacagagactccatgcatttggaggaggaacatactaagggaaaatctgacaaacaactatcagaagctaaaccagccaataatgcttcatgctcaagagttagtgcatcaattgagaaaacaacaaaaagtgttacacaacttgatttgatgcctgattcgctaagccaggcagatctaacagttctgcaggaattacctgaggatgtgaaggctgatttgtttagtgcacttccactgcatagatcaggagatcctgcatgcagcacttccaatgtatctgaaagtaaatcacctaatgtggttagagctgaaaatagatcttctaatgatggtggaactgatgatctgaaaaccccaaggtcttttctcccaccaggaagttctcaaaaatggatcgaacagtttagagttagcagttgcctgattttgaacgtaattgcagagcaacacacagattccagctgtcaacgaccattgtcttctgttctagagcctgtagcttcgttcctacctttgtgtcctaacccaggtagtgaagaatggaatgaaactcattcatgtctctccgagcttcttagacactacatacaactgaaagttgaatatgatattgaagagctctacaaatgtttttgccttttgaaaagattctcgtcagcatcagagttttttctggatctacatgatagcatccttcctttcctacaggattctatcagccagcattacggtgggacactgcaattctagctccttgctcaagttgtagccattctattttgctagaaaggaagaagcaatgccgtgaatgtgcggagagacgtgttatgacaatctgcgcctccaagcagctactcaaatcccgtgctggcagattccttggacgcgtttataactttattataactaattgatgccaatgctggaagttttattgatatattcattgcatctatggatcaatagatgccatgtggttcgatatatcattcgtggagcaatggtttgaagggacctttgctgtgctttgatgttcccaggcgaatttcatgtttgcttcataacccatatgaatttcatgttatctttgtgttgctaccaaaaaggttcctggtttgaagttctttgcgtcaaattttcacctatgatctgaagtaccatccgtgcatcctagttattggaagctttacatgagctaatatatgcattatctagtgccatggacctctggtagaaatgcaaccagtctttgaaagcaaatcacaatcagcataaaataaag

SEQ ID NO: 48940 - DNA, 4427 bp, Zea Mays
caagctgaaccaaacaggggcgcgtctctcctccggtaccggccggcatgagctccacctcatcgggccgccgcgccccctcatcttcggcggcggtcgcctcgtcgccgggacagaagcgggcgagggatgaggccagcagcgggtccccatccgaccccgacgccgccaaaaaccctcgccgcgcttttgcctcctccccgttcgccgacttcggcacctacatggctgcgaagaacagcaagctcgctgcgcagttcgatgccgacgccaacacctcaggcacggacgccggcggtctattcgatggcgtctccatcttcgtggacggcttcacagtcccttctagccaggagctgaaagagattatgctgaacaatggaggccggtttgtcaactacttttccaggcacacggtaacacacattgtttgcagcaacctgcctgatagcaaaatgaagaatctgagagcattcagcagaggacttcctgttgttaagccagcatgggtggtggattccctggcagagaaccggctcctcaactgtgctccttatcaaataaatcagaatagttcttcaagccgaaagcagatgaagctttcttctttcttttctgagaaacaaaatgaaatatgccacaagggggaacaaaacaaccaaaataaggatattgagttccaaccttcatctgctcaggagggatcacagtatcaaagtggggattgtgaaagtgaagcttcaatggatactttggagctatcaaaggactcgttgtcctcagatgaacagaaggcatcagcatttgaagaaagagagagcggagatttcacggttgatgagggtgaatacgattatgaaactgcctgttcggagagccgtaatgacacagatggtaaccttggtgtgcctcaatcccctaatgcaaagtcaaggtgttcaaacttattcagtacaagatctacaggcagtcatttgtccttgtcattggagaaaagtgcagctaaaccttctggccgaccacattcaaccctaacagatccaaattttgttgagaactatttcaagtactctcgactgcacttcattgggacatggagaaaccggtatcggaagcgcttctcaaatttgctagaagctaaaggcattaagttgagtgctgatcattcagggaagaagaaaacaatcattcatattgatatggattgctttttcgtgtctgtggtcatcagaaatatgccagagctgcatgataaaccagtagcagtttgccattcggacaatcctaaaggaacagcagaaatatcgtctgcaaactatcctgctcgaaactatgggataaaggctggcatgtttgttagagatgctaaagctcggtgccctcacctaatgatcgttccttataactttgatgcatatgaggaggttgctgatcagttctatggtactttgcacaaacattgcagtaaggttcaggctttgagttgtgatgaagcttttttggatatgactgaatgcttacatgacaatcctgaggaagtaacacagagaataagaagtgagatttttcatgcaacaaagtgtactgctagtgcaggaattgctgaaaacatgctcctagctcgattggctactagatctgcaaagccgaatggacaatgctttattccatccgaaaagatggcccaatgtttcttagagcgatcaacactgagggaatatccaagaccaaggagtatattgcagagaagatgttagcagtaattgatgaggttggggcacaaaatgttgtgcaagtgatcactgacaatgctgccaattgcagagccgctgccgtcataattgagcagaagcaccctcatattttttggaccccttgtgttgtgcatactttgaaatcttgctttgaagaacatatgtgctgctagggaaattgaagatgtgctttatacttaattccagtggattagcgaagtcattggagatgccagcatgattaaaaattccatcatgaatcactccatgaggaattgtgaagagaatacactgcctgcaacattcgtctgttcccaacagacctaaaaagaagcttggagaaaatcactagtggtgccactccctctaaaaggatgtactttgtactacatgctgctgatgattatctgagtagtctctctatcaaagcacttccaggcattggtcatacagtttcatctaaactgaaaagcaaagaaattgaatattgtagtcaacttcgcaatgtttcaaaggatgccctccacaaggatttcggaaaaaagactggtgatcttttatggaattattgtagaggaattgatcattcaattgttggatctgttcaggaaacaaaatctgtgggtgccgaaattaactggggagtcagatttaatgacaacaaagatgccgaacattttcttaacaacctttgcaaggaggtttctctacgcttgcagggttgtggagttcagggacgtactattacccttaaggtgaaaacaagaagggaaggtgctggggaaccaataaaatatatgggatgtggtgactgtgaaaccacgagtcgttctatgacgattgcaggtgcaactgacagttttgtcactctccagagaattgcaaaacaattattttcagctcttcatcttgatgtgaaggaagttcgtggaattggactgtcactatcaaagcttgagcatgcagatttgggccggggagcatcgcaaggacatatgcttgaatcgtggcttgcttcaccagccgccaagctcaagaaacagcagagtgagatactggggaatgttaatgttgcagggaccagcggactgaaggatttgagatctggaccatcacatacagcagaagcgaaccttagaaatgataggtctactgtatttcacaatgtcgagctgcctccgttgtcccaacttgatttggaggtcctgaagaaccttcccccagagataatgtctgaaatgaatgaaatgtacaagggagaattacaaagtcttgtggacaccctcaatagtgacaagggcaaggaaaatagttcaaaatctcttgctttgcctgcagttattcgtaagtctgtacctgccgatgcaaagcttcaaggatacagagaccacagagactccatgcatttggaggaggaacatactaagggaaaatctgacaaacaactatcagaagctaaaccagccaataatgcttcatgctcaagagttagtgcatcaattgagaaaacaacaaaaagtgttacacaacttgatttgatgcctgattcgctaagccaggcagatctaacagttctgcaggaattacctgaggatgtgaaggctgatttgtttagtgcacttccactgcatagatcaggagatcctgcatgcagcacttccaatgtatctgaaagtaaatcacctaatgtggttagagctgaaaatagatcttctaatgatggtggaactgatgatctgaaaaccccaaggtcttttctcccaccaggaagttctcaaaaatggatcgaacagtttagagttagcagttgcctgattttgaacgtaattgcagagcaacacacagattccagctgtcaacgaccattgtcttctgttctagagcctgtagcttcgttcctacctttgtgtcctaacccaggtagtgaagaatggaatgaaactcattcatgtctctccgagcttcttagacactacatacaactgaaagttgaatatgatattgaagagctctacaaatgtttttgccttttgaaaagattctcgtcagcatcagagttttttctggatctacatgatagcatccttcctttcctacaggattctatcagccagcattacggtgggacactgcaattctagctccttgctcaagttgtagccattctattttgctagaaaggaagaagcaatgccgtgaatgtgcggagagacgtgttatgacaatctgcgcctccaagcagctactcaaatcccgtgctggcagattccttggacgcgtttataactttattataactaattgatgccaatgctggaagttttattgatatattcattgcatctatggatcaatagatgccatgtggttcgatatatcattcgtggagcaatggtttgaagggacctttgctgtgctttgatgttcccaggcgaatttcatgtttgcttcataacccatatgaatttcatgttatctttgtgttgctaccaaaaaggttcctggtttgaagttctttgcgtcaaattttcacctatgatctgaagtaccatccgtgcatcctagttattggaagctttacatgagctaatatatgcattatctagtgccatggacctctggtagaaatgcaaccagtctttgaaagcaaatcacaatcagcataaaataaag

SEQ ID NO: 48941 - DNA, 2076 bp, Zea Mays
gaaccaaacaggggcgcgtctctcctccggtaccggccggcatgagctccacctcatcgggccgccgcgccccctcatcttcggcggcggtcgcctcgtcgccgggacagaagcgggcgagggatgaggccagcagcgggtccccatccgaccccgacgccgccaaaaaccctcgccgcgcttttgcctcctccccgttcgccgacttcggcacctacatggctgcgaagaacagcaagctcgctgcgcagttcgatgccgacgccaacacctcaggcacggacgccggcggtctattcgatggcgtctccatcttcgtggacggcttcacagtcccttctagccaggagctgaaagagattatgctgaacaatggaggccggtttgtcaactacttttccaggcacacggtaacacacattgtttgcagcaacctgcctgatagcaaaatgaagaatctgagagcattcagcagaggacttcctgttgttaagccagcatgggtggtggattccctggcagagaaccggctcctcaactaatagttcttcaagccgaaagcagatgaagctttcttctttcttttctgagaaacaaaatgaaatatgccacaagggggaacaaaacaaccaaaataaggatattgagttccaaccttcatctgctcaggagggatcacagtatcaaagtggggattgtgaaagtgaagcttcaatggatactttggagctatcaaaggactcgttgtcctcagatgaacagaaggcatcagcatttgaagaaagagagagcggagatttcacggttgatgagggtgaatacgattatgaaactgcctgttcggagagccgtaatgacacagatggtaaccttggtgtgcctcaatcccctaatgcaaagtcaaggtgttcaaacttattcagtacaagatctacaggcagtcatttgtccttgtcattggagaaaagtgcagctaaaccttctggccgaccacattcaaccctaacagatccaaattttgttgagaactatttcaagtactctcgactgcacttcattgggacatggagaaaccggtatcggaagcgcttctcaaatttgctagaagctaaaggcattaagttgagtgctgatcattcagggaagaagaaaacaatcattcatattgatatggattgctttttcgtgtctgtggtcatcagaaatatgccagagctgcatgataaaccagtagcagtttgccattcggacaatcctaaaggaacagcagaaatatcgtctgcaaactatcctgctcgaaactatgggataaaggctggcatgtttgttagagatgctaaagctcggtgccctcacctaatgatcgttccttataactttgatgcatatgaggaggttgctgatcagttctatggtactttgcacaaacattgcagtaaggttcaggctttgagttgtgatgaagcttttttggatatgactgaatgcttacatgacaatcctgaggaagtaacacagagaataagaagtgagatttttcatgcaacaaagtgtactgctagtgcaggaattgctgaaaacatgctcctagctcgattggctactagatctgcaaagccgaatggacaatgctttattccatccgaaaagaagatggcccaatgtttcttagagcgatcaacactgagggaatatccaagaccaaggagtatattgcagagaagatgttagcagtaattgatgaggttggggcacaaaatgttgtgcaagtgatcactgacaatgctgccaattgcagagccgctgccgtcataattgagcagaagcaccctcatattttttggaccccttgtgttgtgcatactttgaaatcttgctttgaagaacatatgtgctgctagggaaattgaagatgtgctttatacttaattccagtggattagcgaagtcattggagatgccagcatgattaaaaattccatcatgaatcactccatgaggttggctatgttcaatgagcaaagcaacctgaaattccttgcaattgctgacacaagatttgcctctgctattgtg

SEQ ID NO: 48942 - DNA, 4251 bp, Zea Mays
cgcgtctctcctccggtaccggccggcatgagctccacctcatcgggccgccgcgccccctcatcttcggcggcggtcgcctcgtcgccgggacagaagcgggcgagggatgaggccagcagcgggtccccatccgaccccgacgccgccaaaaaccctcgccgcgcttttgcctcctccccgttcgccgacttcggcacctacatggctgcgaagaacagcaagctcgctgcgcagttcgatgccgacgccaacacctcaggcacggacgccggcggtctattcgatggcgtctccatcttcgtggacggcttcacagtcccttctagccaggagctgaaagagattatgctgaacaatggaggccggtttgtcaactacttttccaggcacacggtaacacacattgtttgcagcaacctgcctgatagcaaaatgaagaatctgagagcattcagcagaggacttcctgttgttaagccagcatgggtggtggattccctggcagagaaccggctcctcaactgtgctccttatcaaataaatcagaatagttcttcaagccgaaagcagatgaagctttcttctttcttttctgagaaacaaaatgaaatatgccacaagggggaacaaaacaaccaaaataaggatattgagttccaaccttcatctgctcaggagggatcacagtatcaaagtggggattgtgaaagtgaagcttcaatggatactttggagctatcaaaggactcgttgtcctcagatgaacagaaggcatcagcatttgaagaaagagagagcggagatttcacggttgatgagggtgaatacgattatgaaactgcctgttcggagagccgtaatgacacagatggtaaccttggtgtgcctcaatcccctaatgcaaagtcaaggtgttcaaacttattcagtacaagatctacaggcagtcatttgtccttgtcattggagaaaagtgcagctaaaccttctggccgaccacattcaaccctaacagatccaaattttgttgagaactatttcaagtactctcgactgcacttcattgggacatggagaaaccggtatcggaagcgcttctcaaatttgctagaagctaaaggcattaagttgagtgctgatcattcagggaagaagaaaacaatcattcatattgatatggtaatcttgtagtgctatggattgctttttcgtgtctgtggtcatcagaaatatgccagagctgcatgataaaccagtagcagtttgccattcggacaatcctaaaggaacagcagaaatatcgtctgcaaactatcctgctcgaaactatgggataaaggctggcatgtttgttagagatgctaaagctcggtgccctcacctaatgatcgttccttataactttgatgcatatgaggaggttgctgatcagttctatggtactttgcacaaacattgcagtaaggttcaggctttgagttgtgatgaagcttttttggatatgactgaatgcttacatgacaatcctgaggaagtaacacagagaataagaagtgagatttttcatgcaacaaagtgtactgctagtgcaggaattgctgaaaacatgctcctagctcgattggctactagatctgcaaagccgaatggacaatgctttattccatccgaaaaggaattgtgaagagaatacactgcctgcaacattcgtctgttcccaacagacctaaaaagaagcttggaggttcggatatcacatctatgttgttcaatatctctatgaaaatattggctgttgaatcagttattttttctgggagttgatttaatagttctactcattcccacaagcttgttgggtattgaattgagttactaatttgtttgtctttccttgaattcctacctgattaaagaaaatcactagtggtgccactccctctaaaaggatgtactttgtactacatgctgctgatgattatctgagtagtctctctatcaaagcacttccaggcattggtcatacagtttcatctaaactgaaaagcaaagaaattgaatattgtagtcaacttcgcaatgtttcaaaggatgccctccacaaggatttcggaaaaaagactggtgatcttttatggaattattgtagaggaattgatcattcaattgttggatctgttcaggaaacaaaatctgtgggtgccgaaattaactggggagtcagatttaatgacaacaaagatgccgaacattttcttaacaacctttgcaaggaggtttctctacgcttgcagggttgtggagttcagggacgtactattacccttaaggtgaaaacaagaagggaaggtgctggggaaccaataaaatatatgggatgtggtgactgtgaaaccacgagtcgttctatgacgattgcaggtgcaactgacagttttgtcactctccagagaattgcaaaacaattattttcagctcttcatcttgatgtgaaggaagttcgtggaattggactgtcactatcaaagcttgagcatgcagatttgggccggggagcatcgcaaggacatatgcttgaatcgtggcttgcttcaccagccgccaagctcaagaaacagcagagtgagatactggggaatgttaatgttgcagggaccagcggactgaaggatttgagatctggaccatcacatacagcagaagcgaaccttagaaatgataggtctactgtatttcacaatgtcgagctgcctccgttgtcccaacttgatttggaggtcctgaagaaccttcccccagagataatgtctgaaatgaatgaaatgtacaagggagaattacaaagtcttgtggacaccctcaatagtgacaagggcaaggaaaatagttcaaaatctcttgctttgcctgcagttattcgtaagtctgtacctgccgatgcaaagcttcaaggatacagagaccacagagactccatgcatttggaggaggaacatactaagggaaaatctgacaaacaactatcagaagctaaaccagccaataatgcttcatgctcaagagttagtgcatcaattgagaaaacaacaaaaagtgttacacaacttgatttgatgcctgattcgctaagccaggcagatctaacagttctgcaggaattacctgaggatgtgaaggctgatttgtttagtgcacttccactgcatagatcaggagatcctgcatgcagcacttccaatgtatctgaaagtaaatcacctaatgtggttagagctgaaaatagatcttctaatgatggtggaactgatgatctgaaaaccccaaggtcttttctcccaccaggaagttctcaaaaatggatcgaacagtttagagttagcagttgcctgattttgaacgtaattgcagagcaacacacagattccagctgtcaacgaccattgtcttctgttctagagcctgtagcttcgttcctacctttgtgtcctaacccaggtagtgaagaatggaatgaaactcattcatgtctctccgagcttcttagacactacatacaactgaaagttgaatatgatattgaagagctctacaaatgtttttgccttttgaaaagattctcgtcagcatcagagttttttctggatctacatgatagcatccttcctttcctacaggattctatcagccagcattacggtgggacactgcaattctagctccttgctcaagttgtagccattctattttgctagaaaggaagaagcaatgccgtgaatgtgcggagagacgtgttatgacaatctgcgcctccaagcagctactcaaatcccgtgctggcagattccttggacgcgtttataactttattataactaattgatgccaatgctggaagttttattgatatattcattgcatctatggatcaatagatgccatgtggttcgatatatcattcgtggagcaatggtttgaagggacctttgctgtgctttgatgttcccaggcgaatttcatgtttgcttcataacccatatgaatttcatgttatctttgtgttgctaccaaaaaggttcctggtttgaagttctttgcgtcaaattttcacctatgatctgaagtaccatccgtgcatcctagttattggaagctttacatgagctaatatatgcattatctagtgccatggacctctggtagaaatgcaaccagtctttgaaagcaaatcacaatcagcataaaataaag

SEQ ID NO: 48943 - DNA, 3850 bp, Zea Mays
cgcgtctctcctccggtaccggccggcatgagctccacctcatcgggccgccgcgccccctcatcttcggcggcggtcgcctcgtcgccgggacagaagcgggcgagggatgaggccagcagcgggtccccatccgaccccgacgccgccaaaaaccctcgccgcgcttttgcctcctccccgttcgccgacttcggcacctacatggctgcgaagaacagcaagctcgctgcgcagttcgatgccgacgccaacacctcaggcacggacgccggcggtctattcgatggcgtctccatcttcgtggacggcttcacagtcccttctagccaggagctgaaagagattatgctgaacaatggaggccggtttgtcaactacttttccaggcacacggtaacacacattgtttgcagcaacctgcctgatagcaaaatgaagaatctgagagcattcagcagaggacttcctgttgttaagccagcatgggtggtggattccctggcagagaaccggctcctcaactaatagttcttcaagccgaaagcagatgaagctttcttctttcttttctgagaaacaaaatgaaatatgccacaagggggaacaaaacaaccaaaataaggatattgagttccaaccttcatctgctcaggagggatcacagtatcaaagtggggattgtgaaagtgaagcttcaatggatactttggagctatcaaaggactcgttgtcctcagatgaacagaaggcatcagcatttgaagaaagagagagcggagatttcacggttgatgagggtgaatacgattatgaaactgcctgttcggagagccgtaatgacacagatggtaaccttggtgtgcctcaatcccctaatgcaaagtcaaggtgttcaaacttattcagtacaagatctacaggcagtcatttgtccttgtcattggagaaaagtgcagctaaaccttctggccgaccacattcaaccctaacagatccaaattttgttgagaactatttcaagtactctcgactgcacttcattgggacatggagaaaccggtatcggaagcgcttctcaaatttgctagaagctaaaggcattaagttgagtgctgatcattcagggaagaagaaaacaatcattcatattgatatggtaatcttgtagtgctatggattgctttttcgtgtctgtggtcatcagaaatatgccagagctgcatgataaaccagtagcagtttgccattcggacaatcctaaaggaacagcagaaatatcgtctgcaaactatcctgctcgaaactatgggataaaggctggcatgtttgttagagatgctaaagctcggtgccctcacctaatgatcgttccttataactttgatgcatatgaggaggttgctgatcagttctatggtactttgcacaaacattgcagtaaggttcaggctttgagttgtgatgaagcttttttggatatgactgaatgcttacatgacaatcctgaggaagtaacacagagaataagaagtgagatttttcatgcaacaaagtgtactgctagtgcaggaattgctgaaaacatgctcctagctcgattggctactagatctgcaaagccgaatggacaatgctttattccatccgaaaaggctgatgattatctgagtagtctctctatcaaagcacttccaggcattggtcatacagtttcatctaaactgaaaagcaaagaaattgaatattgtagtcaacttcgcaatgtttcaaaggatgccctccacaaggatttcggaaaaaagactggtgatcttttatggaattattgtagaggaattgatcattcaattgttggatctgttcaggaaacaaaatctgtgggtgccgaaattaactggggagtcagatttaatgacaacaaagatgccgaacattttcttaacaacctttgcaaggaggtttctctacgcttgcagggttgtggagttcagggacgtactattacccttaaggtgaaaacaagaagggaaggtgctggggaaccaataaaatatatgggatgtggtgactgtgaaaccacgagtcgttctatgacgattgcaggtgcaactgacagttttgtcactctccagagaattgcaaaacaattattttcagctcttcatcttgatgtgaaggaagttcgtggaattggactgtcactatcaaagcttgagcatgcagatttgggccggggagcatcgcaaggacatatgcttgaatcgtggcttgcttcaccagccgccaagctcaagaaacagcagagtgagatactggggaatgttaatgttgcagggaccagcggactgaaggatttgagatctggaccatcacatacagcagaagcgaaccttagaaatgataggtctactgtatttcacaatgtcgagctgcctccgttgtcccaacttgatttggaggtcctgaagaaccttcccccagagataatgtctgaaatgaatgaaatgtacaagggagaattacaaagtcttgtggacaccctcaatagtgacaagggcaaggaaaatagttcaaaatctcttgctttgcctgcagttattcgtaagtctgtacctgccgatgcaaagcttcaaggatacagagaccacagagactccatgcatttggaggaggaacatactaagggaaaatctgacaaacaactatcagaagctaaaccagccaataatgcttcatgctcaagagttagtgcatcaattgagaaaacaacaaaaagtgttacacaacttgatttgatgcctgattcgctaagccaggcagatctaacagttctgcaggaattacctgaggatgtgaaggctgatttgtttagtgcacttccactgcatagatcaggagatcctgcatgcagcacttccaatgtatctgaaagtaaatcacctaatgtggttagagctgaaaatagatcttctaatgatggtggaactgatgatctgaaaaccccaagagcaacacacagattccagctgtcaacgaccattgtcttctgttctagagcctgtagcttcgttcctacctttgtgtcctaacccaggtagtgaagaatggaatgaaactcattcatgtctctccgagcttcttagacactacatacaactgaaagttgaatatgatattgaagagctctacaaatgtttttgccttttgaaaagattctcgtcagcatcagagttttttctggatctacatgatagcatccttcctttcctacaggattctatcagccagcattacggtgggacactgcaattctagctccttgctcaagttgtagccattctattttgctagaaaggaagaagcaatgccgtgaatgtgcggagagacgtgttatgacaatctgcgcctccaagcagctactcaaatcccgtgctggcagattccttggacgcgtttataactttattataactaattgatgccaatgctggaagttttattgatatattcattgcatctatggatcaatagatgccatgtggttcgatatatcattcgtggagcaatggtttgaagggacctttgctgtgctttgatgttcccaggcgaatttcatgtttgcttcataacccatatgaatttcatgttatctttgtgttgctaccaaaaaggttcctggtttgaagttctttgcgtcaaattttcacctatgatctgaagtaccatccgtgcatcctagttattggaagctttacatgagctaatatatgcattatctagtgccatggacctctggtagaaatgcaaccagtctttgaaagcaaatcacaatcagcataaaataaag

SEQ ID NO: 48944 - DNA, 2395 bp, Zea Mays
ccggtaccggccggcatgagctccacctcatcgggccgccgcgccccctcatcttcggcggcggtcgcctcgtcgccgggacagaagcgggcgagggatgaggccagcagcgggtccccatccgaccccgacgccgccaaaaaccctcgccgcgcttttgcctcctccccgttcgccgacttcggcacctacatggctgcgaagaacagcaagctcgctgcgcagttcgatgccgacgccaacacctcaggcacggacgccggcggtctattcgatggcgtctccatcttcgtggacggcttcacagtcccttctagccaggagctgaaagagattatgctgaacaatggaggccggtttgtcaactacttttccaggcacacggtaacacacattgtttgcagcaacctgcctgatagcaaaatgaagaatctgagagcattcagcagaggacttcctgttgttaagccagcatgggtggtggattccctggcagagaaccggctcctcaactgtgctccttatcaaataaatcagaatagttcttcaagccgaaagcagatgaagctttcttctttcttttctgagaaacaaaatgaaatatgccacaagggggaacaaaacaaccaaaataaggatattgagttccaaccttcatctgctcaggagggatcacagtatcaaagtggggattgtgaaagtgaagcttcaatggatactttggagctatcaaaggactcgttgtcctcagatgaacagaaggcatcagcatttgaagaaagagagagcggagatttcacggttgatgagggtgaatacgattatgaaactgcctgttcggagagccgtaatgacacagatggtaaccttggtgtgcctcaatcccctaatgcaaagtcaaggtgttcaaacttattcagtacaagatctacaggcagtcatttgtccttgtcattggagaaaagtgcagctaaaccttctggccgaccacattcaaccctaacagatccaaattttgttgagaactatttcaagtactctcgactgcacttcattgggacatggagaaaccggtatcggaagcgcttctcaaatttgctagaagctaaaggcattaagttgagtgctgatcattcagggaagaagaaaacaatcattcatattgatatggttgctgatcagttctatggtactttgcacaaacattgcagtaaggttcaggctttgagttgtgatgaagcttttttggatatgactgaatgcttacatgacaatcctgaggaagtaacacagagaataagaagtgagatttttcatgcaacaaagtgtactgctagtgcaggaattgctgaaaacatgctcctagctcgattggctactagatctgcaaagccgaatggacaatgctttattccatccgaaaagggacacctctccgatacctgtgggatacgtcccaacactagttcaaagtatatgctcgtgctcctgtatcgcacagctgctgcccaaagccgcctctctgcctcctcttgtgtgctctcagtcgccgcagtttgtcggtccttggtcgcctccgccgcaattcgcggattcgcggccgccttcgccgcagttcgtcggtctgtggccgcctccgccgtagttcgccggtctgtggccgtcgccgccgtcacccgtcagtcgccgattgaagcagtcgccagcgcgctgcgaggtttgtggctgtcagcctgccagtcgccggcgcgccgcgaggtctgtggctgtcagcctgtcagccgtcgattggagctgccgccgcaaggtctgtggccgcgttcttcccctcttgcttctcaaactcctttcttctcaatttgctgactgctacttctctagtcttgttagatctcgttgcgatgagttcaagtgcatctattgaagccagtggtagcagaggaagctttcttgtcgccaataaccctgctattgcaggacaggtcttagctgttgctcgtgtggttcttcgcgatgacgatgagaaaaagccattctggaggtatgctgagatacttaaaagaactagaaagggtccgggggggatgtgaggattagatgtagactttctaaccatgattggaatggaagctattctagagttaaagcacatctgttgaaaattcgtagttttggggtgaagttttgtcgagtggtgacagtacatgtttttgaacaactgaaagttgaagttgctgcagccagtgttgttgctgatagaaccatgcctagagatatcccacttctagttgagggcaatgagaagaggaagaggaggggtgttttagctattgaatctagcttcaatttggatgtttggagacaacttgatgaactaacaactagaatgttttac

SEQ ID NO: 48945 - DNA, 3911 bp, Zea Mays
ccggtaccggccggcatgagctccacctcatcgggccgccgcgccccctcatcttcggcggcggtcgcctcgtcgccgggacagaagcgggcgagggatgaggccagcagcgggtccccatccgaccccgacgccgccaaaaaccctcgccgcgcttttgcctcctccccgttcgccgacttcggcacctacatggctgcgaagaacagcaagctcgctgcgcagttcgatgccgacgccaacacctcaggcacggacgccggcggtctattcgatggcgtctccatcttcgtggacggcttcacagtcccttctagccaggagctgaaagagattatgctgaacaatggaggccggtttgtcaactacttttccaggcacacggtaacacacattgtttgcagcaacctgcctgatagcaaaatgaagaatctgagagcattcagcagaggacttcctgttgttaagccagcatgggtggtggattccctggcagagaaccggctcctcaactgtgctccttatcaaataaatcagaatagttcttcaagccgaaagcagatgaagctttcttctttcttttctgagaaacaaaatgaaatatgccacaagggggaacaaaacaaccaaaataaggatattgagttccaaccttcatctgctcaggagggatcacagtatcaaagtggggattgtgaaagtgaagcttcaatggatactttggagctatcaaaggactcgttgtcctcagatgaacagaaggcatcagcatttgaagaaagagagagcggagatttcacggttgatgagggtgaatacgattatgaaactgcctgttcggagagccgtaatgacacagatggtaaccttggtgtgcctcaatcccctaatgcaaagtcaaggtgttcaaacttattcagtacaagatctacaggcagtcatttgtccttgtcattggagaaaagtgcagctaaaccttctggccgaccacattcaaccctaacagatccaaattttgttgagaactatttcaagtactctcgactgcacttcattgggacatggagaaaccggtatcggaagcgcttctcaaatttgctagaagctaaaggcattaagttgagtgctgatcattcagggaagaagaaaacaatcattcatattgatatggattgctttttcgtgtctgtggtcatcagaaatatgccagagctgcatgataaaccagtagcagtttgccattcggacaatcctaaaggaacagcagaaatatcgtctgcaaactatcctgctcgaaactatgggataaaggctggcatgtttgttagagatgctaaagctcggtgccctcacctaatgatcgttccttataactttgatgcatatgaggaggttgctgatcagttctatggtactttgcacaaacattgcagtaaggttcaggctttgagttgtgatgaagcttttttggatatgactgaatgcttacatgacaatcctgaggaagtaacacagagaataagaagtgagatttttcatgcaacaaagtgtactgctagtgcaggaattgctgaaaacatgctcctagctcgattggctactagatctgcaaagccgaatggacaatgctttattccatccgaaaaggaattgtgaagagaatacactgcctgcaacattcgtctgttcccaacagacctaaaaagaagcttggaggctgatgattatctgagtagtctctctatcaaagcacttccaggcattggtcatacagtttcatctaaactgaaaagcaaagaaattgaatattgtagtcaacttcgcaatgtttcaaaggatgccctccacaaggatttcggaaaaaagactggtgatcttttatggaattattgtagaggaattgatcattcaattgttggatctgttcaggaaacaaaatctgtgggtgccgaaattaactggggagtcagatttaatgacaacaaagatgccgaacattttcttaacaacctttgcaaggaggtttctctacgcttgcagggttgtggagttcagggacgtactattacccttaaggtgaaaacaagaagggaaggtgctggggaaccaataaaatatatgggatgtggtgactgtgaaaccacgagtcgttctatgacgattgcaggtgcaactgacagttttgtcactctccagagaattgcaaaacaattattttcagctcttcatcttgatgtgaaggaagttcgtggaattggactgtcactatcaaagcttgagcatgcagatttgggccggggagcatcgcaaggacatatgcttgaatcgtggcttgcttcaccagccgccaagctcaagaaacagcagagtgagatactggggaatgttaatgttgcagggaccagcggactgaaggatttgagatctggaccatcacatacagcagaagcgaaccttagaaatgataggtctactgtatttcacaatgtcgagctgcctccgttgtcccaacttgatttggaggtcctgaagaaccttcccccagagataatgtctgaaatgaatgaaatgtacaagggagaattacaaagtcttgtggacaccctcaatagtgacaagggcaaggaaaatagttcaaaatctcttgctttgcctgcagttattcgtaagtctgtacctgccgatgcaaagcttcaaggatacagagaccacagagactccatgcatttggaggaggaacatactaagggaaaatctgacaaacaactatcagaagctaaaccagccaataatgcttcatgctcaagagttagtgcatcaattgagaaaacaacaaaaagtgttacacaacttgatttgatgcctgattcgctaagccaggcagatctaacagttctgcaggaattacctgaggatgtgaaggctgatttgtttagtgcacttccactgcatagatcaggagatcctgcatgcagcacttccaatgtatctgaaagtaaatcacctaatgtggttagagctgaaaatagatcttctaatgatggtggaactgatgatctgaaaaccccaagagcaacacacagattccagctgtcaacgaccattgtcttctgttctagagcctgtagcttcgttcctacctttgtgtcctaacccaggtagtgaagaatggaatgaaactcattcatgtctctccgagcttcttagacactacatacaactgaaagttgaatatgatattgaagagctctacaaatgtttttgccttttgaaaagattctcgtcagcatcagagttttttctggatctacatgatagcatccttcctttcctacaggattctatcagccagcattacggtgggacactgcaattctagctccttgctcaagttgtagccattctattttgctagaaaggaagaagcaatgccgtgaatgtgcggagagacgtgttatgacaatctgcgcctccaagcagctactcaaatcccgtgctggcagattccttggacgcgtttataactttattataactaattgatgccaatgctggaagttttattgatatattcattgcatctatggatcaatagatgccatgtggttcgatatatcattcgtggagcaatggtttgaagggacctttgctgtgctttgatgttcccaggcgaatttcatgtttgcttcataacccatatgaatttcatgttatctttgtgttgctaccaaaaaggttcctggtttgaagttctttgcgtcaaattttcacctatgatctgaagtaccatccgtgcatcctagttattggaagctttacatgagctaatatatgcattatctagtgccatggacctctggtagaaatgcaaccagtctttgaaagcaaatcacaatcagcataaaataaag

SEQ ID NO: 48946 - DNA, 4303 bp, Zea Mays
ccggtaccggccggcatgagctccacctcatcgggccgccgcgccccctcatcttcggcggcggtcgcctcgtcgccgggacagaagcgggcgagggatgaggccagcagcgggtccccatccgaccccgacgccgccaaaaaccctcgccgcgcttttgcctcctccccgttcgccgacttcggcacctacatggctgcgaagaacagcaagctcgctgcgcagttcgatgccgacgccaacacctcaggcacggacgccggcggtctattcgatggcgtctccatcttcgtggacggcttcacagtcccttctagccaggagctgaaagagattatgctgaacaatggaggccggtttgtcaactacttttccaggcacacggtaacacacattgtttgcagcaacctgcctgatagcaaaatgaagaatctgagagcattcagcagaggacttcctgttgttaagccagcatgggtggtggattccctggcagagaaccggctcctcaactaatagttcttcaagccgaaagcagatgaagctttcttctttcttttctgagaaacaaaatgaaatatgccacaagggggaacaaaacaaccaaaataaggatattgagttccaaccttcatctgctcaggagggatcacagtatcaaagtggggattgtgaaagtgaagcttcaatggatactttggagctatcaaaggactcgttgtcctcagatgaacagaaggcatcagcatttgaagaaagagagagcggagatttcacggttgatgagggtgaatacgattatgaaactgcctgttcggagagccgtaatgacacagatggtaaccttggtgtgcctcaatcccctaatgcaaagtcaaggtgttcaaacttattcagtacaagatctacaggcagtcatttgtccttgtcattggagaaaagtgcagctaaaccttctggccgaccacattcaaccctaacagatccaaattttgttgagaactatttcaagtactctcgactgcacttcattgggacatggagaaaccggtatcggaagcgcttctcaaatttgctagaagctaaaggcattaagttgagtgctgatcattcagggaagaagaaaacaatcattcatattgatatggattgctttttcgtgtctgtggtcatcagaaatatgccagagctgcatgataaaccagtagcagtttgccattcggacaatcctaaaggaacagcagaaatatcgtctgcaaactatcctgctcgaaactatggtgctgctattttattttccattaattgagacttataatttagttatgtgaacacatttgaagagataaaggctggcatcctcattggtgcattccagggataaaggctggcatgtttgttagagatgctaaagctcggtgccctcacctaatgatcgttccttataactttgatgcatatgaggaggttgctgatcagttctatggtactttgcacaaacattgcagtaaggttcaggctttgagttgtgatgaagcttttttggatatgactgaatgcttacatgacaatcctgaggaagtaacacagagaataagaagtgagatttttcatgcaacaaagtgtactgctagtgcaggaattgctgaaaacatgctcctagctcgattggctactagatctgcaaagccgaatggacaatgctttattccatccgaaaaggaattgtgaagagaatacactgcctgcaacattcgtctgttcccaacagacctaaaaagaagcttggaggttcggatatcacatctatgttgttcaatatctctatgaaaatattggctgttgaatcagttattttttctgggagttgatttaatagttctactcattcccacaagcttgttgggtattgaattgagttactaatttgtttgtctttccttgaattcctacctgattaaagaaaatcactagtggtgccactccctctaaaaggatgtactttgtactacatgctgtatgtagcttgtctaaataagttgatatcataatctccataaggagttagggacatgtgatttactgactgcaacatgtatctcttacaggctgatgattatctgagtagtctctctatcaaagcacttccaggcattggtcatacagtttcatctaaactgaaaagcaaagaaattgaatattgtagtcaacttcgcaatgtttcaaaggatgccctccacaaggatttcggaaaaaagactggtgatcttttatggaattattgtagaggaattgatcattcaattgttggatctgttcaggaaacaaaatctgtgggtgccgaaattaactggggagtcagatttaatgacaacaaagatgccgaacattttcttaacaacctttgcaaggaggtttctctacgcttgcagggttgtggagttcagggacgtactattacccttaaggtgaaaacaagaagggaaggtgctggggaaccaataaaatatatgggatgtggtgactgtgaaaccacgagtcgttctatgacgattgcaggtgcaactgacagttttgtcactctccagagaattgcaaaacaattattttcagctcttcatcttgatgtgaaggaagttcgtggaattggactgtcactatcaaagcttgagcatgcagatttgggccggggagcatcgcaaggacatatgcttgaatcgtggcttgcttcaccagccgccaagctcaagaaacagcagagtgagatactggggaatgttaatgttgcagggaccagcggactgaaggatttgagatctggaccatcacatacagcagaagcgaaccttagaaatgataggtctactgtatttcacaatgtcgagctgcctccgttgtcccaacttgatttggaggtcctgaagaaccttcccccagagataatgtctgaaatgaatgaaatgtacaagggagaattacaaagtcttgtggacaccctcaatagtgacaagggcaaggaaaatagttcaaaatctcttgctttgcctgcagttattcgtaagtctgtacctgccgatgcaaagcttcaaggatacagagaccacagagactccatgcatttggaggaggaacatactaagggaaaatctgacaaacaactatcagaagctaaaccagccaataatgcttcatgctcaagagttagtgcatcaattgagaaaacaacaaaaagtgttacacaacttgatttgatgcctgattcgctaagccaggcagatctaacagttctgcaggaattacctgaggatgtgaaggctgatttgtttagtgcacttccactgcatagatcaggagatcctgcatgcagcacttccaatgtatctgaaagtaaatcacctaatgtggttagagctgaaaatagatcttctaatgatggtggaactgatgatctgaaaaccccaagagcaacacacagattccagctgtcaacgaccattgtcttctgttctagagcctgtagcttcgttcctacctttgtgtcctaacccaggtagtgaagaatggaatgaaactcattcatgtctctccgagcttcttagacactacatacaactgaaagttgaatatgatattgaagagctctacaaatgtttttgccttttgaaaagattctcgtcagcatcagagttttttctggatctacatgatagcatccttcctttcctacaggattctatcagccagcattacggtgggacactgcaattctagctccttgctcaagttgtagccattctattttgctagaaaggaagaagcaatgccgtgaatgtgcggagagacgtgttatgacaatctgcgcctccaagcagctactcaaatcccgtgctggcagattccttggacgcgtttataactttattataactaattgatgccaatgctggaagttttattgatatattcattgcatctatggatcaatagatgccatgtggttcgatatatcattcgtggagcaatggtttgaagggacctttgctgtgctttgatgttcccaggcgaatttcatgtttgcttcataacccatatgaatttcatgttatctttgtgttgctaccaaaaaggttcctggtttgaagttctttgcgtcaaattttcacctatgatctgaagtaccatccgtgcatcctagttattggaagctttacatgagctaatatatgcattatctagtgccatggacctctggtagaaatgcaaccagtctttgaaagcaaatcacaatcagcataaaataaag

SEQ ID NO: 48947 - DNA, 3836 bp, Zea Mays
ccggtaccggccggcatgagctccacctcatcgggccgccgcgccccctcatcttcggcggcggtcgcctcgtcgccgggacagaagcgggcgagggatgaggccagcagcgggtccccatccgaccccgacgccgccaaaaaccctcgccgcgcttttgcctcctccccgttcgccgacttcggcacctacatggctgcgaagaacagcaagctcgctgcgcagttcgatgccgacgccaacacctcaggcacggacgccggcggtctattcgatggcgtctccatcttcgtggacggcttcacagtcccttctagccaggagctgaaagagattatgctgaacaatggaggccggtttgtcaactacttttccaggcacacggtaacacacattgtttgcagcaacctgcctgatagcaaaatgaagaatctgagagcattcagcagaggacttcctgttgttaagccagcatgggtggtggattccctggcagagaaccggctcctcaactaatagttcttcaagccgaaagcagatgaagctttcttctttcttttctgagaaacaaaatgaaatatgccacaagggggaacaaaacaaccaaaataaggatattgagttccaaccttcatctgctcaggagggatcacagtatcaaagtggggattgtgaaagtgaagcttcaatggatactttggagctatcaaaggactcgttgtcctcagatgaacagaaggcatcagcatttgaagaaagagagagcggagatttcacggttgatgagggtgaatacgattatgaaactgcctgttcggagagccgtaatgacacagatggtaaccttggtgtgcctcaatcccctaatgcaaagtcaaggtgttcaaacttattcagtacaagatctacaggcagtcatttgtccttgtcattggagaaaagtgcagctaaaccttctggccgaccacattcaaccctaacagatccaaattttgttgagaactatttcaagtactctcgactgcacttcattgggacatggagaaaccggtatcggaagcgcttctcaaatttgctagaagctaaaggcattaagttgagtgctgatcattcagggaagaagaaaacaatcattcatattgatatggattgctttttcgtgtctgtggtcatcagaaatatgccagagctgcatgataaaccagtagcagtttgccattcggacaatcctaaaggaacagcagaaatatcgtctgcaaactatcctgctcgaaactatgggataaaggctggcatgtttgttagagatgctaaagctcggtgccctcacctaatgatcgttccttataactttgatgcatatgaggaggttgctgatcagttctatggtactttgcacaaacattgcagtaaggttcaggctttgagttgtgatgaagcttttttggatatgactgaatgcttacatgacaatcctgaggaagtaacacagagaataagaagtgagatttttcatgcaacaaagtgtactgctagtgcaggaattgctgaaaacatgctcctagctcgattggctactagatctgcaaagccgaatggacaatgctttattccatccgaaaaggaaacaaaatctgtgggtgccgaaattaactggggagtcagatttaatgacaacaaagatgccgaacattttcttaacaacctttgcaaggaggtttctctacgcttgcagggttgtggagttcagggacgtactattacccttaaggtgaaaacaagaagggaaggtgctggggaaccaataaaatatatgggatgtggtgactgtgaaaccacgagtcgttctatgacgattgcaggtgcaactgacagttttgtcactctccagagaattgcaaaacaattattttcagctcttcatcttgatgtgaaggaagttcgtggaattggactgtcactatcaaagcttgagcatgcagatttgggccggggagcatcgcaaggacatatgcttgaatcgtggcttgcttcaccagccgccaagctcaagaaacagcagagtgagatactggggaatgttaatgttgcagggaccagcggactgaaggatttgagatctggaccatcacatacagcagaagcgaaccttagaaatgataggtctactgtatttcacaatgtcgagctgcctccgttgtcccaacttgatttggaggtcctgaagaaccttcccccagagataatgtctgaaatgaatgaaatgtacaagggagaattacaaagtcttgtggacaccctcaatagtgacaagggcaaggaaaatagttcaaaatctcttgctttgcctgcagttattcgtaagtctgtacctgccgatgcaaagcttcaaggatacagagaccacagagactccatgcatttggaggaggaacatactaaggtgagctgtgtcactggaaataaagtggcgctggaactttttaaacaaagtgcaagcacgtgatttagttgctgtcacctcctcatcttgatatttggaagttggaacctgtttcacactattctaattttacctttacacccgtagggaaaatctgacaaacaactatcagaagctaaaccagccaataatgcttcatgctcaagagttagtgcatcaattgagaaaacaacaaaaagtgttacacaacttgatttgatgcctgattcgctaagccaggcagatctaacagttctgcaggaattacctgaggatgtgaaggctgatttgtttagtgcacttccactgcatagatcaggagatcctgcatgcagcacttccaatgtatctgaaagtaaatcacctaatgtggttagagctgaaaatagatcttctaatgatggtggaactgatgatctgaaaaccccaaggtcttttctcccaccaggaagttctcaaaaatggatcgaacagtttagagttagcagttgcctgattttgaacgtaattgcagagcaacacacagattccagctgtcaacgaccattgtcttctgttctagagcctgtagcttcgttcctacctttgtgtcctaacccaggtagtgaagaatggaatgaaactcattcatgtctctccgagcttcttagacactacatacaactgaaagttgaatatgatattgaagagctctacaaatgtttttgccttttgaaaagattctcgtcagcatcagagttttttctggatctacatgatagcatccttcctttcctacaggattctatcagccagcattacggtgggacactgcaattctagctccttgctcaagttgtagccattctattttgctagaaaggaagaagcaatgccgtgaatgtgcggagagacgtgttatgacaatctgcgcctccaagcagctactcaaatcccgtgctggcagattccttggacgcgtttataactttattataactaattgatgccaatgctggaagttttattgatatattcattgcatctatggatcaatagatgccatgtggttcgatatatcattcgtggagcaatggtttgaagggacctttgctgtgctttgatgttcccaggcgaatttcatgtttgcttcataacccatatgaatttcatgttatctttgtgttgctaccaaaaaggttcctggtttgaagttctttgcgtcaaattttcacctatgatctgaagtaccatccgtgcatcctagttattggaagctttacatgagctaatatatgcattatctagtgccatggacctctggtagaaatgcaaccagtctttgaaagcaaatcacaatcagcataaaataaag

SEQ ID NO: 48948 - DNA, 3221 bp, Zea Mays
ccggtaccggccggcatgagctccacctcatcgggccgccgcgccccctcatcttcggcggcggtcgcctcgtcgccgggacagaagcgggcgagggatgaggccagcagcgggtccccatccgaccccgacgccgccaaaaaccctcgccgcgcttttgcctcctccccgttcgccgacttcggcacctacatggctgcgaagaacagcaagctcgctgcgcagttcgatgccgacgccaacacctcaggcacggacgccggcggtctattcgatggcgtctccatcttcgtggacggcttcacagtcccttctagccaggagctgaaagagattatgctgaacaatggaggccggtttgtcaactacttttccaggcacacggtaacacacattgtttgcagcaacctgcctgatagcaaaatgaagaatctgagagcattcagcagaggacttcctgttgttaagccagcatgggtggtggattccctggcagagaaccggctcctcaactgtgctccttatcaaataaatcagaatagttcttcaagccgaaagcagatgaagctttcttctttcttttctgagaaacaaaatgaaatatgccacaagggggaacaaaacaaccaaaataaggatattgagttccaaccttcatctgctcaggagggatcacagtatcaaagtggggattgtgaaagtgaagcttcaatggatactttggagctatcaaaggactcgttgtcctcagatgaacagaaggcatcagcatttgaagaaagagagagcggagatttcacggttgatgagggtgaatacgattatgaaactgcctgttcggagagccgtaatgacacagatggtaaccttggtgtgcctcaatcccctaatgcaaagtcaaggtgttcaaacttattcagtacaagatctacaggcagtcatttgtccttgtcattggagaaaagtgcagctaaaccttctggccgaccacattcaaccctaacagatccaaattttgttgagaactatttcaagtactctcgactgcacttcattgggacatggagaaaccggtatcggaagcgcttctcaaatttgctagaagctaaaggcattaagttgagtgctgatcattcagggaagaagaaaacaatcattcatattgatatggattgctttttcgtgtctgtggtcatcagaaatatgccagagctgcatgataaaccagtagcagtttgccattcggacaatcctaaaggaacagcagaaatatcgtctgcaaactatcctgctcgaaactatgggataaaggctggcatgtttgttagagatgctaaagctcggtgccctcacctaatgatcgttccttataactttgatgcatatgaggaggttgctgatcagttctatggtactttgcacaaacattgcagtaaggttcaggctttgagttgtgatgaagcttttttggatatgactgaatgcttacatgacaatcctgaggaagtaacacagagaataagaagtgagatttttcatgcaacaaagtgtactgctagtgcaggaattgctgaaaacatgctcctagctcgattggctactagatctgcaaagccgaatggacaatgctttattccatccgaaaaggctgatgattatctgagtagtctctctatcaaagcacttccaggcattggtcatacagtttcatctaaactgaaaagcaaagaaattgaatattgtagtcaacttcgcaatgtttcaaaggaaacaaaatctgtgggtgccgaaattaactggggagtcagatttaatgacaacaaagatgccgaacattttcttaacaacctttgcaaggaggtttctctacgcttgcagggttgtggagttcagggacgtactattacccttaaggtgaaaacaagaagggaaggtgctggggaaccaataaaatatatgggatgtggtgactgtgaaaccacgagtcgttctatgacgattgcaggtgcaactgacagttttgtcactctccagagaattgcaaaacaattattttcagctcttcatcttgatgtgaaggaagttcgtggaattggactgtcactatcaaagcttgagcatgcagatttgggccggggagcatcgcaaggacatatgcttgaatcgtggcttgcttcaccagccgccaagctcaagaaacagcagagtgagatactggggaatgttaatgttgcagggaccagcggactgaaggatttgagatctggaccatcacatacagcagaagcgaaccttagaaatgataggtctactgtatttcacaatgtcgagctgcctccgttgtcccaacttgatttggaggtcctgaagaaccttcccccagagataatgtctgaaatgaatgaaatgtacaagggagaattacaaagtcttgtggacaccctcaatagtgacaagggcaaggaaaatagttcaaaatctcttgctttgcctgcagttattcgtaagtctgtacctgccgatgcaaagcttcaaggatacagagaccacagagactccatgcatttggaggaggaacatactaagattctcgtcagcatcagagttttttctggatctacatgatagcatccttcctttcctacaggattctatcagccagcattacggtgggacactgcaattctagctccttgctcaagttgtagccattctattttgctagaaaggaagaagcaatgccgtgaatgtgcggagagacgtgttatgacaatctgcgcctccaagcagctactcaaatcccgtgctggcagattccttggacgcgtttataactttattataactaattgatgccaatgctggaagttttattgatatattcattgcatctatggatcaatagatgccatgtggttcgatatatcattcgtggagcaatggtttgaagggacctttgctgtgctttgatgttcccaggcgaatttcatgtttgcttcataacccatatgaatttcatgttatctttgtgttgctaccaaaaaggttcctggtttgaagttctttgcgtcaaattttcacctatgatctgaagtaccatccgtgcatcctagttattggaagctttacatgagctaatatatgcattatctagtgccatggacctctggtagaaatgcaaccagtctttgaaagcaaatcacaatcagcataaaataaag

SEQ ID NO: 48949 - DNA, 3767 bp, Zea Mays
ccggtaccggccggcatgagctccacctcatcgggccgccgcgccccctcatcttcggcggcggtcgcctcgtcgccgggacagaagcgggcgagggatgaggccagcagcgggtccccatccgaccccgacgccgccaaaaaccctcgccgcgcttttgcctcctccccgttcgccgacttcggcacctacatggctgcgaagaacagcaagctcgctgcgcagttcgatgccgacgccaacacctcaggcacggacgccggcggtctattcgatggcgtctccatcttcgtggacggcttcacagtcccttctagccaggagctgaaagagattatgctgaacaatggaggccggtttgtcaactacttttccaggcacacggtaacacacattgtttgcagcaacctgcctgatagcaaaatgaagaatctgagagcattcagcagaggacttcctgttgttaagccagcatgggtggtggattccctggcagagaaccggctcctcaactttcttcaagccgaaagcagatgaagctttcttctttcttttctgagaaacaaaatgaaatatgccacaagggggaacaaaacaaccaaaataaggatattgagttccaaccttcatctgctcaggagggatcacagtatcaaagtggggattgtgaaagtgaagcttcaatggatactttggagctatcaaaggactcgttgtcctcagatgaacagaaggcatcagcatttgaagaaagagagagcggagatttcacggttgatgagggtgaatacgattatgaaactgcctgttcggagagccgtaatgacacagatggtaaccttggtgtgcctcaatcccctaatgcaaagtcaaggtgttcaaacttattcagtacaagatctacaggcagtcatttgtccttgtcattggagaaaagtgcagctaaaccttctggccgaccacattcaaccctaacagatccaaattttgttgagaactatttcaagtactctcgactgcacttcattgggacatggagaaaccggtatcggaagcgcttctcaaatttgctagaagctaaaggcattaagttgagtgctgatcattcagggaagaagaaaacaatcattcatattgatatggtaatcttgtagtgctatggattgctttttcgtgtctgtggtcatcagaaatatgccagagctgcatgataaaccagtagcagtttgccattcggacaatcctaaaggaacagcagaaatatcgtctgcaaactatcctgctcgaaactatgggataaaggctggcatgtttgttagagatgctaaagctcggtgccctcacctaatgatcgttccttataactttgatgcatatgaggaggttgctgatcagttctatggtactttgcacaaacattgcagtaaggttcaggctttgagttgtgatgaagcttttttggatatgactgaatgcttacatgacaatcctgaggaagtaacacagagaataagaagtgagatttttcatgcaacaaagtgtactgctagtgcaggaattgctgaaaacatgctcctagctcgattggctactagatctgcaaagccgaatggacaatgctttattccatccgaaaaggaaacaaaatctgtgggtgccgaaattaactggggagtcagatttaatgacaacaaagatgccgaacattttcttaacaacctttgcaaggaggtttctctacgcttgcagggttgtggagttcagggacgtactattacccttaaggtgaaaacaagaagggaaggtgctggggaaccaataaaatatatgggatgtggtgactgtgaaaccacgagtcgttctatgacgattgcaggtgcaactgacagttttgtcactctccagagaattgcaaaacaattattttcagctcttcatcttgatgtgaaggaagttcgtggaattggactgtcactatcaaagcttgagcatgcagatttgggccggggagcatcgcaaggacatatgcttgaatcgtggcttgcttcaccagccgccaagctcaagaaacagcagagtgagatactggggaatgttaatgttgcagggaccagcggactgaaggatttgagatctggaccatcacatacagcagaagcgaaccttagaaatgataggtctactgtatttcacaatgtcgagctgcctccgttgtcccaacttgatttggaggtcctgaagaaccttcccccagagataatgtctgaaatgaatgaaatgtacaagggagaattacaaagtcttgtggacaccctcaatagtgacaagggcaaggaaaatagttcaaaatctcttgctttgcctgcagttattcgtaagtctgtacctgccgatgcaaagcttcaaggatacagagaccacagagactccatgcatttggaggaggaacatactaaggtgagctgtgtcactggaaataaagtggcgctggaactttttaaacaaagtgcaagcacgtgatttagttgctgtcacctcctcatcttgatatttggaagttggaacctgtttcacactattctaattttacctttacacccgtagggaaaatctgacaaacaactatcagaagctaaaccagccaataatgcttcatgctcaagagttagtgcatcaattgagaaaacaacaaaaagtgttacacaacttgatttgatgcctgattcgctaagccaggcagatctaacagttctgcaggaattacctgaggatgtgaaggctgatttgtttagtgcacttccactgcatagatcaggagatcctgcatgcagcacttccaatgtatctgaaagtaaatcacctaatgtggttagagctgaaaatagatcttctaatgatggtggaactgatgatctgaaaaccccaagagcaacacacagattccagctgtcaacgaccattgtcttctgttctagagcctgtagcttcgttcctacctttgtgtcctaacccaggtagtgaagaatggaatgaaactcattcatgtctctccgagcttcttagacactacatacaactgaaagttgaatatgatattgaagagctctacaaatgtttttgccttttgaaaagattctcgtcagcatcagagttttttctggatctacatgatagcatccttcctttcctacaggattctatcagccagcattacggtgggacactgcaattctagctccttgctcaagttgtagccattctattttgctagaaaggaagaagcaatgccgtgaatgtgcggagagacgtgttatgacaatctgcgcctccaagcagctactcaaatcccgtgctggcagattccttggacgcgtttataactttattataactaattgatgccaatgctggaagttttattgatatattcattgcatctatggatcaatagatgccatgtggttcgatatatcattcgtggagcaatggtttgaagggacctttgctgtgctttgatgttcccaggcgaatttcatgtttgcttcataacccatatgaatttcatgttatctttgtgttgctaccaaaaaggttcctggtttgaagttctttgcgtcaaattttcacctatgatctgaagtaccatccgtgcatcctagttattggaagctttacatgagctaatatatgcattatctagtgccatggacctctggtagaaatgcaaccagtctttgaaagcaaatcacaatcagcataaaataaag

SEQ ID NO: 48950 - DNA, 3830 bp, Zea Mays
ccggtaccggccggcatgagctccacctcatcgggccgccgcgccccctcatcttcggcggcggtcgcctcgtcgccgggacagaagcgggcgagggatgaggccagcagcgggtccccatccgaccccgacgccgccaaaaaccctcgccgcgcttttgcctcctccccgttcgccgacttcggcacctacatggctgcgaagaacagcaagctcgctgcgcagttcgatgccgacgccaacacctcaggcacggacgccggcggtctattcgatggcgtctccatcttcgtggacggcttcacagtcccttctagccaggagctgaaagagattatgctgaacaatggaggccggtttgtcaactacttttccaggcacacggtaacacacattgtttgcagcaacctgcctgatagcaaaatgaagaatctgagaggacttcctgttgttaagccagcatgggtggtggattccctggcagagaaccggctcctcaactgtgctccttatcaaataaatcagaatagttcttcaagccgaaagcagatgaagctttcttctttcttttctgagaaacaaaatgaaatatgccacaagggggaacaaaacaaccaaaataaggatattgagttccaaccttcatctgctcaggagggatcacagtatcaaagtggggattgtgaaagtgaagcttcaatggatactttggagctatcaaaggactcgttgtcctcagatgaacagaaggcatcagcatttgaagaaagagagagcggagatttcacggttgatgagggtgaatacgattatgaaactgcctgttcggagagccgtaatgacacagatggtaaccttggtgtgcctcaatcccctaatgcaaagtcaaggtgttcaaacttattcagtacaagatctacaggcagtcatttgtccttgtcattggagaaaagtgcagctaaaccttctggccgaccacattcaaccctaacagatccaaattttgttgagaactatttcaagtactctcgactgcacttcattgggacatggagaaaccggtatcggaagcgcttctcaaatttgctagaagctaaaggcattaagttgagtgctgatcattcagggaagaagaaaacaatcattcatattgatatggattgctttttcgtgtctgtggtcatcagaaatatgccagagctgcatgataaaccagtagcagtttgccattcggacaatcctaaaggaacagcagaaatatcgtctgcaaactatcctgctcgaaactatgggataaaggctggcatgtttgttagagatgctaaagctcggtgccctcacctaatgatcgttccttataactttgatgcatatgaggaggttgctgatcagttctatggtactttgcacaaacattgcagtaaggttcaggctttgagttgtgatgaagcttttttggatatgactgaatgcttacatgacaatcctgaggaagtaacacagagaataagaagtgagatttttcatgcaacaaagtgtactgctagtgcaggaattgctgaaaacatgctcctagctcgattggctactagatctgcaaagccgaatggacaatgctttattccatccgaaaaggctgatgattatctgagtagtctctctatcaaagcacttccaggcattggtcatacagtttcatctaaactgaaaagcaaagaaattgaatattgtagtcaacttcgcaatgtttcaaaggatgccctccacaaggatttcggaaaaaagactggtgatcttttatggaattattgtagaggaattgatcattcaattgttggatctgttcaggaaacaaaatctgtgggtgccgaaattaactggggagtcagatttaatgacaacaaagatgccgaacattttcttaacaacctttgcaaggaggtttctctacgcttgcagggttgtggagttcagggacgtactattacccttaaggtgaaaacaagaagggaaggtgctggggaaccaataaaatatatgggatgtggtgactgtgaaaccacgagtcgttctatgacgattgcaggtgcaactgacagttttgtcactctccagagaattgcaaaacaattattttcagctcttcatcttgatgtgaaggaagttcgtggaattggactgtcactatcaaagcttgagcatgcagatttgggccggggagcatcgcaaggacatatgcttgaatcgtggcttgcttcaccagccgccaagctcaagaaacagcagagtgagatactggggaatgttaatgttgcagggaccagcggactgaaggatttgagatctggaccatcacatacagcagaagcgaaccttagaaatgataggtctactgtatttcacaatgtcgagctgcctccgttgtcccaacttgatttggaggtcctgaagaaccttcccccagagataatgtctgaaatgaatgaaatgtacaagggagaattacaaagtcttgtggacaccctcaatagtgacaagggcaaggaaaatagttcaaaatctcttgctttgcctgcagttattcgtaagtctgtacctgccgatgcaaagcttcaaggatacagagaccacagagactccatgcatttggaggaggaacatactaagggaaaatctgacaaacaactatcagaagctaaaccagccaataatgcttcatgctcaagagttagtgcatcaattgagaaaacaacaaaaagtgttacacaacttgatttgatgcctgattcgctaagccaggcagatctaacagttctgcaggaattacctgaggatgtgaaggctgatttgtttagtgcacttccactgcatagatcaggagatcctgcatgcagcacttccaatgtatctgaaagtaaatcacctaatgtggttagagctgaaaatagatcttctaatgatggtggaactgatgatctgaaaaccccaagagcaacacacagattccagctgtcaacgaccattgtcttctgttctagagcctgtagcttcgttcctacctttgtgtcctaacccaggtagtgaagaatggaatgaaactcattcatgtctctccgagcttcttagacactacatacaactgaaagttgaatatgatattgaagagctctacaaatgtttttgccttttgaaaagattctcgtcagcatcagagttttttctggatctacatgatagcatccttcctttcctacaggattctatcagccagcattacggtgggacactgcaattctagctccttgctcaagttgtagccattctattttgctagaaaggaagaagcaatgccgtgaatgtgcggagagacgtgttatgacaatctgcgcctccaagcagctactcaaatcccgtgctggcagattccttggacgcgtttataactttattataactaattgatgccaatgctggaagttttattgatatattcattgcatctatggatcaatagatgccatgtggttcgatatatcattcgtggagcaatggtttgaagggacctttgctgtgctttgatgttcccaggcgaatttcatgtttgcttcataacccatatgaatttcatgttatctttgtgttgctaccaaaaaggttcctggtttgaagttctttgcgtcaaattttcacctatgatctgaagtaccatccgtgcatcctagttattggaagctttacatgagctaatatatgcattatctagtgccatggacctctggtagaaatgcaaccagtctttgaaagcaaatcacaatcagcataaaataaag

SEQ ID NO: 48951 - DNA, 3881 bp, Zea Mays
ccggtaccggccggcatgagctccacctcatcgggccgccgcgccccctcatcttcggcggcggtcgcctcgtcgccgggacagaagcgggcgagggatgaggccagcagcgggtccccatccgaccccgacgccgccaaaaaccctcgccgcgcttttgcctcctccccgttcgccgacttcggcacctacatggctgcgaagaacagcaagctcgctgcgcagttcgatgccgacgccaacacctcaggcacggacgccggcggtctattcgatggcgtctccatcttcgtggacggcttcacagtcccttctagccaggcacacggtaacacacattgtttgcagcaacctgcctgatagcaaaatgaagaatctgagagcattcagcagaggacttcctgttgttaagccagcatgggtggtggattccctggcagagaaccggctcctcaactgtgctccttatcaaataaatcagaatagttcttcaagccgaaagcagatgaagctttcttctttcttttctgagaaacaaaatgaaatatgccacaagggggaacaaaacaaccaaaataaggatattgagttccaaccttcatctgctcaggagggatcacagtatcaaagtggggattgtgaaagtgaagcttcaatggatactttggagctatcaaaggactcgttgtcctcagatgaacagaaggcatcagcatttgaagaaagagagagcggagatttcacggttgatgagggtgaatacgattatgaaactgcctgttcggagagccgtaatgacacagatggtaaccttggtgtgcctcaatcccctaatgcaaagtcaaggtgttcaaacttattcagtacaagatctacaggcagtcatttgtccttgtcattggagaaaagtgcagctaaaccttctggccgaccacattcaaccctaacagatccaaattttgttgagaactatttcaagtactctcgactgcacttcattgggacatggagaaaccggtatcggaagcgcttctcaaatttgctagaagctaaaggcattaagttgagtgctgatcattcagggaagaagaaaacaatcattcatattgatatggtaatcttgtagtgctatggattgctttttcgtgtctgtggtcatcagaaatatgccagagctgcatgataaaccagtagcagtttgccattcggacaatcctaaaggaacagcagaaatatcgtctgcaaactatcctgctcgaaactatgggataaaggctggcatgtttgttagagatgctaaagctcggtgccctcacctaatgatcgttccttataactttgatgcatatgaggaggttgctgatcagttctatggtactttgcacaaacattgcagtaaggttcaggctttgagttgtgatgaagcttttttggatatgactgaatgcttacatgacaatcctgaggaagtaacacagagaataagaagtgagatttttcatgcaacaaagtgtactgctagtgcaggaattgctgaaaacatgctcctagctcgattggctactagatctgcaaagccgaatggacaatgctttattccatccgaaaaggctgatgattatctgagtagtctctctatcaaagcacttccaggcattggtcatacagtttcatctaaactgaaaagcaaagaaattgaatattgtagtcaacttcgcaatgtttcaaaggatgccctccacaaggatttcggaaaaaagactggtgatcttttatggaattattgtagaggaattgatcattcaattgttggatctgttcaggaaacaaaatctgtgggtgccgaaattaactggggagtcagatttaatgacaacaaagatgccgaacattttcttaacaacctttgcaaggaggtttctctacgcttgcagggttgtggagttcagggacgtactattacccttaaggtgaaaacaagaagggaaggtgctggggaaccaataaaatatatgggatgtggtgactgtgaaaccacgagtcgttctatgacgattgcaggtgcaactgacagttttgtcactctccagagaattgcaaaacaattattttcagctcttcatcttgatgtgaaggaagttcgtggaattggactgtcactatcaaagcttgagcatgcagatttgggccggggagcatcgcaaggacatatgcttgaatcgtggcttgcttcaccagccgccaagctcaagaaacagcagagtgagatactggggaatgttaatgttgcagcggactgaaggatttgagatctggaccatcacatacagcagaagcgaaccttagaaatgataggtctactgtatttcacaatgtcgagctgcctccgttgtcccaacttgatttggaggtcctgaagaaccttcccccagagataatgtctgaaatgaatgaaatgtacaagggagaattacaaagtcttgtggacaccctcaatagtgacaagggcaaggaaaatagttcaaaatctcttgctttgcctgcagttattcgtaagtctgtacctgccgatgcaaagcttcaaggatacagagaccacagagactccatgcatttggaggaggaacatactaagggaaaatctgacaaacaactatcagaagctaaaccagccaataatgcttcatgctcaagagttagtgcatcaattgagaaaacaacaaaaagtgttacacaacttgatttgatgcctgattcgctaagccaggcagatctaacagttctgcaggaattacctgaggatgtgaaggctgatttgtttagtgcacttccactgcatagatcaggagatcctgcatgcagcacttccaatgtatctgaaagtaaatcacctaatgtggttagagctgaaaatagatcttctaatgatggtggaactgatgatctgaaaaccccaaggtcttttctcccaccaggaagttctcaaaaatggatcgaacagtttagagttagcagttgcctgattttgaacgtaattgcagagcaacacacagattccagctgtcaacgaccattgtcttctgttctagagcctgtagcttcgttcctacctttgtgtcctaacccaggtagtgaagaatggaatgaaactcattcatgtctctccgagcttcttagacactacatacaactgaaagttgaatatgatattgaagagctctacaaatgtttttgccttttgaaaagattctcgtcagcatcagagttttttctggatctacatgatagcatccttcctttcctacaggattctatcagccagcattacggtgggacactgcaattctagctccttgctcaagttgtagccattctattttgctagaaaggaagaagcaatgccgtgaatgtgcggagagacgtgttatgacaatctgcgcctccaagcagctactcaaatcccgtgctggcagattccttggacgcgtttataactttattataactaattgatgccaatgctggaagttttattgatatattcattgcatctatggatcaatagatgccatgtggttcgatatatcattcgtggagcaatggtttgaagggacctttgctgtgctttgatgttcccaggcgaatttcatgtttgcttcataacccatatgaatttcatgttatctttgtgttgctaccaaaaaggttcctggtttgaagttctttgcgtcaaattttcacctatgatctgaagtaccatccgtgcatcctagttattggaagctttacatgagctaatatatgcattatctagtgccatggacctctggtagaaatgcaaccagtctttgaaagcaaatcacaatcagcataaaataaag

SEQ ID NO: 48952 - DNA, 4049 bp, Zea Mays
ccggtaccggccggcatgagctccacctcatcgggccgccgcgccccctcatcttcggcggcggtcgcctcgtcgccgggacagaagcgggcgagggatgaggccagcagcgggtccccatccgaccccgacgccgccaaaaaccctcgccgcgcttttgcctcctccccgttcgccgacttcggcacctacatggctgcgaagaacagcaagctcgctgcgcagttcgatgccgacgccaacacctcaggcacggacgccggcggtctattcgatggcgtctccatcttcgtggacggcttcacagtcccttctagccaggagctgaaagagattatgctgaacaatggaggccggtttgtcaactacttttccaggcacacggtaacacacattgtttgcagcaacctgcctgatagcaaaatgaagaatctgagagcattcagcagaggacttcctgttgttaagccagcatgggtggtggattccctggcagagaaccggctcctcaactttcttcaagccgaaagcagatgaagctttcttctttcttttctgagaaacaaaatgaaatatgccacaagggggaacaaaacaaccaaaataaggatattgagttccaaccttcatctgctcaggagggatcacagtatcaaagtggggattgtgaaagtgaagcttcaatggatactttggagctatcaaaggactcgttgtcctcagatgaacagaaggcatcagcatttgaagaaagagagagcggagatttcacggttgatgagggtgaatacgattatgaaactgcctgttcggagagccgtaatgacacagatggtaaccttggtgtgcctcaatcccctaatgcaaagtcaaggtgttcaaacttattcagtacaagatctacaggcagtcatttgtccttgtcattggagaaaagtgcagctaaaccttctggccgaccacattcaaccctaacagatccaaattttgttgagaactatttcaagtactctcgactgcacttcattgggacatggagaaaccggtatcggaagcgcttctcaaatttgctagaagctaaaggcattaagttgagtgctgatcattcagggaagaagaaaacaatcattcatattgatatggattgctttttcgtgtctgtggtcatcagaaatatgccagagctgcatgataaaccagtagcagtttgccattcggacaatcctaaaggaacagcagaaatatcgtctgcaaactatcctgctcgaaactatggtgctgctattttattttccattaattgagacttataatttagttatgtgaacacatttgaagagataaaggctggcatcctcattggtgcattccagggataaaggctggcatgtttgttagagatgctaaagctcggtgccctcacctaatgatcgttccttataactttgatgcatatgaggaggttgctgatcagttctatggtactttgcacaaacattgcagtaaggttcaggctttgagttgtgatgaagcttttttggatatgactgaatgcttacatgacaatcctgaggaagtaacacagagaataagaagtgagatttttcatgcaacaaagtgtactgctagtgcaggaattgctgaaaacatgctcctagctcgattggctactagatctgcaaagccgaatggacaatgctttattccatccgaaaagaaaatcactagtggtgccactccctctaaaaggatgtactttgtactacatgctgctgatgattatctgagtagtctctctatcaaagcacttccaggcattggtcatacagtttcatctaaactgaaaagcaaagaaattgaatattgtagtcaacttcgcaatgtttcaaaggatgccctccacaaggatttcggaaaaaagactggtgatcttttatggaattattgtagaggaattgatcattcaattgttggatctgttcaggaaacaaaatctgtgggtgccgaaattaactggggagtcagatttaatgacaacaaagatgccgaacattttcttaacaacctttgcaaggaggtttctctacgcttgcagggttgtggagttcagggacgtactattacccttaaggtgaaaacaagaagggaaggtgctggggaaccaataaaatatatgggatgtggtgactgtgaaaccacgagtcgttctatgacgattgcaggtgcaactgacagttttgtcactctccagagaattgcaaaacaattattttcagctcttcatcttgatgtgaaggaagttcgtggaattggactgtcactatcaaagcttgagcatgcagatttgggccggggagcatcgcaaggacatatgcttgaatcgtggcttgcttcaccagccgccaagctcaagaaacagcagagtgagatactggggaatgttaatgttgcagggaccagcggactgaaggatttgagatctggaccatcacatacagcagaagcgaaccttagaaatgataggtctactgtatttcacaatgtcgagctgcctccgttgtcccaacttgatttggaggtcctgaagaaccttcccccagagataatgtctgaaatgaatgaaatgtacaagggagaattacaaagtcttgtggacaccctcaatagtgacaagggcaaggaaaatagttcaaaatctcttgctttgcctgcagttattcgtaagtctgtacctgccgatgcaaagcttcaaggatacagagaccacagagactccatgcatttggaggaggaacatactaagggaaaatctgacaaacaactatcagaagctaaaccagccaataatgcttcatgctcaagagttagtgcatcaattgagaaaacaacaaaaagtgttacacaacttgatttgatgcctgattcgctaagccaggcagatctaacagttctgcaggaattacctgaggatgtgaaggctgatttgtttagtgcacttccactgcatagatcaggagatcctgcatgcagcacttccaatgtatctgaaagtaaatcacctaatgtggttagagctgaaaatagatcttctaatgatggtggaactgatgatctgaaaaccccaaggtcttttctcccaccaggaagttctcaaaaatggatcgaacagtttagagttagcagttgcctgattttgaacgtaattgcagagcaacacacagattccagctgtcaacgaccattgtcttctgttctagagcctgtagcttcgttcctacctttgtgtcctaacccaggtagtgaagaatggaatgaaactcattcatgtctctccgagcttcttagacactacatacaactgaaagttgaatatgatattgaagagctctacaaatgtttttgccttttgaaaagattctcgtcagcatcagagttttttctggatctacatgatagcatccttcctttcctacaggattctatcagccagcattacggtgggacactgcaattctagctccttgctcaagttgtagccattctattttgctagaaaggaagaagcaatgccgtgaatgtgcggagagacgtgttatgacaatctgcgcctccaagcagctactcaaatcccgtgctggcagattccttggacgcgtttataactttattataactaattgatgccaatgctggaagttttattgatatattcattgcatctatggatcaatagatgccatgtggttcgatatatcattcgtggagcaatggtttgaagggacctttgctgtgctttgatgttcccaggcgaatttcatgtttgcttcataacccatatgaatttcatgttatctttgtgttgctaccaaaaaggttcctggtttgaagttctttgcgtcaaattttcacctatgatctgaagtaccatccgtgcatcctagttattggaagctttacatgagctaatatatgcattatctagtgccatggacctctggtagaaatgcaaccagtctttgaaagcaaatcacaatcagcataaaataaag

SEQ ID NO: 48953 - DNA, 1533 bp, Zea Mays
tatcatgtgaagctatatttcgcagtgcggactgaaggatttgagatctggaccatcacatacagcagaagcgaaccttagaaatgataggtctactgtatttcacaatgtcgagctgcctccgttgtcccaacttgatttggaggtcctgaagaaccttcccccagagataatgtctgaaatgaatgaaatgtacaagggagaattacaaagtcttgtggacaccctcaatagtgacaagggcaaggaaaatagttcaaaatctcttgctttgcctgcagttattcgtaagtctgtacctgccgatgcaaagcttcaaggatacagagaccacagagactccatgcatttggaggaggaacatactaagggaaaatctgacaaacaactatcagaagctaaaccagccaataatgcttcatgctcaagagttagtgcatcaattgagaaaacaacaaaaagtgttacacaacttgatttgatgcctgattcgctaagccaggcagatctaacagttctgcaggaattacctgaggatgtgaaggctgatttgtttagtgcacttccactgcatagatcaggagatcctgcatgcagcacttccaatgtatctgaaagtaaatcacctaatgtggttagagctgaaaatagatcttctaatgatggtggaactgatgatctgaaaaccccaagagcaacacacagattccagctgtcaacgaccattgtcttctgttctagagcctgtagcttcgttcctacctttgtgtcctaacccaggtagtgaagaatggaatgaaactcattcatgtctctccgagcttcttagacactacatacaactgaaagttgaatatgatattgaagagctctacaaatgtttttgccttttgaaaagattctcgtcagcatcagagttttttctggatctacatgatagcatccttcctttcctacaggattctatcagccagcattacggtgggacactgcaattctagctccttgctcaagttgtagccattctattttgctagaaaggaagaagcaatgccgtgaatgtgcggagagacgtgttatgacaatctgcgcctccaagcagctactcaaatcccgtgctggcagattccttggacgcgtttataactttattataactaattgatgccaatgctggaagttttattgatatattcattgcatctatggatcaatagatgccatgtggttcgatatatcattcgtggagcaatggtttgaagggacctttgctgtgctttgatgttcccaggcgaatttcatgtttgcttcataacccatatgaatttcatgttatctttgtgttgctaccaaaaaggttcctggtttgaagttctttgcgtcaaattttcacctatgatctgaagtaccatccgtgcatcctagttattggaagctttacatgagctaatatatgcattatctagtgccatggacctctggtagaaatgcaaccagtctttgaaagcaaatcacaatcagcataaaataaag

SEQ ID NO: 48954 - DNA, 3017 bp, Zea Mays
gacgacacaagccaaaacagtgggcaggggcccacgccgtcatcgccatccccttggctcgccaccacacgcccgccacaaaggtccaaccccgtggtggaccagtcctctttcctcagctactgctcaccgccggcaccacgagcgtcaaccgcttcgccgacgcgatctcctccagcccccgctgccgcgatgcaattcctcagcgcctccgcctcagcctcctctctggtgccgccgtccgcgcacctcctccgcctctcgcggccccagcccttcccgcagctcctccgccgccgctccccgcccagacccctcgcgctcacgccccgactgccgctccccctcgtctcgcgaccctcccttctctccaccccacgcgcgcacggcggccacggtcacgggcaccaccacggccatgaccaccatcaccaccacggccacggccacggtcacggtcaccacgaggtggacgtgcacgggggaggcgggggcgcggcggtcatgcgggtggcgcgggcgatcggctgggccaacgtcgccgacgcgctgcgggagcacctccacctctgctgcatctccctcggcctcctcctcatcgccgctgcttgcccgcacgtcgcgctgctcaactcagtcagccgcctgcaggccgctctcatcgccgtcgcctttcctctcgtcggggtttctgcagcgcttgatgctcttgtaaatattgcagacggtagaataaatattcatgtcctcatggctcttgcagcatttgcttctatatttatgggaaatgcattggagggtggcctgcttcttgcaatgtttaatttggctcatattgctgaagagtattttacaagtaagtcaatgtttgacgtgagggaactgaaggaaaatcacccagaatttgctttgttgttagaaacaagtggagaagaatctgtacagttttcaaatctaagttacaccaaggttcctgtgcacgatcttgatgtgggttctcatatcttggttagagctggcgaggctgtgcctgttgatggtgaagtctaccaaggttcatcaactgtcacaattgagcacctaactggtgaaacaaaacctttagaaaggacagttggagatgccataccaggtggcgccaggaacttggaaggaatgatgattgtaaaggtgaccaagtcatgggaggattcaacgctcaacagaattgtccaattgactgaagagggccagctaaacaagccaaagttgcaaagatggcttgatgagtttggggagtactatagcagagttgtggtagccctttctttggttgttgcacttttgggaccattactttttaagtggcctttttttggtaactcaggggttcaatttaccgtggattaggacttatggtggctgcatctccctgtgcattggctgtagctccattggcatatgcaactgcaatcagttctcttgctagtaagggaattttgttgaaaggtggccatgtcttggatgctctttcgtcttgtcagtctattgcttttgataagacaggcacactaacaactgggaagcttatgtgcaaagcaattgagcctatccatggacatttgggtgtgaaaagtggtcgtagtaatccttcttgctgcactccaaactgtgaaagtgaggcattagctgttgctgcagccatggagaaaggaacaacccatcctattggaagggctgttttagaccactctgttggaaaggagcttccagttgtcgctgtagaaagttttgaatgcctacctggtaggggagttgttgctactttgagtggtgtaaaggtaagggaaaatgaaaatgagctatccgaggcatctatcggttctgtggattatatttcttcactatatagatccaatggtgaatcagagcaaataagagcagcagcaaaaagttctgcatatgggcctgaatttgttcaagctgctctatctgttgacaaaaaagttactcttttccactttgaggatgaaccccgctctggtgtttgtgaagttatatccaccttaagagagaaagctaaacttcgcattatgatgctaactggagaccatgaatcaagtgcccagagagttgctaaagctgtttgtattgaagaagtccacttctctttaaagccagaggataaattaaataaagtgaaagcagtttcaagggaaggaggtggaggtttaataatggtcggtgatggtataaatgatgcaccagcccttgcagccgcaacagttggaatggttctagcccaacgtgccagtgcaactgcagtggctgttgcagatgttctgctgttgcaggataatatttgtggggtgccattctgcattgctaaggctcgtcaaacaacttcattggtcaaacaaagtgtagctctggccttaacttgtattgtttttgctgcgcttccttctgtcctgggatttcttcctctttggttgactgtacttcttcacgaaggaggaacccttctagtgtgcttgaactcgatacgagccctgaacactccgacatggtccttggtagatgacatccggaagctcgtcgatagcttaaggaattatttcccatccaagttcaacagctctccctcaagctacaccgcaaacactgctcccttgtagattaccatgtccagcaacggccgtctttggttaaccttgttgtttctgtggcaccgtttgaatttaggcgaggggttctaacctaattttgtaggcgcccgctgtactcttttcaccaccatgtaaagaaagaaacttggcttgaggttgagctgaaggtcaaaggacagtgatgaaacatccagttacgacgtggcgcagaatcaacgtctgtgtctgttgggcccgttcgttatgtggaatacaatacatacaggtgctatacgactgttgagatcagggaagtctaatcgcctgtttcttgcttgcagaagctaggctctgctgctgagattgattgattggtttatactcgttgat

SEQ ID NO: 48955 - DNA, 2955 bp, Zea Mays
caaaggtccaaccccgtggtggaccagtcctctttcctcagctactgctcaccgccggcaccacgagcgtcaaccgcttcgccgacgcgatctcctccagcccccgctgccgcgatgcaattcctcagcgcctccgcctcagcctcctctctggtgccgccgtccgcgcacctcctccgcctctcgcggccccagcccttcccgcagctcctccgccgccgctccccgcccagacccctcgcgctcacgccccgactgccgctccccctcgtctcgcgaccctcccttctctccaccccacgcgcgcacggcggccacggtcacgggcaccaccacggccatgaccaccatcaccaccacggccacggccacggtcacggtcaccacgaggtggacgtgcacgggggaggcgggggcgcggcggtcatgcgggtggcgcgggcgatcggctgggccaacgtcgccgacgcgctgcgggagcacctccacctctgctgcatctccctcggcctcctcctcatcgccgctgcttgcccgcacgtcgcgctgctcaactcagtcagccgcctgcaggccgctctcatcgccgtcgcctttcctctcgtcggggtttctgcagcgcttgatgctcttgtaaatattgcagacggtagaataaatattcatgtcctcatggctcttgcagcatttgcttctatatttatgggaaatgcattggagggtggcctgcttcttgcaatgtttaatttggctcatattgctgaagagtattttacaagtaagtcaatgtttgacgtgagggaactgaaggaaaatcacccagaatttgctttgttgttagaaacaagtggagaagaatctgtacagttttcaaatctaagttacaccaaggttcctgtgcacgatcttgatgtgggttctcatatcttggttagagctggcgagttcttgtattctttaggctgtgcctgttgatggtgaagtctaccaaggttcatcaactgtcacaattgagcacctaactggtgaaacaaaacctttagaaaggacagttggagatgccataccaggtggcgccaggaacttggaaggaatgatgattgtaaaggtgaccaagtcatgggaggattcaacgctcaacagaattgtccaattgactgaagagggccagctaaacaagccaaagttgcaaagatggcttgatgagtttggggagtactatagcagagttgtggtagccctttctttggttgttgcacttttgggaccattactttttaagtggcctttttttggtaactcaggggttcaatttaccgtggattaggacttatggtggctgcatctccctgtgcattggctgtagctccattggcatatgcaactgcaatcagttctcttgctagtaagggaattttgttgaaaggtggccatgtcttggatgctctttcgtcttgtcagtctattgcttttgataagacaggcacactaacaactgggaagcttatgtgcaaagcaattgagcctatccatggacatttgggtgtgaaaagtggtcgtagtaatccttcttgctgcactccaaactgtgaaagtgaggcattagctgttgctgcagccatggagaaaggaacaacccatcctattggaagggctgttttagaccactctgttggaaaggagcttccagttgtcgctgtagaaagttttgaatgcctacctggtaggggagttgttgctactttgagtggtgtaaaggtaagggaaaatgaaaatgagctatccgaggcatctatcggttctgtggattatatttcttcactatatagatccaatggtgaatcagagcaaataagagcagcagcaaaaagttctgcatatgggcctgaatttgttcaagctgctctatctgttgacaaaaaagttactcttttccactttgaggatgaaccccgctctggtgtttgtgaagttatatccaccttaagagagaaagctaaacttcgcattatgatgctaactggagaccatgaatcaagtgcccagagagttgctaaagctgtttgtattgaagaagtccacttctctttaaagccagaggataaattaaataaagtgaaagcagtttcaagggaaggaggtggaggtttaataatggtcggtgatggtataaatgatgcaccagcccttgcagccgcaacagttggaatggttctagcccaacgtgccagtgcaactgcagtggctgttgcagatgttctgctgttgcaggataatatttgtggggtgccattctgcattgctaaggctcgtcaaacaacttcattggtcaaacaaagtgtagctctggccttaacttgtattgtttttgctgcgcttccttctgtcctgggatttcttcctctttggttgactgtacttcttcacgaaggaggaacccttctagtgtgcttgaactcgatacgagccctgaacactccgacatggtccttggtagatgacatccggaagctcgtcgatagcttaaggaattatttcccatccaagttcaacagctctccctcaagctacaccgcaaacactgctcccttgtagattaccatgtccagcaacggccgtctttggttaaccttgttgtttctgtggcaccgtttgaatttaggcgaggggttctaacctaattttgtaggcgcccgctgtactcttttcaccaccatgtaaagaaagaaacttggcttgaggttgagctgaaggtcaaaggacagtgatgaaacatccagttacgacgtggcgcagaatcaacgtctgtgtctgttgggcccgttcgttatgtggaatacaatacatacaggtgctatacgactgttgagatcagggaagtctaatcgcctgtttcttgcttgcagaagctaggctctgctgctgagattgattgattggtttatactcgttgat

SEQ ID NO: 48956 - DNA, 2954 bp, Zea Mays
caaccccgtggtggaccagtcctctttcctcagctactgctcaccgccggcaccacgagcgtcaaccgcttcgccgacgcgatctcctccagcccccgctgccgcgatgcaattcctcagcgcctccgcctcagcctcctctctggtgccgccgtccgcgcacctcctccgcctctcgcggccccagcccttcccgcagctcctccgccgccgctccccgcccagacccctcgcgctcacgccccgactgccgctccccctcgtctcgcgaccctcccttctctccaccccacgcgcgcacggcggccacggtcacgggcaccaccacggccatgaccaccatcaccaccacggccacggccacggtcacggtcaccacgaggtggacgtgcacgggggaggcgggggcgcggcggtcatgcgggtggcgcgggcgatcggctgggccaacgtcgccgacgcgctgcgggagcacctccacctctgctgcatctccctcggcctcctcctcatcgccgctgcttgcccgcacgtcgcgctgctcaactcagtcagccgcctgcaggccgctctcatcgccgtcgcctttcctctcgtcggggtttctgcagcgcttgatgctcttgtaaatattgcagacggtagaataaatattcatgtcctcatggctcttgcagcatttgcttctatatttatgggaaatgcattggagggtggcctgcttcttgcaatgtttaatttggctcatattgctgaagagtattttacaagtaagtcaatgtttgacgtgagggaactgaaggaaaatcacccagaatttgctttgttgttagaaacaagtggagaagaatctgtacagttttcaaatctaagttacaccaaggttcctgtgcacgatcttgatgtgggttctcatatcttggttagagctggcgagttcttgtattctttaggctgtgcctgttgatggtgaagtctaccaaggttcatcaactgtcacaattgagcacctaactggtgaaacaaaacctttagaaaggacagttggagatgccataccaggtggcgccaggaacttggaaggaatgatgattgtaaaggtgaccaagtcatgggaggattcaacgctcaacagaattgtccaattgactgaagagggccagctaaacaagccaaagttgcaaagatggcttgatgagtttggggagtactatagcagagttgtggtagccctttctttggttgttgcacttttgggaccattactttttaagtggcctttttttggtaactcagtctgtaggggttcaatttaccgtggattaggacttatggtggctgcatctccctgtgcattggctgtagctccattggcatatgcaactgcaatcagttctcttgctagtaagggaattttgttgaaaggtggccatgtcttggatgctctttcgtcttgtcagtctattgcttttgataagacaggcacactaacaactgggaagcttatgtgcaaagcaattgagcctatccatggacatttgggtgtgaaaagtggtcgtagtaatccttcttgctgcactccaaactgtgaaagtgaggcattagctgttgctgcagccatggagaaaggaacaacccatcctattggaagggctgttttagaccactctgttggaaaggagcttccagttgtcgctgtagaaagttttgaatgcctacctggtaggggagttgttgctactttgagtggtgtaaaggtaagggaaaatgaaaatgagctatccgaggcatctatcggttctgtggattatatttcttcactatatagatccaatggtgaatcagagcaaataagagcagcagcaaaaagttctgcatatgggcctgaatttgttcaagctgctctatctgttgacaaaaaagttactcttttccactttgaggatgaaccccgctctggtgtttgtgaagttatatccaccttaagagagaaagctaaacttcgcattatgatgctaactggagaccatgaatcaagtgcccagagagttgctaaagctgtttgtattgaagaagtccacttctctttaaagccagaggataaattaaataaagtgaaagcagtttcaagggaaggaggtggaggtttaataatggtcggtgatggtataaatgatgcaccagcccttgcagccgcaacagttggaatggttctagcccaacgtgccagtgcaactgcagtggctgttgcagatgttctgctgttgcaggataatatttgtggggtgccattctgcattgctaaggctcgtcaaacaacttcattggtcaaacaaagtgtagctctggccttaacttgtattgtttttgctgcgcttccttctgtcctgggatttcttcctctttggttgactgtacttcttcacgaaggaggaacccttctagtgtgcttgaactcgatacgagccctgaacactccgacatggtccttggtagatgacatccggaagctcgtcgatagcttaaggaattatttcccatccaagttcaacagctctccctcaagctacaccgcaaacactgctcccttgtagattaccatgtccagcaacggccgtctttggttaaccttgttgtttctgtggcaccgtttgaatttaggcgaggggttctaacctaattttgtaggcgcccgctgtactcttttcaccaccatgtaaagaaagaaacttggcttgaggttgagctgaaggtcaaaggacagtgatgaaacatccagttacgacgtggcgcagaatcaacgtctgtgtctgttgggcccgttcgttatgtggaatacaatacatacaggtgctatacgactgttgagatcagggaagtctaatcgcctgtttcttgcttgcagaagctaggctctgctgctgagattgattgattggtttatactcgttgat

SEQ ID NO: 48957 - DNA, 993 bp, Zea Mays
caaatatttactcagatatttcaaattaatggttgcttagtatacaaacgatattgattaacaatcctcgcatgtcgtgtctttttaagattagctgtttaaatgtggcaagtgctacacattgtttataaatatactaggtatatgctcgtacgttgctacgaaatcaatatgataaaatacattgatatacaatggctcacagtctagcataggtaggaataattgtataaagcagctacgaccattaaacaaagatgggatggacaataatacatgtagtagagaccattcctttcatcagttgcaggctattaggcttgtcattgcgcttcctcggtccatgcgttaatcctgatcacaatgccatttcagcttgtagtgcagccagctcatcgtatttagctataactttctgtgaagtagggcaagctagttgcttgtttcctgggacatgcactggatgcaccgaaagagctgcaacaggctctagaagcttagattccaactcttctccttccagctcttcaggttttgcatctagttcatcctgtaagttttttcggtgcaatgggtgcttagtgtgtaaaactatgcacaacaaggttgcaaatctcaaatgtccaccatggtaatgtgatgaccggctcgtcccttgccaaaagtgcaaaatgattaaaaccatatgtgttgagacgagaatttgttttctttctggagaatcgcaacatctatcatcggctcacctgaatgccagagtggctacaaaggtagaaatcaaattcacttggatgacatatctttgtgtcaaccacagttactaagaacacaataaaattagtatctagaaacactaagaatgcagaggagagccatatatatatatatatatatatacacacacacacacacatacatatatgattcatcaaatagtagtaatgtgccctcatcagtttcaagaacaattgcacaatagcaattttgttttac

SEQ ID NO: 48958 - DNA, 2725 bp, Zea Mays
tattgattaacaatcctcgcatgtcgtgtctttttaagattagctgtttaaatgtggcaagtgctacacattgtttataaatatactaggtatatgctcgtacgttgctacgaaatcaatatgataaaatacattgatatacaatggctcacagtctagcataggtaggaataattgtataaagcagctacgaccattaaacaaagatgggatggacaataatacatgtagtagagaccattcctttcatcagttgcaggctattaggcttgtcattgcgcttcctcggtccatgcgttaatcctgatcacaatgccatttcagcttgtagtgcagccagctcatcgtatttagctataactttctgtgaagtagggcaagctagttgcttgtttcctgggacatgcactggatgcaccgaaagagctgcaacaggctctagaagcttagattccaactcttctccttccagctcttcaggttttgcatctagttcatccttgcaaaatatttccacgtcgatctggttgtctgtgtgaacgatgatcttcaggacaaaacagtgtgtgatggcgcttttgcaccactatgaatgtaactagaggaaggtagccctcttccaagctggcacacgcctaagtacaaacacaaacaataaattatgtaaacacagttaggagaatacatcaaaagagaataatattgcgaagaaaaaacctttctaattgcatccacttcataatgcaagaaccggctaaactgctcctcactggcatgtctctgcaaatcaaggaaacaagtaaagtaactccaggattcttctccaagtatacaaggtgtagctgtttagctgttgaaatatgtactaacataaagaaaactggcaggtctttttctttacatgcaaggaaaagagatttaagtttagacaacaacaaaattcattcaaacagacaattacgaacccatagaaaattttcctatttggtttgcggctcccatttgccttatagaatggcacgagtagttccctgaagcaaaaatatgacatttaaaaaaaggacaaatcatttatctgaagaactaagttagacaactaagatgtttagcatgcctgatcattccatagggaacaaatcccttttgtggatccttcacttgtgtgaaaatatcagctatgatattttccctatgaccatgagaagacaccaagcacctatactttgaaaattctagccaatccatttatgcaacaactaatcataaacttttacatgtccaattagaaaccagaaacacacagagatctctctccaataggccatgtcaataagaagtcaaggtgaaacaacaaaatgtttctttaaaattctgacaaggtggagcacttgacatgtagttttgcagaaagttgtgaggcctcaacctcactattgagctggcttcgaccgacggcgcgacgcgacgtgtcacagacttcacccatcatattctcaatgcaagatcagacaaaatttgcagcctaggaacacctaccatgaagcaaaactccctagttctataggacaaaacactactcgcaactaattagaacttaattaatactcattccttcctctataaaaaggccacctgcatgtatccatattcagctccatgaacaatcctaaatttcataaaaatctactgttgtttgattctacacatgtgtatttcatttccagaggcaggaaatctccatggatcccacaccaaccgcagaaaacaccactgtgctggggaagcaacgaacccaatctcctgcgttgagaaatctagttaccattcaaaatataactgacccgatgagtggccaagccacgaactacaatgttgcaatgttcttcttcgcatgcacactgaatagatggttttccaagctccctttggccatgaactcatacacgagaagtagttcacagtcctcccatccaagagcttcacaaggttcagatgggagagtcttcctagaaaatttatctccgacggcgtggatggcgctcaccttgattacctcaccgaagggaagcttcctcccatcccatgtcacggccgcgacagcaggggccaacaacctgcagcagttctttctagctaccccgccaacaccttacgcttgtgcttcttcttcaagctgtccacccacacatccgtcgccccctccaccgaccagcccgacctcatcccttgcgctgatcctccgcttcccttgccctgggtcccttgcccgcctctgtgacgccaggctccactgcgtgcggatgggggttgagtgcgagcggtgaggggcggctacgactggctgtggctcgcatagactaaggagacaacagagaggaaatcagggggcgacgcatgcaagcgggcgtatccaaatccttgatgcaacgctaggcgctgatgtcagcgtttccaaattggggaacaagggttgcgtctcgtgcatgtcgccggcgttgatggaaggtgggcgggtggcgatggctcgggttgtcggcatggcgttgatggcggcatggtggcgcagcgcgtggggaaggggatcgcctggggaagggcagcgttgaaggcgggatggtggagcagggtgtggggaagggcggtgatggatcgggtggctcgagttgaggtgatggctctggtggcggagcgagtggggaggggatcgcgttggatgacattgacg

SEQ ID NO: 48959 - DNA, 1517 bp, Zea Mays
ctcgcatgtcgtgtctttttaagattagctgtttaaatgtggcaagtgctacacattgtttataaatatactaggtatatgctcgtacgttgctacgaaatcaatatgataaaatacattgatatacaatggctcacagtctagcataggtaggaataattgtataaagcagctacgaccattaaacaaagatgggatggacaataatacatgtagtagagaccattcctttcatcagttgcaggctattaggcttgtcattgcgcttcctcggtccatgcgttaatcctgatcacaatgccatttcagcttgtagtgcagccagctcatcgtatttagctataactttctgtgaagtagggcaagctagttgcttgtttcctgggacatgcactggatgcaccgaaagagctgcaacaggctctagaagcttagattccaactcttctccttccagctcttcaggttttgcatctagttcatccttgcaaaatatttccacgtcgatctggttgtctgtgtgaacgatgatcttcaggacaaaacagtgtgtgatggcgcttttgcaccactatgaatgtaactagaggaaggtagccctcttccaagctggcacacgcctaagtacaaacacaaacaataaattatgtaaacacagttaggagaatacatcaaaagagaataatattgcgaagaaaaaacctttctaattgcatccacttcataatgcaagaaccggctaaactgctcctcactggcatgtctcttgattacctcaccgaagggaagcttcctcccatcccatgtcacggccgcgacagcaggggccaacaacctgcagcagttctttctagctaccccgccaacaccttacgcttgtgcttcttcttcaagctgtccacccacacatccgtcgccccctccaccgaccagcccgacctcatcccttgcgctgatcctagggcagcataggagggagagtcaggacaaagacgctgacatcgggaacgagatcccagcggggaccacctccgcttcccttgccctgggtcccttgcccgcctctgtgacgccaggctccactgcgtgcggatgggggttgagtgcgagcggtgaggggcggctacgactggctgtggctcgcatagactaaggagacaacagagaggaaatcagggggcgacgcatgcaagcgggcgtatccaaatccttgatgcaacgctaggcgctgatgtcagcgtttccaaattggggaacaagggttgcgtctcgtgcatgtcgccggcgttgatggaaggtgggcgggtggcgatggctcgggttgtcggcatggcgttgatggcggcatggtggcgcagcgcgtggggaaggggatcgcctggggaagggcagcgttgaaggcgggatggtggagcagggtgtggggaagggcggtgatggatcgggtggctcgagttgaggtgatggctctggtggcggagcgagtggggaggggatcgcgttggatgacattgacg

SEQ ID NO: 48960 - DNA, 1677 bp, Zea Mays
tcggctttcactcgcttgcgcctcccgcgacactcgccagtcgccaccccacctcgcctccccgttactccccccgccatcaatgccctcttcctccacctgcgtccctctcctcctccgccgcttcgttctcctcctctgctccgaccaccacttcgcagctggctcgctctcgacggcgttgccgccaccgagcccgtcggcgagacggaaatgaagcctctgcacctgcggagcagcggcagcttcaagcgcctgctgctcctctccatcggccaccggtcgccgccgaccacaaatccgccggtggcggacgccgacgccagggagtccccggaggagccgggttccccgcggtgtagcagcagcgggcccgcgtggcgctgcttctcgtacgacgaggtcgaccgcgccacgggcgggttccacgagcgcaacctggtgggccgcggcgggtcctcggaggtgtaccgcggcgagctccccggcgggcgcgccgtggcggtgaagcgcctgctgggcgcgtcggcgtgcgagcggcgggagcgggacttcctggcggagctgggcacggtggggcacgcgcgccaccccaacgtgtgcggcctactggggtgctgcgtcgaccgtgacctctacctcgtcttcgacttgtcccgccgcggctccgtcgccgccaacctacacgacgaggcgttgccggcgatgggttgggcggcgcggtacggcattgcggtgggcacggcgcgggggctggagtacctgcacaaggggtgccggaggcggatcatccaccgcgacatcaaggcctccaacgtcctgctcaccgacgacctgcagccgcagatctccgactttggcctcgccaagtggctgccgtcggaatggacgcaccgcgccatcgcgcccatcgaaggcaccttcgggtgcctggcgccggagtactacacgcacggcatcgtggacgagaagacggacgtgttcgcgttcggcgtcttcctgctggagctcgtcaccgggcggaagccggtggacggcagacaccggagcctcctcagctgggcccggccgctgctgagcggcgacggcaaggtggaggcgctggtggacccgaggctcggcggcgactacgacggcgagcaggcgcggcgggtgacgttcgtggcgtcgctgtgcgtcagggcggcggcgacgtggcggccgtccatgaccgaggaggacaccggaaagcacatgcctccgtgcgtgcagctaccggctcagctacagcccactgcccactccactgtttgcttagtttacctgtgacagaggtgctggagctgctggaaggcggcgagatccggcaggaccggtgggcgatgccagagacggcggtggccaacgacgacggcgagcagcagccatggtggttcgacgttctcgacgacttcgacgacgacgacgacgaccaagacgcaggcggcgaggagttcagcaccccgtccccttcctcctcctcgtcgtcgtcaaccacaagcaattagccatttacatccccagatacctggactcactgtgacgtggagttctgctagtttgtcctgataggggggagggcgggtcccaccacctgtaaatacaaaaaaaggttatctcttgaaaatgtttattactgggtgacgatgaaatgtaagc

SEQ ID NO: 48961 - DNA, 1567 bp, Zea Mays
gcccatctcagttgacgccgcgccgtgggagttagctggttgtaatgagaagctggacctgttaggccgaagagttctcgttgcaagtctgtgcctcagcgatgggttcaggcaacttgatcgtgaagaaggtggtaaagcacagctcctttgatctggacatacagcttgataagagttggatggaggatgttacctgcccgatctgccttgattaccctcacaatgcagtgctactgaggtgcacgtcttatgagaagggatgcaggccgtttgtttgcgatacagaccagacccgctcaaactgtcttgagaggtttaaatctgcatatgaactgccttccaatgtgaaagtttcatctttagccgtgcctcctcttgatagcattattcatattgtgccgtctaacgcaaacaaccgccccagctgccctttgtgtagaggtgatgttattgggtgggttgttattggtgaggctcggctgcatcttaatcagaagaaaaggtgctgtgaagaggattgctgctcgtttgttggcaacttcaatgagcttcagaagcacacgcaacaaaagcatcctgattcacgcccttcagagatcgatcctgctaggcaagttgattgggagaatttccagcaatcttctgatatcgtagatgtcttgagcacaatacatgcacaagttccaaacgggattgttctgggagactatgtgattgagtatggggatgatgacactggtgaggactatgaagttttccgcagggtcaggacgaactggtggtcatgtattttctgcagggcgttttcaagatcttcaagaagtcgtagaagatccagagcaagggaaagaataggcagtggaaggaggaatggcaaccaggttaatctagaaaattttaacctcgtggttccgacacaacctgttgaattaagggaaattaggtttgatgaaattgatgatgaatacatagtcacaggggccattcctagtatcgcagcaccgggaagaatggctagtttccattacagggatacaagatatggacgttgatgcatagggtctgcagtaaaaaaaggaatagatgttatgcaatttaccgatcaacgtaacgttgtaactccgctcatttggattccttttccacctgccctcggtaggtgctgccgcagttcaaacttatctgtgcataaaaagtagcaacagaacctcgctgttcgtttgaatcaggcctcgtcattctagtttcgatcttgtatatatttagcacccgtctctataggatgttggtgacagttcttttcggaatgcttctgcgatgtagcgcggttttacatagtaaccctgaaacaaacttcagcccgctctaatggggatttgtttggagactcgtgtctcgctgggtagcccttcagataagagcttctgagccgtccatggtgatgctgttcagttagtttaagatgctataatattgagacaagcagggaaggcacgtactgttgacgtttccttttgaccctaccgcctgtgttattctaataaacgcatgtcttgtacattct

SEQ ID NO: 48962 - DNA, 997 bp, Zea Mays
tacatataaaatttgctactcattccacaacagtagtagcttatgaattgtaattatctggtaaaaaaggccaaacaaacggcaataaaaatgaacatatcactaccccttttctacacaaagcgagcaaaccagtcgatgccatttcatcttccaagtccgccaggtagctgccagaagattcagtatgcccagcattcattcttctagttcttctgaagacggcaatcaaacttcaggttgcataagaagccgcatctaatttgcaaggaacatgactacaaaccattccagaactcaaactgagcggctgaccaaagaaagctcatgtatttctgtaagcatccactcttctccagtttgtccaccaagcactatcgcctttgttcctccaacaacacaggtgctgtggccccaggcgaaacggggaggacgaccaggaatattcaatattctccaggtcggcttttcttcagttggatccaacagataaagctgtgacgctgagtgaagacctgccactgagccgccaaatatcaaaattcttccgcctggcaggctcacagcaacatgatcgaggcgaggaggtgggcctgcaccagctggatttccagccccaggcattccactaccagtgaggcatcgccagcaaaactcttcttcactcaagtccattgtgtacacatcactagaccggagccgcagagggccgctcttagcaagaccaccaaacatcaggatcttcctgccaccataaacagacattgagtgccccagcctagaaggtggtttccaggatgcaggaacttctctccaaactggcctatccatggctacatcaagaagatatgtgtcactgaggagtacacctgaatcagcacagccaccagaaacaaccaacttcgttccatccaaagtgcaggagctgtgccatgaacgtggaactgggggtgcaactccaggtatctcacgccaggttggttgttttgcatccaaa

SEQ ID NO: 48963 - DNA, 1946 bp, Zea Mays
ctttacttgaggctgctgcggtgttgcccacagcctagcctggtcccgatagtgcgaggtagaacttacgggactgttcaagtaaaaaaatatcgttgtatttcggcccagctgcccgaattaacaactttaaaaatggcatgtagagtttcacatcatcaacaaaataccgatcgcccgaccccttcagtgccttgactcacgcccgcggcaaccggcgacgaggcggcacgaccctccagtccggagtccgccatgcctcacgccgccgccaccgccgctgcggcgctcccgcgtgcctctctgctcgttatctcggcgccgctccgcgactccctcgccgcggcgccgtacgagccccccgcgggcgcatccgcctccgtcaagtccctcctcgcctctctcctcccttcgccttcccctccccagccccagcttcaggagccggcgggtaaggagtctggggacctcctcctcttctgcgctgccgtactcgcggcctccccggagtaccccgcgctgcactgggtcccggcgagcctcgtgggcgcggccgccgccgcggtgaacgagctggcggcggcgggaggttggggcagcgttggggatatggtggtggccgtggcaccggaggtggtgcctcctctcaaggccgtggtgaaggactcgtgcgtcgatgctgacagcgacgagattggggctgtgaagccgcccaaggagcacgcagcagtcgccgcgcaccagttccggtggctggtgtctcaggtaagctaccctaagctcggggatttgtgttcgttagtcattccatgtgccctgacaaccttagatcattggtcaccagaagttaaggtacagggaatggtaagctttgtacacatagcgaagaatgtgaaagcaacggaattaagtttgtatgaagatgccatacttgatgcgtgctgtcagaacattcctgcagatgatgagttatggtaccaggttattgaggtatctgtgatgttgctgacattcacccagcggagcaatcctcgtagcccctggtatgatcgaatgcttagtgagatgttgggccacctggaacggcagccactaaataaagagcgtcgtgttgcatggttgacccttattgggccagtttttgatgctatgggcctcttcctgttggcacattttcgccgccttttctcactgtttttccaatggatgcacactgatgataataagacagttcttctgactttaaagcaaatacatgccattatcaagcttacctggatcaggaagtcaccttatactttgagatccacttatttgtggataggctggtggacgagcttgttctattatataaagaatcagccacaaggagcaaccgtgaaatcatgcgagatcatatcctggagatacttgtactgcttcagaactgcaagggacatcaatttgaggaagcttggaagaaacatgaactagacccagacttgacgatgctgctgtccactttcaataagctttgtataaaaaacagttcaccgtgatgttgagttcaactacatgtgttatcagtgtaaatatttcaccatcgcctatcctgtcactgaatatttcactactgcctattctgccactctcatctgctgaaggaaatcagccttgattcttgtggcagatccattttaaaaaaaaatctagtacctgtagaggcagctggacaaggtaatgaacaactcatgccttgtcgacagccttcttcctctgcatccgttctggtacacgcgtttgtgttctgtgtgacttcatcgtggattcagtgcagctgactgcactgcatgcaacgtgtatattttgctcacactcagtgtggctcacagcttgatgatagcattagttgaacagcgcgcatgtacttaccgatacagctgactactgacagcttatttgtagcc

SEQ ID NO: 48964 - DNA, 1735 bp, Zea Mays
caactttaaaaatggcatgtagagtttcacatcatcaacaaaataccgatcgcccgaccccttcagtgccttgactcacgcccgcggcaaccggcgacgaggcggcacgaccctccagtccggagtccgccatgcctcacgccgccgccaccgccgctgcggcgctcccgcgtgcctctctgctcgttatctcggcgccgctccgcgactccctcgccgcggcgccgtacgagccccccgcgggcgcatccgcctccgtcaagtccctcctcgcctctctcctcccttcgccttcccctccccagccccagcttcaggagccggcgggtaaggagtctggggacctcctcctcttctgcgctgccgtactcgcggcctccccggagtaccccgcgctgcactgggtcccggcgagcctcgtgggcgcggccgccgccgcggtgaacgagctggcggcggcgggaggttggggcagcgttggggatatggtggtggccgtggcaccggaggtggtgcctcctctcaaggccgtggtgaaggactcgtgcgtcgatgctgacagcgacgagattggggctgtgaagccgcccaaggagcacgcagcagtcgccgcgcaccagttccggtggctggtgtctcaggtacagggaatggtaagctttgtacacatagcgaagaatgtgaaagcaacggaattaagtttgtatgaagatgccatacttgatgcgtgctgtcagaacattcctgcagatgatgagttatggtaccaggttattgaggtatctgtgatgttgctgacattcacccagcggagcaatcctcgtagcccctggtatgatcgaatgcttagtgagatgttgggccacctggaacggcagccactaaataaagagcgtcgtgttgcatggttgacccttattgggccagtttttgatgctatgggcctcttcctgttggcacattttcgccgccttttctcactgtttttccaatggatgcacactgatgataataagacagttcttctgactttaaagcaaatacatgccattatcaagcttacctggatcaggaagtcaccttatactttgagatccacttatttgtggataggctggtggacgagcttgttctattatataaagaatcagccacaaggagcaaccgtgaaatcatgcgagatcatatcctggagatacttgtactgcttcagaactgcaagggacatcaatttgaggaagcttggaagaaacatgaactagacccagacttgacgatgctgctgtccactttcaataagctttgtataaaaaacagttcaccgtgatgttgagttcaactacatgtgttatcagtgtaaatatttcaccatcgcctatcctgtcactgaatatttcactactgcctattctgccactctcatctgctgaaggaaatcagccttgattcttgtggcagatccattttaaaaaaaaatctagtacctgtagaggcagctggacaaggtaatgaacaactcatgccttgtcgacagccttcttcctctgcatccgttctggtacacgcgtttgtgttctgtgtgacttcatcgtggattcagtgcagctgactgcactgcatgcaacgtgtatattttgctcacactcagtgtggctcacagcttgatgatagcattagttgaacagcgcgcatgtacttaccgatacagctgactactgacagcttatttgtagcc

SEQ ID NO: 48965 - DNA, 1679 bp, Zea Mays
aacaaaataccgatcgcccgaccccttcagtgccttgactcacgcccgcggcaaccggcgacgaggcggcacgaccctccagtccggagtccgccatgcctcacgccgccgccaccgccgctgcggcgctcccgcgtgcctctctgctcgttatctcggcgccgctccgcgactccctcgccgcggcgccgtacgagccccccgcgggcgcatccgcctccgtcaagtccctcctcgcctctctcctcccttcgccttcccctccccagccccagcttcaggagccggcgggtaaggagtctggggacctcctcctcttctgcgctgccgtactcgcggcctccccggagtaccccgcgctgcactgggtcccggcgagcctcgtgggcgcggccgccgccgcggtgaacgagctggcggcggcgggaggttggggcagcgttggggatatggtggtggccgtggcaccggaggtggtgcctcctctcaaggccgtggtgaaggactcgtgcgtcgatgctgacagcgacgagattggggctgtgaagccgcccaaggagcacgcagcagtcgccgcgcaccagttccggtggctggtgtctcaggtacagggaatggtaagctttgtacacatagcgaagaatgtgaaagcaacggaattaagtttgtatgaagatgccatacttgatgcgtgctgtcagaacattcctgcagatgatgagttatggtaccaggttattgaggtatctgtgatgttgctgacattcacccagcggagcaatcctcgtagcccctggtatgatcgaatgcttagtgagatgttgggccacctggaacggcagccactaaataaagagcgtcgtgttgcatggttgacccttattgggccagtttttgatgctatgggcctcttcctgttggcacattttcgccgccttttctcactgtttttccaatggatgcacactgatgataataagacagttcttctgactttaaagcaaatacatgccattatcaagcttacctggatcaggaagtcaccttatactttgaggctggtggacgagcttgttctattatataaagaatcagccacaaggagcaaccgtgaaatcatgcgagatcatatcctggagatacttgtactgcttcagaactgcaagggacatcaatttgaggaagcttggaagaaacatgaactagacccagacttgacgatgctgctgtccactttcaataagctttgtataaaaaacagttcaccgtgatgttgagttcaactacatgtgttatcagtgtaaatatttcaccatcgcctatcctgtcactgaatatttcactactgcctattctgccactctcatctgctgaaggaaatcagccttgattcttgtggcagatccattttaaaaaaaaatctagtacctgtagaggcagctggacaaggtaatgaacaactcatgccttgtcgacagccttcttcctctgcatccgttctggtacacgcgtttgtgttctgtgtgacttcatcgtggattcagtgcagctgactgcactgcatgcaacgtgtatattttgctcacactcagtgtggctcacagcttgatgatagcattagttgaacagcgcgcatgtacttaccgatacagctgactactgacagcttatttgtagcc

SEQ ID NO: 48966 - DNA, 1575 bp, Zea Mays
ttctcgtctgataaccatggttatcgcatgcagccatcaatgatttttgtacatgatacaaacgatgcaactcatgcacctgatgcaaagaagcagtatcagacacaaaagttcttgttgcatgaatgacaagacaacttaggtttgactaacaagtggttgtctacttatcactagaaagatgaaggtttatgcagcataagcagtagtttgcagaactacaatagtacaatatattatgaaactggagcagtctgttaacctctcgtctatgtgttgcaaatatgcctcgcaaatgaaaaggctcaggagtcgagacccattagggtgcctgatctccttgctttcttatgttctctctctgtctatctggtgaatccttatgatatggacgacgagagtacaaggcttacctgctgtctgaagaccttatcatgctccacgattgttgtccgaactgagtccttgctgtctcgtacgcagtgctcgtccattggctcttccaagatcatagccactggcaatctccagatgttagcagggacgcagaatgggaggaagcttgcgcaactctatcctcagcacccattactcatctcagagcctatgaagcaaacagcgcccttttgtatctctcctcgtgcttatgatcaaagggttctgagtaagacacttggtgagtagcttccacgatgtatctctcctcgtgcttatgaagcaaacagcgtccttttgtactagaaacaagaagagatgccaaccagaagtgaagaaaagctagcaatgcaatggctgacaggctgtgtgaaagatgatgggtaagcaagataccagggcggcaatgcaaaaagatgaggagctggagatggttagttagcaggaggtatgctgctgcgttgctatttgtttatccaattcgaggaaagatcagggaaccaagtgcagccagcagccaagccaatcggagagccaaatctggttggtttaatgaaacaagaagcctacctaaaaacatgtgaagcagatatgccacgcagtttttttttgccgcgattaaagatatcaggattttttggacttggcaacacctctctctctccatctgatagataagctaggccatacatatcttcacatgcttgtagtttgccggagagatctgaagatacccggggcccacatccatgagttatcctggctgtccatcctcgttacaataacaattctgggatctgcccacagcctcacaaaactaaactgccgattgagcttccatgtgtgttataaattctttagggcttattcggttagctctcaatccatatgattgaataggattctatgggttaaaattctaaacaagtcaaactttttaaattatttcaatccaatctaatccatgagtaacgagattaaccgaacaaggccttagtctatggctaatagattgtatatataatcgtgcaaaacaatgttttacactgtttacataatagagattgaaatgagagatataaatgagtaaactgttgaagatagcattagggtctatttgagtacaatgttttttaaaac

SEQ ID NO: 48967 - DNA, 1965 bp, Zea Mays
gccattcctgtccatttcctgctcacgaagcggaagccgcccatggccacgcggccgtcgctgcggtcgagcgacggcgcgcgcccaagaagcaagagcggggccggcaggcccccgtccagctcgcgcagccccggcccgtcgcgcccgtcctccgcggcggcggccgacaagccggtgccgtccttcctccgccccaccgttagctcgtccatgcacagctcctcgtcgtcctcctctctgccgttgccctgcgcctcctcctcatccgccgcaggctccaagggcgccgccgccgctacggcgaggcggtccgccgacaaggccccggcgcggccggtgggcgcgccgcggccgatcacgcccaaggacagggcctccgcgcagcctgtgggcgcgccgcggccgatcacacctaaggacagggcctcggcgcagccggtgggcgcgccgcggccgatcacgcttaaggacaaggccccggcgcagccggtgggcgtgccgcggccggccaaggccaaagcgccggcttccgcgtcgctgtggggcgcggtgtcgccgaggcagttgatgcagagggcgtccaacgcgttcaaggctagcagtaggtcccgcagcaagaagggcaaggaggaggccgcggcatcagcgtcgtccggcggcaagggcggcgctggtgcttccgccagggccaaaggccagacgtcgagagcgcagcaccagcagcagcagccggagacgcccgccgagccgtcgcctgccgtgactcccttggaactggaagcggaggagcctgtcctgttggagtccgacgctgcaggccagaatggacaggacgtcgcgacgtcgcaggaggctgccagcactgacatcacgactgtggcggtgaggtgtcaagaggagcaggtcggcgcagggcagccgaaggaaaaagcggaggcggagatgtcggatttgcaagaggagaggccgcagagcagcgaggtcgtggagacagaaacgggggcccatgagcgcacggacgatggctcaccggccgtcgttggagaagcagcagcaacacctgagggagaagatgagcttgcaaccagcgcggcagaagagaagatcgtcgaggagatccagcgagcagaggcgactgagaactcgaaggcgaacgcgaaccctgaggaaccagaccaagaaaccggcgtgatctccgaagaacccaaggagggaacgagcgtggtctctgaagaaccaaaaccaaaggaggcagctgatcctaccactgcgcagaagcgcgaggaggcgtccgacgagccaaaaacggctgccggatcgaacgcgtcagctccgacgacgccactgacagaagcggccaactacgacggcaacgacgacgtggaggcaacgcctaaacaggtgagcgcttcggagcccgtgacgccggtggcagaaggcatcagcaagggcaaggaagtgatggagacgcagcagcagagcgcgtcggcgccgacgacgccggcgtcgaagcaggcggcgatccccgaggacgcggcgtcggcgctggcgttcagggggcgcagggtgaggacggccatggagaggcggtcggaggaggagcagcccaagcggaaggaggtggcgcggagcaacgacgtgatcgaggaggccaagagcaagctgatggagaagcggaagagcaaggtgaaggcgctggtgggggcgttcgagaccgtcatggacagcccccgggcgagctgattcgagttttttttttttggagggaagatcggtcgagtctcgactggcgctggcggtggtgtctgtctggtttgaattttggtagggttctctttggatcgttgctttcttgtttgttggtcggtcgttttgcttcttgtgatcactcgaacaaacggagatgtgcgtctcattcctgatttgatcatttaatttcttgatgaacctgttctttacgag

SEQ ID NO: 48968 - DNA, 1124 bp, Zea Mays
atctactgcgtcgtcgtcctctgttctcgacccttccccgacccacgcggccacgcccatcttcattttcctctccatcacgcgcggtggtgcatgcgatctatcactcgtgaggaagagggcgtcgggaagtcatggcttgggctggggataggcggcggcagcggcggctgcgatctgatgcagcggaataaccgaccaccggtgcagttcgacctgctgttcccgccgcagggcgtcgtggaaggagttgccgcgagcaagaaggcggagaaaggcggtggtggacggaagaggctcaaggtcgttacgggcacggccgacgaggatggccagcagcccccaggcgcgaggaagaagctccggctcaccaaggcgcagtcgacgctgctcgaggacaccttccgcgcccacagcatactctccaacgcgcagaagcaggagctcgcacgacaagtggatctcagcgccaggcaggtggaagtatggttccagaacaggagggcaagaacgaagctgaagcaaacggaggcggactgcgagatcctgaagcgctgctgcgagagcctgaccggcgagaaccagcggctgaggctggagctcgcgcagctgcaggggtcggaggctgggctctacctccagtcgtcgttcccgccgctggccgcggccatggcgagcgtctgtccgtcgtgcgacaaggtcatcaccgtggcgagcggcggcgagacaagcggcagaagctcgactagctactcctcgtgatgcgctgggttcaataatgggcagtcgttgagacctgaccatttgagaggataatgggcatttgcgataatggcgcaggcagcaggattggcagacagtgccactgccctagctaaccggttgcgcgctctctcctctctctctcaagaatatttgtcgaatcggcaagcagggcaggcagagaagaaggcagctgtatttcttttctatcaattggaggtaggcagcaattcaggtctccgtctctccatctctcatcctctctctgtaatatgcggattaattataacgttatccacttcttccattctttgtgcttgttaattaagtgttttgtgcttgttaattaagtaaatatgtcc

SEQ ID NO: 48969 - DNA, 2513 bp, Zea Mays
ggtcgctatagagcaaggatcactatcaaatcttatagcctgaacgtacctgtagatgttagtgactaaaaattaattaaaacaagtaaacattaatcgctaaattgcatggtgatttatttctttttaatattgcttgtatatttatttcatggtttgtttatgtatggacatgactataatatgcaattgtgttctttgtgcttatatgatattagattcgagttgaaagtcgtttcaaatgtttgttatttatttgcattcgtaataatttattcaaatgtctattatttatttggtaatttttttaatcaatttttgattaatttaaaaatgcatttcgaaataaaaaaagaaaagaaaaccctccctaaccctaaggcccactagggcccatctacctaactctccctcccacgccgtccctatctcctcccgacatcgccgtcgtcgcccattcgcccccgtccctgcagtcgcccgtgctccgcctgctccaccagggcgcctcgccctaggggatggtctccgaccacctcccttcaccgccaccacgtgctcagtgacgcctaggtcatcggcgctgaagtttggaggccctgtacgtgcttcacagagatcgccgaccatgggctacgcagagatcgccatccgcccctctgggagcggcaagaaaatacagaggcagggtggcctatctcgaagattttcaaatgtgtcctattacggtctcacaaccccgccatataaactggtatgatgctctggaaccttatatgagcaagaggacagttgaacttcactggggtaagcaccatcaagattacatggatggcttgaataatcagctggctaccagccctctgtatggatacactctggaggatctgataaaaaaagcttataacaatgacaatccattaccagagtataacaacacagcacaggtaactcgtttatgataccccattcattatattttgcttgcactgaccatcttcttcctgtcatttgttttctttcaaaaagaaaaataatgcaatttgtgctttcgccaatagtaggatggttgggtttggcttgtctgtgagtttctttctattttttctgaagtacaggcaccactgattcaagctactgatttcctgaattgctctttctatagcaagtttataagttcagtttatattccattgaatatttgttgcagtgaagagaaatgagagaaagcttttggttgttcatacacgaaatgctatctccccacttgcttttggtgacattgtatgtttactagactccctttttccttttttgtgttttctaaaatgttttctaaaattttatttcgtgccaaatattgactcttcttttatctccagcacgcttactacttagactacaaggtgtgtgttccagttctcttttttggtccttaacacttaattttgaattttgacaagttagttatagcttagcagaaaacttctatggttctttgtttgtcaacttttcaggatgataagctaacatatgtcacaaacttcatggaccatcttgtctcttggcatactgtcactctacgcatgatgcgtgcagagtcttttgtgaaccttggtgagccaaatatcctagaggcttgagctacagatacaccctagttatcatcatgaggcattcttcggatacatcggatcaaatcctgctggaggagccagagagttggaaaatctcatgtctcacaagaaatgcttatcaccccaatgtcatatacgccaagataagctgctgggatttcaccattgcccttggatattcctacaaggaaatcactagtcagcatccagtttgaagacatgcaacaaaacaactctagaagctatggagctggtagattctggagttggcagtaaggcagtgatccaacttgggctttgaagccatggtgctttctctagacagctattatgtctgtagtgttgttagaataatcctggttctgtgttttcataacttcatcatgctagtgttctgctgtagcggaacacagaatggaacggaacgatattcttgttttactggttgagcactacacgacgattgtttttctagggtgttctggacaaagaaagcttgtaccttaaaacaggaggatacaagaagctggagtggttgtctgaaggcttttgaactgcttgaagcattaggttagctctggagattttgtgaatgatctagctagctatctgtaaatgatctagttgtgaatgatattataattctgatgcttttgtgaatatataattgtgtttgtgtatattgattaactgtgtatgtctttatgatttgtgtataaaaatctgtgatttgtggtgcttaattaaatgtatattattattaataacaactataaaagggcgactttctgttggttgctaaatgtatagtatgacgacttacggttggttgctaaatctataatacagcaactcacggttggtcgctaaatatac

SEQ ID NO: 48970 - DNA, 2165 bp, Zea Mays
ggtcgctatagagcaaggatcactatcaaatcttatagcctgaacgtacctgtagatgttagtgactaaaaattaattaaaacaagtaaacattaatcgctaaattgcatggtgatttatttctttttaatattgcttgtatatttatttcatggtttgtttatgtatggacatgactataatatgcaattgtgttctttgtgcttatatgatattagattcgagttgaaagtcgtttcaaatgtttgttatttatttgcattcgtaataatttattcaaatgtctattatttatttggtaatttttttaatcaatttttgattaatttaaaaatgcatttcgaaataaaaaaagaaaagaaaaccctccctaaccctaaggcccactagggcccatctacctaactctccctcccacgccgtccctatctcctcccgacatcgccgtcgtcgcccattcgcccccgtccctgcagtcgcccgtgctccgcctgctccaccagggcgcctcgccctaggggatggtctccgaccacctcccttcaccgccaccacgtgctcagtgacgcctaggtcatcggcgctgaagtttggaggccctgtacgtgcttcacagagatcgccgaccatgggctacgcagagatcgccatccgcccctctgggagcggcaagtttttttccccatctgtggttgagcagaggttcctggagaccatgaaggccatacagggggcactgataatgtcctccagcattcagatcattctaggctacaaccagctatggggtattttctccagaaaatacagaggcagggtggcctatctcgaagattttcaaatgtgtcctattacggtctcacaaccccgccatataaactggatgctctggaaccttatatgagcaagaggacagttgaacttcactggggtaagcaccatcaagattacatggatggcttgaataatcagctggctaccagccctctgtatggatacactctggaggatctgataaaaaaagcttataacaatgacaatccattaccagagtataacaacacagcacagtgaagagaaatgagagaaagcttttggttgttcatacacgaaatgctatctccccacttgcttttggtgacattcacgcttactacttagactacaaggatgataagctaacatatgtcacaaacttcatggaccatcttgtctcttggcatactgtcactctacgcatgatgcgtgcagagtcttttgtgaaccttggtgagccaaatatcctagaggcttgagctacagatacaccctagttatcatcatgaggcattcttcggatacatcggatcaaatcctgctggaggagccagagagttggaaaatctcatgtctcacaagaaatgcttatcaccccaatgtcatatacgccaagataagctgctgggatttcaccattgcccttggatattcctacaaggaaatcactagtcagcatccagtttgaagacatgcaacaaaacaactctagaagctatggagctggtagattctggagttggcagtaaggcagtgatccaacttgggctttgaagccatggtgctttctctagacagctattatgtctgtagtgttgttagaataatcctggttctgtgttttcataacttcatcatgctagtgttctgctgtagcggaacacagaatggaacggaacgatattcttgttttactggttgagcactacacgacgattgtttttctagggtgttctggacaaagaaagcttgtaccttaaaacaggaggatacaagaagctggagtggttgtctgaaggcttttgaactgcttgaagcattaggttagctctggagattttgtgaatgatctagctagctatctgtaaatgatctagttgtgaatgatattataattctgatgcttttgtgaatatataattgtgtttgtgtatattgattaactgtgtatgtctttatgatttgtgtataaaaatctgtgatttgtggtgcttaattaaatgtatattattattaataacaactataaaagggcgactttctgttggttgctaaatgtatagtatgacgacttacggttggttgctaaatctataatacagcaactcacggttggtcgctaaatatac

SEQ ID NO: 48971 - DNA, 2411 bp, Zea Mays
ggtcgctatagagcaaggatcactatcaaatcttatagcctgaacgtacctgtagatgttagtgactaaaaattaattaaaacaagtaaacattaatcgctaaattgcatggtgatttatttctttttaatattgcttgtatatttatttcatggtttgtttatgtatggacatgactataatatgcaattgtgttctttgtgcttatatgatattagattcgagttgaaagtcgtttcaaatgtttgttatttatttgcattcgtaataatttattcaaatgtctattatttatttggtaatttttttaatcaatttttgattaatttaaaaatgcatttcgaaataaaaaaagaaaagaaaaccctccctaaccctaaggcccactagggcccatctacctaactctccctcccacgccgtccctatctcctcccgacatcgccgtcgtcgcccattcgcccccgtccctgcagtcgcccgtgctccgcctgctccaccagggcgcctcgccctaggggatggtctccgaccacctcccttcaccgccaccacgtgctcagtgacgcctaggtcatcggcgctgaagtttggaggccctgtacgtgcttcacagagatcgccgaccatgggctacgcagagatcgccatccgcccctctgggagcggcaagaaaatacagaggcagggtggcctatctcgaagattttcaaatgtgtcctattacggtctcacaaccccgccatataaactggatgctctggaaccttatatgagcaagaggacagttgaacttcactggggtaagcaccatcaagattacatggatggcttgaataatcagctggctaccagccctctgtatggatacactctggaggatctgataaaaaaagcttataacaatgacaatccattaccagagtataacaacacagcacaggtaactcgtttatgataccccattcattatattttgcttgcactgaccatcttcttcctgtcatttgttttctttcaaaaagaaaaataatgcaatttgtgctttcgccaatagtaggatggttgggtttggcttgtctgtgagtttctttctattttttctgaagtacaggcaccactgattcaagctactgatttcctgaattgctctttctatagcaagtttataagttcagtttatattccattgaatatttgttgcagtgaagagaaatgagagaaagcttttggttgttcatacacgaaatgctatctccccacttgcttttggtgacattcacgcttactacttagactacaaggtgtgtgttccagttctcttttttggtccttaacacttaattttgaattttgacaagttagttatagcttagcagaaaacttctatggttctttgtttgtcaacttttcaggatgataagctaacatatgtcacaaacttcatggaccatcttgtctcttggcatactgtcactctacgcatgatgcgtgcagagtcttttgtgaaccttggtgagccaaatatcctagaggcttgagctacagatacaccctagttatcatcatgaggcattcttcggatacatcggatcaaatcctgctggaggagccagagagttggaaaatctcatgtctcacaagaaatgcttatcaccccaatgtcatatacgccaagataagctgctgggatttcaccattgcccttggatattcctacaaggaaatcactagtcagcatccagtttgaagacatgcaacaaaacaactctagaagctatggagctggtagattctggagttggcagtaaggcagtgatccaacttgggctttgaagccatggtgctttctctagacagctattatgtctgtagtgttgttagaataatcctggttctgtgttttcataacttcatcatgctagtgttctgctgtagcggaacacagaatggaacggaacgatattcttgttttactggttgagcactacacgacgattgtttttctagggtgttctggacaaagaaagcttgtaccttaaaacaggaggatacaagaagctggagtggttgtctgaaggcttttgaactgcttgaagcattaggttagctctggagattttgtgaatgatctagctagctatctgtaaatgatctagttgtgaatgatattataattctgatgcttttgtgaatatataattgtgtttgtgtatattgattaactgtgtatgtctttatgatttgtgtataaaaatctgtgatttgtggtgcttaattaaatgtatattattattaataacaactataaaagggcgactttctgttggttgctaaatgtatagtatgacgacttacggttggttgctaaatctataatacagcaactcacggttggtcgctaaatatac

SEQ ID NO: 48972 - DNA, 2401 bp, Zea Mays
ggtcgctatagagcaaggatcactatcaaatcttatagcctgaacgtacctgtagatgttagtgactaaaaattaattaaaacaagtaaacattaatcgctaaattgcatggtgatttatttctttttaatattgcttgtatatttatttcatggtttgtttatgtatggacatgactataatatgcaattgtgttctttgtgcttatatgatattagattcgagttgaaagtcgtttcaaatgtttgttatttatttgcattcgtaataatttattcaaatgtctattatttatttggtaatttttttaatcaatttttgattaatttaaaaatgcatttcgaaataaaaaaagaaaagaaaaccctccctaaccctaaggcccactagggcccatctacctaactctccctcccacgccgtccctatctcctcccgacatcgccgtcgtcgcccattcgcccccgtccctgcagtcgcccgtgctccgcctgctccaccagggcgcctcgccctaggggatggtctccgaccacctcccttcaccgccaccacgtgctcagtgacgcctaggtcatcggcgctgaagtttggaggccctgtacgtgcttcacagagatcgccgaccatgggctacgcagagatcgccatccgcccctctgggagcggcaagaggttcctggagaccatgaaggccatacagggggcactgataatgtcctccagcattcagatcattctaggctacaaccagctatggggtattttctccagaaaatacagaggcagggtggcctatctcgaagattttcaaatgtgtcctattacggtctcacaaccccgccatataaactggatgctctggaaccttatatgagcaagaggacagttgaacttcactggggtaagcaccatcaagattacatggatggcttgaataatcagctggctaccagccctctgtatggatacactctggaggatctgataaaaaaagcttataacaatgacaatccattaccagagtataacaacacagcacaggtaactcgtttatgataccccattcattatattttgcttgcactgaccatcttcttcctgtcatttgttttctttcaaaaagaaaaataatgcaatttgtgctttcgccaatagtaggatggttgggtttggcttgtctgtgagtttctttctattttttctgaagtacaggcaccactgattcaagctactgatttcctgaattgctctttctatagcaagtttataagttcagtttatattccattgaatatttgttgcagtgaagagaaatgagagaaagcttttggttgttcatacacgaaatgctatctccccacttgcttttggtgacattcacgcttactacttagactacaaggatgataagctaacatatgtcacaaacttcatggaccatcttgtctcttggcatactgtcactctacgcatgatgcgtgcagagtcttttgtgaaccttggtgagccaaatatcctagaggcttgagctacagatacaccctagttatcatcatgaggcattcttcggatacatcggatcaaatcctgctggaggagccagagagttggaaaatctcatgtctcacaagaaatgcttatcaccccaatgtcatatacgccaagataagctgctgggatttcaccattgcccttggatattcctacaaggaaatcactagtcagcatccagtttgaagacatgcaacaaaacaactctagaagctatggagctggtagattctggagttggcagtaaggcagtgatccaacttgggctttgaagccatggtgctttctctagacagctattatgtctgtagtgttgttagaataatcctggttctgtgttttcataacttcatcatgctagtgttctgctgtagcggaacacagaatggaacggaacgatattcttgttttactggttgagcactacacgacgattgtttttctagggtgttctggacaaagaaagcttgtaccttaaaacaggaggatacaagaagctggagtggttgtctgaaggcttttgaactgcttgaagcattaggttagctctggagattttgtgaatgatctagctagctatctgtaaatgatctagttgtgaatgatattataattctgatgcttttgtgaatatataattgtgtttgtgtatattgattaactgtgtatgtctttatgatttgtgtataaaaatctgtgatttgtggtgcttaattaaatgtatattattattaataacaactataaaagggcgactttctgttggttgctaaatgtatagtatgacgacttacggttggttgctaaatctataatacagcaactcacggttggtcgctaaatatac

SEQ ID NO: 48973 - DNA, 915 bp, Zea Mays
gagtcttttgtgaaccttggtgagccaaatatcctagaggcttgagctacagatacaccctagttatcatcatgaggcattcttcggatacatcggatcaaatcctgctggaggagccagagagttggaaaatctcatgtctcacaagaaatgcttatcaccccaatgtcatatacgccaagataagctgctgggatttcaccattgcccttggatattcctacaaggaaatcactagtcagcatccagtttgaagacatgcaacaaaacaactctagaagctatggagctggtagattctggagttggcagtaaggcagtgatccaacttgggctttgaagccatggtgctttctctagacagctattatgtctgtagtgttgttagaataatcctggttctgtgttttcataacttcatcatgctagtgttctgctgtagcggaacacagaatggaacggaacgatattcttgttttactggttgagcactacacgacgattgtttttctagggtgttctggacaaagaaagcttgtaccttaaaacaggaggatacaagaagctggagtggttgtctgaaggcttttgaactgcttgaagcattaggttagctctggagattttgtgaatgatctagctagctatctgtaaatgatctagttgtgaatgatattataattctgatgcttttgtgaatatataattgtgtttgtgtatattgattaactgtgtatgtctttatgatttgtgtataaaaatctgtgatttgtggtgcttaattaaatgtatattattattaataacaactataaaagggcgactttctgttggttgctaaatgtatagtatgacgacttacggttggttgctaaatctataatacagcaactcacggttggtcgctaaatatac

SEQ ID NO: 48974 - DNA, 2737 bp, Zea Mays
ataggaagctattccttccatcaagtggtccatggcatgtgaataacgagtttgtttctgctgctctcatgaagttgccagaaaatgaacacagcaggcaattgcacaatgctaccagcgatgtgttatccaagcttcatgtggtgatgcgtacagtagataatcttcacttgaaacacaggcagttagcagcgaactatcaaaaacaaagagattcgagtgcctggaacagagctgaacagaaacgtctgaaagaggagttgactagtgttgttgccaagttggaaggaagcaaacaaaaactggcagtactgaaagcacagggagacaataaacaagcaacaccgatcctggttcctacgctgggaaacaaaaatatgactgcagaaaaggtgagagataaacaaacagaactgcaagatcttgaagctactcacaaggagttaatggaattgatttcaaagcgtctggaggaaattagaaggctgcatacagagagaattgaaattttgaacaagttagcaacttttcagaatatactaacggatttcaaaagcattcactcttccaaagcttttcaacttgtcaatgaccaacttcagaagtcacaagcagaactggatgatcaccaaacgttgttagagaaattacaggttgagatggatacctttgtttggcgagaaaggcaatttaatcaaaaagttgatttggctgaaatcccccagaaggtttctgcatactgtgtgtctagaattgctgaccttgaaaaggatgtccagaaactgtgtaatgaaaagaatatgcttgtgctgaaacttgaagaggcttcgagagaacctggtcggaaccaggttatctcagagtttaaagctctggtgtcatcactaccgagggaaatgggtgccgtgcaaagtgaactgtccaaacacaaggatgcttccttacagttgcattctttgcgagcagaagttcattcactttctagtatccaaaccagaaaggaacaagaaattgaagaaatgtcatttagatctgcccatgctggatctgatataagccaacttcaatctctggtccgtgagctgagggaaaatacacaggagcttaagctatttgtggagttgtataagcatgagtccactgattccagacagctgatggaatcgagagatagggaactcgctgaatgggctcgagttcacattctcaaatattctcttagtgaaagtaaattagagcaacgtgtaatttcagccaatgaagctgaagcaatctctcagcagaggttggcaactgctgaagctgagattgctgaattagggcagaagctagaaacttctaggagagatctagtgaaacaatctgatatactgaagtctaaacatgaagaatgtgaagcgtatgttgtggagatcgagagcattggccatgcctatgaagatataatgtcacaaaatcaacaattgctacagcagattattgaaagagatgatcataataccaagcttttcatggagggtgttaaatcaaaacagtcacacgatgctttgcatttggaggtgcgctcgttgcaaagaaatttgcagcatgcaagtactttgatggatttgtgcaaccagaaaactatccgcctagaggaccagctaagaggttggtcagagcggttgaggagactgtcagaggatggaatgcagcagtctatttcattgggcaattatcaaaaaaagctgtctggtatgcatggagaagctccaaagctcaggcagtcaatggatgttctacaagcgaaggctgggagcaatcggctggaaattgctgagctgcttatagaactagagaatgagaggtttggtaaaaagagactagaggatgatcttgatctaatgtcaagtaaagctaattctctaagagagaagacagataattcagcagttcttcagaaacttctccatgaggccaaggagtacaggggaatattgaagtgtggtatttgtcatgataggcagaaagaggttgtgattgccaaatgctaccatctcttctgcagtcagtgcatacagaagccacttgggagccgtcagaagaggtgtccatcttgtggactaagcttcggtgttaatgatgtgaaacctatctacatatgaaacagaaggttggcgcctgtgtcgcagcaccaaaacaaaactgcttggcgcttactaatttccggtatatggtaggcggccatggtaattcagtcggtgatgtagcataagattatgtagcatttaagttgctacatgtgattgctggtacccgctggcatatatgatgctggtgttacctcaagcgccttttgtaaagtctgcttgccttgcccaatctggtagaatagcctgacatcgtcaaccattagttccttttaggagaaaaaaatatccaacaaatgaggattgatgcttcctgcaatagtgagcaatgtacaatatatagctttagtcagtttcattgttgtagctgacagtaagaatgtagttttcttttctttttaatataccggttatccagtttgtatgtttctggagtttgccaattctgtttatcaaaaaaaggagatttagtcatttctaaccatttttttcttgtcacgatatccaaaattaccacattatatttaatatagaagatatagttatttcagtatatagtatcatatcttgtttcatcattcaacaaaacaattaaatgctagatgtat

SEQ ID NO: 48975 - DNA, 3650 bp, Zea Mays
gtcatgcacatcagcgtctgcagttctgcacctgcacgcgcacacaaatcggcccagtagcgcgtgtggagaagctgtaatagtagtcccggaggaattcgctctcctgagtggagactggagactggagttcacaactgttttcgctgtttctctctcccgtagcccagtttacctcgcctagggcgaccaccgccgccgccctacgccagctgcccaggtcttgggcggaccctttgccggcgacgagcacccaccacaccagatcaaactctagatattgccactctacgtcccagcatcctatgaccacatggtttagacagtgctgtccaggtggatgatgaattgtggtgcccaaacggaggcacgtggcacgcctcttgaagataggcactggttggaaacagattttgttggcgctccaagagttcatacttatgtactttcctttctcaaatcataacaaatcttaggcagttcaagcttagctgaatgtcaacttgcctccacgtgcaagatcccagaaacattgctatgtctcgtccgcttgattttgctgtgcttaaatacaaaaaccaaaagcttgcggaacaactggaagtccacaaatttgagttctgtgctcttgagagtagatttaatgatctaaaagagaaacaaaggacacataataagacacttgttctagtcaaaagttattgggagcgactcatagcagatctgggtatagtttctgtttgcaaaaatgaatcttcacgttcaagctgcagtacagggaacaacaatatacgaaaggaaacagactttttaaatggacttttggaggctggtgccacagaaagttcaggttctcccaattgccaactaggaaatgacgtctcttcagaacaatcaacaacaattgatattctgcagaagctattccttccatcaagtggtccatggcatgtgaataacgagtttgtttctgctgctctcatgaagttgccagaaaatgaacacagcaggcaattgcacaatgctaccagcgatgtgttatccaagcttcatgtggtgatgcgtacagtagataatcttcacttgaaacacaggcagttagcagcgaactatcaaaaacaaagagattcgagtgcctggaacagagctgaacagaaacgtctgaaagaggagttgactagtgttgttgccaagttggaaggaagcaaacaaaaactggcagtactgaaagcacagggagacaataaacaagcaacaccgatcctggttcctacgctgggaaacaaaaatatgactgcagaaaaggtgagagataaacaaacagaactgcaagatcttgaagctactcacaaggagttaatggaattgatttcaaagcgtctggaggaaattagaaggctgcatacagagagaattgaaattttgaacaagttagcaacttttcagaatatactaacggatttcaaaagcattcactcttccaaagcttttcaacttgtcaatgaccaacttcagaagtcacaagcagaactggatgatcaccaaacgttgttagagaaattacaggttgagatggatacctttgtttggcgagaaaggcaatttaatcaaaaagttgatttggctgaaatcccccagaaggtttctgcatactgtgtgtctagaattgctgaccttgaaaaggatgtccagaaactgtgtaatgaaaagaatatgcttgtgctgaaacttgaagaggcttcgagagaacctggtcggaaccaggttatctcagagtttaaagctctggtgtcatcactaccgagggaaatgggtgccgtgcaaagtgaactgtccaaacacaaggatgcttccttacagttgcattctttgcgagcagaagttcattcactttctagtatccaaaccagaaaggaacaagaaattgaagaaatgtcatttagatctgcccatgctggatctgatataagccaacttcaatctctggtccgtgagctgagggaaaatacacaggagcttaagctatttgtggagttgtataagcatgagtccactgattccagacagctgatggaatcgagagatagggaactcgctgaatgggctcgagttcacattctcaaatattctcttagtgaaagtaaattagagcaacgtgtaatttcagccaatgaagctgaagcaatctctcagcagaggttggcaactgctgaagctgagattgctgaattagggcagaagctagaaacttctaggagagatctagtgaaacaatctgatatactgaagtctaaacatgaagaatgtgaagcgtatgttgtggagatcgagagcattggccatgcctatgaagatataatgtcacaaaatcaacaattgctacagcagattattgaaagagatgatcataataccaagcttttcatggagggtgttaaatcaaaacagtcacacgatgctttgcatttggaggtgcgctcgttgcaaagaaatttgcagcatgcaagtactttgatggatttgtgcaaccagaaaactatccgcctagaggaccagctaagaggttggtcagagcggttgaggagactgtcagaggatggaatgcagcagtctatttcattgggcaattatcaaaaaaagctgtctggtatgcatggagaagctccaaagctcaggcagtcaatggatgttctacaagcgaaggctgggagcaatcggctggaaattgctgagctgcttatagaactagagaatgagaggtttggtaaaaagagactagaggatgatcttgatctaatgtcaagtaaagctaattctctaagagagaagacagataattcagcagttcttcagaaacttctccatgaggccaaggagtacaggggaatattgaagtgtggtatttgtcatgataggcagaaagaggttgtgattgccaaatgctaccatctcttctgcagtcagtgcatacagaagccacttgggagccgtcagaagaggtgtccatcttgtggactaagcttcggtgttaatgatgtgaaacctatctacatatgaaacagaaggttggcgcctgtgtcgcagcaccaaaacaaaactgcttggcgcttactaatttccggtatatggtaggcggccatggtaattcagtcggtgatgtagcataagattatgtagcatttaagttgctacatgtgattgctggtacccgctggcatatatgatgctggtgttacctcaagcgccttttgtaaagtctgcttgccttgcccaatctggtagaatagcctgacatcgtcaaccattagttccttttaggagaaaaaaatatccaacaaatgaggattgatgcttcctgcaatagtgagcaatgtacaatatatagctttagtcagtttcattgttgtagctgacagtaagaatgtagttttcttttctttttaatataccggttatccagtttgtatgtttctggagtttgccaattctgtttatcaaaaaaaggagatttagtcatttctaaccatttttttcttgtcacgatatccaaaattaccacattatatttaatatagaagatatagttatttcagtatatagtatcatatcttgtttcatcattcaacaaaacaattaaatgctagatgtat

SEQ ID NO: 48976 - DNA, 3512 bp, Zea Mays
attcgctctcctgagtggagactggagactggagttcacaactgttttcgctgtttctctctcccgtagcccagtttacctcgcctagggcgaccaccgccgccgccctacgccagctgcccaggtcttgggcggaccctttgccggcgacgagcacccaccacaccagatcaaactctagatattgccactctacgtcccagcatcctatgaccacatggtttagacagtgctgtccaggtggatgatgaattgtggtgcccaaacggaggcacgtggcacgcctcttgaagataggcactggttggaaacagattttgttggcgctccaagagttcatacttatgtactttcctttctcaaatcataacaaatcttaggcagttcaagcttagctgaatgtcaacttgcctccacgtgcaagatcccagaaacattgctatgtctcgtccgcttgattttgctgtgcttaaatacaaaaaccaaaagcttgcggaacaactggaagtccacaaatttgagttctgtgctcttgagagtagatttaatgatctaaaagagaaacaaaggacacataataagacacttgttctagtcaaaagttattgggagcgactcatagcagatctgggtatagtttctgtttgcaaaaatgaatcttcacgttcaagctgcagtacagggaacaacaatatacgaaaggaaagttcaggttctcccaattgccaactaggaaatgacgtctcttcagaacaatcaacaacaattgatattctgcagaagctattccttccatcaagtggtccatggcatgtgaataacgagtttgtttctgctgctctcatgaagttgccagaaaatgaacacagcaggcaattgcacaatgctaccagcgatgtgttatccaagcttcatgtggtgatgcgtacagtagataatcttcacttgaaacacaggcagttagcagcgaactatcaaaaacaaagagattcgagtgcctggaacagagctgaacagaaacgtctgaaagaggagttgactagtgttgttgccaagttggaaggaagcaaacaaaaactggcagtactgaaagcacagggagacaataaacaagcaacaccgatcctggttcctacgctgggaaacaaaaatatgactgcagaaaaggtgagagataaacaaacagaactgcaagatcttgaagctactcacaaggagttaatggaattgatttcaaagcgtctggaggaaattagaaggctgcatacagagagaattgaaattttgaacaagttagcaacttttcagaatatactaacggatttcaaaagcattcactcttccaaagcttttcaacttgtcaatgaccaacttcagaagtcacaagcagaactggatgatcaccaaacgttgttagagaaattacaggttgagatggatacctttgtttggcgagaaaggcaatttaatcaaaaagttgatttggctgaaatcccccagaaggtttctgcatactgtgtgtctagaattgctgaccttgaaaaggatgtccagaaactgtgtaatgaaaagaatatgcttgtgctgaaacttgaagaggcttcgagagaacctggtcggaaccaggttatctcagagtttaaagctctggtgtcatcactaccgagggaaatgggtgccgtgcaaagtgaactgtccaaacacaaggatgcttccttacagttgcattctttgcgagcagaagttcattcactttctagtatccaaaccagaaaggaacaagaaattgaagaaatgtcatttagatctgcccatgctggatctgatataagccaacttcaatctctggtccgtgagctgagggaaaatacacaggagcttaagctatttgtggagttgtataagcatgagtccactgattccagacagctgatggaatcgagagatagggaactcgctgaatgggctcgagttcacattctcaaatattctcttagtgaaagtaaattagagcaacgtgtaatttcagccaatgaagctgaagcaatctctcagcagaggttggcaactgctgaagctgagattgctgaattagggcagaagctagaaacttctaggagagatctagtgaaacaatctgatatactgaagtctaaacatgaagaatgtgaagcgtatgttgtggagatcgagagcattggccatgcctatgaagatataatgtcacaaaatcaacaattgctacagcagattattgaaagagatgatcataataccaagcttttcatggagggtgttaaatcaaaacagtcacacgatgctttgcatttggaggtgcgctcgttgcaaagaaatttgcagcatgcaagtactttgatggatttgtgcaaccagaaaactatccgcctagaggaccagctaagaggttggtcagagcggttgaggagactgtcagaggatggaatgcagcagtctatttcattgggcaattatcaaaaaaagctgtctggtatgcatggagaagctccaaagctcaggcagtcaatggatgttctacaagcgaaggctgggagcaatcggctggaaattgctgagctgcttatagaactagagaatgagaggtttggtaaaaagagactagaggatgatcttgatctaatgtcaagtaaagctaattctctaagagagaagacagataattcagcagttcttcagaaacttctccatgaggccaaggagtacaggggaatattgaagtgtggtatttgtcatgataggcagaaagaggttgtgattgccaaatgctaccatctcttctgcagtcagtgcatacagaagccacttgggagccgtcagaagaggtgtccatcttgtggactaagcttcggtgttaatgatgtgaaacctatctacatatgaaacagaaggttggcgcctgtgtcgcagcaccaaaacaaaactgcttggcgcttactaatttccggtatatggtaggcggccatggtaattcagtcggtgatgtagcataagattatgtagcatttaagttgctacatgtgattgctggtacccgctggcatatatgatgctggtgttacctcaagcgccttttgtaaagtctgcttgccttgcccaatctggtagaatagcctgacatcgtcaaccattagttccttttaggagaaaaaaatatccaacaaatgaggattgatgcttcctgcaatagtgagcaatgtacaatatatagctttagtcagtttcattgttgtagctgacagtaagaatgtagttttcttttctttttaatataccggttatccagtttgtatgtttctggagtttgccaattctgtttatcaaaaaaaggagatttagtcatttctaaccatttttttcttgtcacgatatccaaaattaccacattatatttaatatagaagatatagttatttcagtatatagtatcatatcttgtttcatcattcaacaaaacaattaaatgctagatgtat

SEQ ID NO: 48977 - DNA, 3471 bp, Zea Mays
attcgctctcctgagtggagactggagactggagttcacaactgttttcgctgtttctctctcccgtagcccagtttacctcgcctagggcgaccaccgccgccgccctacgccagctgcccaggtcttgggcggaccctttgccggcgacgagcacccaccacaccagatcaaactctagatattgccactctacgtcccagcatcctatgaccacatggtttagacagtgctgtccaggtggatgatgaattgtggtgcccaaacggaggcacgtggcacgcctcttgaagataggcagttcaagcttagctgaatgtcaacttgcctccacgtgcaagatcccagaaacattgctatgtctcgtccgcttgattttgctgtgcttaaatacaaaaaccaaaagcttgcggaacaactggaagtccacaaatttgagttctgtgctcttgagagtagatttaatgatctaaaagagaaacaaaggacacataataagacacttgttctagtcaaaagttattgggagcgactcatagcagatctgggtatagtttctgtttgcaaaaatgaatcttcacgttcaagctgcagtacagggaacaacaatatacgaaaggaaacagactttttaaatggacttttggaggctggtgccacagaaagttcaggttctcccaattgccaactaggaaatgacgtctcttcagaacaatcaacaacaattgatattctgcagaagctattccttccatcaagtggtccatggcatgtgaataacgagtttgtttctgctgctctcatgaagttgccagaaaatgaacacagcaggcaattgcacaatgctaccagcgatgtgttatccaagcttcatgtggtgatgcgtacagtagataatcttcacttgaaacacaggcagttagcagcgaactatcaaaaacaaagagattcgagtgcctggaacagagctgaacagaaacgtctgaaagaggagttgactagtgttgttgccaagttggaaggaagcaaacaaaaactggcagtactgaaagcacagggagacaataaacaagcaacaccgatcctggttcctacgctgggaaacaaaaatatgactgcagaaaaggtgagagataaacaaacagaactgcaagatcttgaagctactcacaaggagttaatggaattgatttcaaagcgtctggaggaaattagaaggctgcatacagagagaattgaaattttgaacaagttagcaacttttcagaatatactaacggatttcaaaagcattcactcttccaaagcttttcaacttgtcaatgaccaacttcagaagtcacaagcagaactggatgatcaccaaacgttgttagagaaattacaggttgagatggatacctttgtttggcgagaaaggcaatttaatcaaaaagttgatttggctgaaatcccccagaaggtttctgcatactgtgtgtctagaattgctgaccttgaaaaggatgtccagaaactgtgtaatgaaaagaatatgcttgtgctgaaacttgaagaggcttcgagagaacctggtcggaaccaggttatctcagagtttaaagctctggtgtcatcactaccgagggaaatgggtgccgtgcaaagtgaactgtccaaacacaaggatgcttccttacagttgcattctttgcgagcagaagttcattcactttctagtatccaaaccagaaaggaacaagaaattgaagaaatgtcatttagatctgcccatgctggatctgatataagccaacttcaatctctggtccgtgagctgagggaaaatacacaggagcttaagctatttgtggagttgtataagcatgagtccactgattccagacagctgatggaatcgagagatagggaactcgctgaatgggctcgagttcacattctcaaatattctcttagtgaaagtaaattagagcaacgtgtaatttcagccaatgaagctgaagcaatctctcagcagaggttggcaactgctgaagctgagattgctgaattagggcagaagctagaaacttctaggagagatctagtgaaacaatctgatatactgaagtctaaacatgaagaatgtgaagcgtatgttgtggagatcgagagcattggccatgcctatgaagatataatgtcacaaaatcaacaattgctacagcagattattgaaagagatgatcataataccaagcttttcatggagggtgttaaatcaaaacagtcacacgatgctttgcatttggaggtgcgctcgttgcaaagaaatttgcagcatgcaagtactttgatggatttgtgcaaccagaaaactatccgcctagaggaccagctaagaggttggtcagagcggttgaggagactgtcagaggatggaatgcagcagtctatttcattgggcaattatcaaaaaaagctgtctggtatgcatggagaagctccaaagctcaggcagtcaatggatgttctacaagcgaaggctgggagcaatcggctggaaattgctgagctgcttatagaactagagaatgagaggtttggtaaaaagagactagaggatgatcttgatctaatgtcaagtaaagctaattctctaagagagaagacagataattcagcagttcttcagaaacttctccatgaggccaaggagtacaggggaatattgaagtgtggtatttgtcatgataggcagaaagaggttgtgattgccaaatgctaccatctcttctgcagtcagtgcatacagaagccacttgggagccgtcagaagaggtgtccatcttgtggactaagcttcggtgttaatgatgtgaaacctatctacatatgaaacagaaggttggcgcctgtgtcgcagcaccaaaacaaaactgcttggcgcttactaatttccggtatatggtaggcggccatggtaattcagtcggtgatgtagcataagattatgtagcatttaagttgctacatgtgattgctggtacccgctggcatatatgatgctggtgttacctcaagcgccttttgtaaagtctgcttgccttgcccaatctggtagaatagcctgacatcgtcaaccattagttccttttaggagaaaaaaatatccaacaaatgaggattgatgcttcctgcaatagtgagcaatgtacaatatatagctttagtcagtttcattgttgtagctgacagtaagaatgtagttttcttttctttttaatataccggttatccagtttgtatgtttctggagtttgccaattctgtttatcaaaaaaaggagatttagtcatttctaaccatttttttcttgtcacgatatccaaaattaccacattatatttaatatagaagatatagttatttcagtatatagtatcatatcttgtttcatcattcaacaaaacaattaaatgctagatgtat

SEQ ID NO: 48978 - DNA, 3405 bp, Zea Mays
ggagactggagttcacaactgttttcgctgtttctctctcccgtagcccagtttacctcgcctagggcgaccaccgccgccgccctacgccagctgcccaggtcttgggcggaccctttgccggcgacgagcacccaccacaccagatcaaactctagatattgccactctacgtcccagcatcctatgaccacatggtttagacagtgctgtccaggtggatgatgaattgtggtgcccaaacggaggcacgtggcacgcctcttgaagataggcactggttggaaacagattttgttggcgctccaagagttcatacttatgtactttcctttctcaaatcataacaaatcttaggcagttcaagcttagctgaatgtcaacttgcctccacgtgcaagatcccagaaacattgctatgtctcgtccgcttgattttgctgtgcttaaatacaaaaaccaaaagcttgcggaacaactggaagtccacaaatttgagttctgtgctcttgagagtagatttaatgatctaaaagagaaacaaaggacacataataagacacttgttctagtcaaaagttattgggagcgactcatagcagatctgggtatagtttctgtttgcaaaaatgaatcttcacgttcaagctgcagtacagggaacaacaatatacgaaaggactttttaaatggacttttggaggctggtgccacagaaagttcaggttctcccaattgccaactaggaaatgacgtctcttcagaacaatcaacaacaattgatattctgcagaagctattccttccatcaagtggtccatggcatgtgaataacgagtttgtttctgctgctctcatgaagttgccagaaaatgaacacagcaggcaattgcacaatgctaccagcgatgtgttatccaagcttcatgtggtgatgcgtacagtagataatcttcacttgaaacacaggcagttagcagcgaactatcaaaaacaaagagattcgagtgcctggaacagagctgaacagaaacgtctgaaagaggagttgactagtgttgttgccaagttggaaggaagcaaacaaaaactggcagtactgaaagcacagggagacaataaacaagcaacaccgatcctggttcctacgctgggaaacaaaaatatgactgcagaaaaggtgagagataaacaaacagaactgcaagatcttgaagctactcacaaggagttaatggaattgatttcaaagcgtctggaggaaattagaaggctgcatacagagagaattgaaattttgaacaagttagcaacttttcaggttgagatggatacctttgtttggcgagaaaggcaatttaatcaaaaagttgatttggctgaaatcccccagaaggtttctgcatactgtgtgtctagaattgctgaccttgaaaaggatgtccagaaactgtgtaatgaaaagaatatgcttgtgctgaaacttgaagaggcttcgagagaacctggtcggaaccaggttatctcagagtttaaagctctggtgtcatcactaccgagggaaatgggtgccgtgcaaagtgaactgtccaaacacaaggatgcttccttacagttgcattctttgcgagcagaagttcattcactttctagtatccaaaccagaaaggaacaagaaattgaagaaatgtcatttagatctgcccatgctggatctgatataagccaacttcaatctctggtccgtgagctgagggaaaatacacaggagcttaagctatttgtggagttgtataagcatgagtccactgattccagacagctgatggaatcgagagatagggaactcgctgaatgggctcgagttcacattctcaaatattctcttagtgaaagtaaattagagcaacgtgtaatttcagccaatgaagctgaagcaatctctcagcagaggttggcaactgctgaagctgagattgctgaattagggcagaagctagaaacttctaggagagatctagtgaaacaatctgatatactgaagtctaaacatgaagaatgtgaagcgtatgttgtggagatcgagagcattggccatgcctatgaagatataatgtcacaaaatcaacaattgctacagcagattattgaaagagatgatcataataccaagcttttcatggagggtgttaaatcaaaacagtcacacgatgctttgcatttggaggtgcgctcgttgcaaagaaatttgcagcatgcaagtactttgatggatttgtgcaaccagaaaactatccgcctagaggaccagctaagaggttggtcagagcggttgaggagactgtcagaggatggaatgcagcagtctatttcattgggcaattatcaaaaaaagctgtctggtatgcatggagaagctccaaagctcaggcagtcaatggatgttctacaagcgaaggctgggagcaatcggctggaaattgctgagctgcttatagaactagagaatgagaggtttggtaaaaagagactagaggatgatcttgatctaatgtcaagtaaagctaattctctaagagagaagacagataattcagcagttcttcagaaacttctccatgaggccaaggagtacaggggaatattgaagtgtggtatttgtcatgataggcagaaagaggttgtgattgccaaatgctaccatctcttctgcagtcagtgcatacagaagccacttgggagccgtcagaagaggtgtccatcttgtggactaagcttcggtgttaatgatgtgaaacctatctacatatgaaacagaaggttggcgcctgtgtcgcagcaccaaaacaaaactgcttggcgcttactaatttccggtatatggtaggcggccatggtaattcagtcggtgatgtagcataagattatgtagcatttaagttgctacatgtgattgctggtacccgctggcatatatgatgctggtgttacctcaagcgccttttgtaaagtctgcttgccttgcccaatctggtagaatagcctgacatcgtcaaccattagttccttttaggagaaaaaaatatccaacaaatgaggattgatgcttcctgcaatagtgagcaatgtacaatatatagctttagtcagtttcattgttgtagctgacagtaagaatgtagttttcttttctttttaatataccggttatccagtttgtatgtttctggagtttgccaattctgtttatcaaaaaaaggagatttagtcatttctaaccatttttttcttgtcacgatatccaaaattaccacattatatttaatatagaagatatagttatttcagtatatagtatcatatcttgtttcatcattcaacaaaacaattaaatgctagatgtat

SEQ ID NO: 48979 - DNA, 3541 bp, Zea Mays
ggagactggagttcacaactgttttcgctgtttctctctcccgtagcccagtttacctcgcctagggcgaccaccgccgccgccctacgccagctgcccaggtcttgggcggaccctttgccggcgacgagcacccaccacaccagatcaaactctagatattgccactctacgtcccagcatcctatgaccacatggtttagacagtgctgtccaggtggatgatgaattgtggtgcccaaacggaggcacgtggcacgcctcttgaagataggcactggttggaaacagattttgttggcgctccaagagttcatacttatgtactttcctttctcaaatcataacaaatcttaggcagttcaagcttagctgaatgtcaacttgcctccacgtgcaagatcccagaaacattgctatgtctcgtccgcttgattttgctgtgcttaaatacaaaaaccaaaagcttgcggaacaactggaagtccacaaatttgagttctgtgctcttgagagtagatttaatgatctaaaagagaaacaaaggacacataataagacacttgttctagtcaaaagttattgggagcgactcatagcagatctgggtatagtttctgtttgcaaaaatgaatcttcacgttcaagctgcagtacagggaacaacaatatacgaaaggaaacagactttttaaatggacttttggaggctggtgccacagaaagttcaggttctcccaattgccaactaggaaatgacgtctcttcagaacaatcaacaacaattgatattctgcagaagctattccttccatcaagtggtccatggcatgtgaataacgagtttgtttctgctgctctcatgaagttgccagaaaatgaacacagcaggcaattgcacaatgctaccagcgatgtgttatccaagcttcatgtggtgatgcgtacagtagataatcttcacttgaaacacaggcagttagcagcgaactatcaaaaacaaagagattcgagtgcctggaacagagctgaacagaaacgtctgaaagaggagttgactagtgttgttgccaagttggaaggaagcaaacaaaaactggcagtactgaaagcacagggagacaataaacaagcaacaccgatcctggttcctacgctgggaaacaaaaatatgactgcagaaaaggtgagagataaacaaacagaactgcaagatcttgaagctactcacaaggagttaatggaattgatttcaaagcgtctggaggaaattagaaggctgcatacagagagaattgaaattttgaacaagttagcaacttttcagaatatactaacggatttcaaaagcattcactcttccaaagcttttcaacttgtcaatgaccaacttcagaagtcacaagcagaactggatgatcaccaaacgttgttagagaaattacaggtggttactggttgagatggatacctttgtttggcgagaaaggcaatttaatcaaaaagttgatttggctgaaatcccccagaaggtttctgcatactgtgtgtctagaattgctgaccttgaaaaggatgtccagaaactgtgtaatgaaaagaatatgcttgtgctgaaacttgaagaggcttcgagagaacctggtcggaaccaggttatctcagagtttaaagctctggtgtcatcactaccgagggaaatgggtgccgtgcaaagtgaactgtccaaacacaaggatgcttccttacagttgcattctttgcgagcagaagttcattcactttctagtatccaaaccagaaaggaacaagaaattgaagaaatgtcatttagatctgcccatgctggatctgatataagccaacttcaatctctggtccgtgagctgagggaaaatacacaggagcttaagctatttgtggagttgtataagcatgagtccactgattccagacagctgatggaatcgagagatagggaactcgctgaatgggctcgagttcacattctcaaatattctcttagtgaaagtaaattagagcaacgtgtaatttcagccaatgaagctgaagcaatctctcagcagaggttggcaactgctgaagctgagattgctgaattagggcagaagctagaaacttctaggagagatctagtgaaacaatctgatatactgaagtctaaacatgaagaatgtgaagcgtatgttgtggagatcgagagcattggccatgcctatgaagatataatgtcacaaaatcaacaattgctacagcagattattgaaagagatgatcataataccaagcttttcatggagggtgttaaatcaaaacagtcacacgatgctttgcatttggaggtgcgctcgttgcaaagaaatttgcagcatgcaagtactttgatggatttgtgcaaccagaaaactatccgcctagaggaccagctaagaggttggtcagagcggttgaggagactgtcagaggatggaatgcagcagtctatttcattgggcaattatcaaaaaaagctgtctggtatgcatggagaagctccaaagctcaggcagtcaatggatgttctacaagcgaaggctgggagcaatcggctggaaattgctgagctgcttatagaactagagaatgagaggtttggtaaaaagagactagaggatgatcttgatctaatgtcaagtaaagctaattctctaagagagaagacagataattcagcagttcttcagaaacttctccatgaggccaaggagtacaggggaatattgaagtgtggtatttgtcatgataggcagaaagaggttgtgattgccaaatgctaccatctcttctgcagtcagtgcatacagaagccacttgggagccgtcagaagaggtgtccatcttgtggactaagcttcggtgttaatgatgtgaaacctatctacatatgaaacagaaggttggcgcctgtgtcgcagcaccaaaacaaaactgcttggcgcttactaatttccggtatatggtaggcggccatggtaattcagtcggtgatgtagcataagattatgtagcatttaagttgctacatgtgattgctggtacccgctggcatatatgatgctggtgttacctcaagcgccttttgtaaagtctgcttgccttgcccaatctggtagaatagcctgacatcgtcaaccattagttccttttaggagaaaaaaatatccaacaaatgaggattgatgcttcctgcaatagtgagcaatgtacaatatatagctttagtcagtttcattgttgtagctgacagtaagaatgtagttttcttttctttttaatataccggttatccagtttgtatgtttctggagtttgccaattctgtttatcaaaaaaaggagatttagtcatttctaaccatttttttcttgtcacgatatccaaaattaccacattatatttaatatagaagatatagttatttcagtatatagtatcatatcttgtttcatcattcaacaaaacaattaaatgctagatgtat

SEQ ID NO: 48980 - DNA, 3402 bp, Zea Mays
ggagactggagttcacaactgttttcgctgtttctctctcccgtagcccagtttacctcgcctagggcgaccaccgccgccgccctacgccagctgcccaggtcttgggcggaccctttgccggcgacgagcacccaccacaccagatcaaactctagatattgccactctacgtcccagcatcctatgaccacatggtttagacagtgctgtccaggtggatgatgaattgtggtgcccaaacggaggcacgtggcacgcctcttgaagataggcagttcaagcttagctgaatgtcaacttgcctccacgtgcaagatcccagaaacattgctatgtctcgtccgcttgattttgctgtgcttaaatacaaaaaccaaaagcttgcggaacaactggaagtccacaaatttgagttctgtgctcttgagagtagatttaatgatctaaaagagaaacaaaggacacataataagacacttgttctagtcaaaagttattgggagcgactcatagcagatctgggtatagtttctgtttgcaaaaatgaatcttcacgttcaagctgcagtacagggaacaacaatatacgaaaggaaacagactttttaaatggacttttggaggctggtgccacagaaagttcaggttctcccaattgccaactaggaaatgacgtctcttcagaacaatcaacaacaattgatattctgcagaagctattccttccatcaagtggtccatggcatgtgaataacgagtttgtttctgctgctctcatgaagttgccagaaaatgaacacagcaggcaattgcacaatgctaccagcgatgtgttatccaagcttcatgtggtgatgcgtacagtagataatcttcacttgaaacacaggcagttagcagcgaactatcaaaaacaaagagattcgagtgcctggaacagagctgaacagaaacgtctgaaagaggagttgactagtgttgttgccaagttggaaggaagcaaacaaaaactggcagtactgaaagcacagggagacaataaacaagcaacaccgatcctggttcctacgctgggaaacaaaaatatgactgcagaaaaggtgagagataaacaaacagaactgcaagatcttgaagctactcacaaggagttaatggaattgatttcaaagcgtctggaggaaattagaaggctgcatacagagagaattgaaattttgaacaagttagcaacttttcagaatatactaacggatttcaaaagcattcactcttccaaagcttttcaacttgtcaatgaccaacttcagaagtcacaagcagaactggatgatcaccaaacgttgttagagaaattacaggttgagatggatacctttgtttggcgagaaaggcaatttaatcaaaaagttgatttggctgaaatcccccagaaggtttctgcatactgtgtgtctagaattgctgaccttgaaaaggatgtccagaaactgtgtaatgaaaagaatatgcttgtgctgaaacttgaagaggcttcgagagaacctggtcggaaccaggttatctcagagtttaaagctctggtgtcatcactaccgagggaaatgggtgccgtgcaaagtgaactgtccaaacacaaggatgcttccttacagttgcattctttgcgagcagaagttcattcactttctagtatccaaaccagaaaggaacaagaaattgaagaaatgtcatttagatctgcccatgctggatctgatataagccaacttcaatctctggtccgtgagctgagggaaaatacacaggagcttaagctatttgtggagttgtataagcatgagtccactgattccagacagctgatggaatcgagagatagggaactcgctgaatgggctcgagttcacattctcaaatattctcttagtgaaagtaaattagagcaacgtgtaatttcagccaatgaagctgaagcaatctctcagcagaggttggcaactgctgaagctgagattgctgaattagggcagaagctagaaacttctaggaggcctcaaaatgttattttctatgacagagcattggccatgcctatgaagatataatgtcacaaaatcaacaattgctacagcagattattgaaagagatgatcataataccaagcttttcatggagggtgttaaatcaaaacagtcacacgatgctttgcatttggaggtgcgctcgttgcaaagaaatttgcagcatgcaagtactttgatggatttgtgcaaccagaaaactatccgcctagaggaccagctaagaggttggtcagagcggttgaggagactgtcagaggatggaatgcagcagtctatttcattgggcaattatcaaaaaaagctgtctggtatgcatggagaagctccaaagctcaggcagtcaatggatgttctacaagcgaaggctgggagcaatcggctggaaattgctgagctgcttatagaactagagaatgagaggtttggtaaaaagagactagaggatgatcttgatctaatgtcaagtaaagctaattctctaagagagaagacagataattcagcagttcttcagaaacttctccatgaggccaaggagtacaggggaatattgaagtgtggtatttgtcatgataggcagaaagaggttgtgattgccaaatgctaccatctcttctgcagtcagtgcatacagaagccacttgggagccgtcagaagaggtgtccatcttgtggactaagcttcggtgttaatgatgtgaaacctatctacatatgaaacagaaggttggcgcctgtgtcgcagcaccaaaacaaaactgcttggcgcttactaatttccggtatatggtaggcggccatggtaattcagtcggtgatgtagcataagattatgtagcatttaagttgctacatgtgattgctggtacccgctggcatatatgatgctggtgttacctcaagcgccttttgtaaagtctgcttgccttgcccaatctggtagaatagcctgacatcgtcaaccattagttccttttaggagaaaaaaatatccaacaaatgaggattgatgcttcctgcaatagtgagcaatgtacaatatatagctttagtcagtttcattgttgtagctgacagtaagaatgtagttttcttttctttttaatataccggttatccagtttgtatgtttctggagtttgccaattctgtttatcaaaaaaaggagatttagtcatttctaaccatttttttcttgtcacgatatccaaaattaccacattatatttaatatagaagatatagttatttcagtatatagtatcatatcttgtttcatcattcaacaaaacaattaaatgctagatgtat

SEQ ID NO: 48981 - DNA, 3336 bp, Zea Mays
ggagactggagttcacaactgttttcgctgtttctctctcccgtagcccagtttacctcgcctagggcgaccaccgccgccgccctacgccagctgcccaggtcttgggcggaccctttgccggcgacgagcacccaccacaccagatcaaactctagatattgccactctacgtcccagcatcctatgaccacatggtttagacagtgctgtccaggtggatgatgaattgtggtgcccaaacggaggcacgtggcacgcctcttgaagataggcactggttggaaacagattttgttggcgctccaagagttcatacttatgtactttcctttctcaaatcataacaaatcttaggcagttcaagcttagctgaatgtcaacttgcctccacgtgcaagatcccagaaacattgctatgtctcgtccgcttgattttgctgtgcttaaatacaaaaaccaaaagcttgcggaacaactggaagtccacaaatttgagttctgtgctcttgagagtagatttaatgatctaaaagagaaacaaaggacacataataagacacttgttctagtcaaaagttattgggagcgactcatagcagatctgggtatagtttctgtttgcaaaaatgaatcttcacgttcaagctgcagtacagggaacaacaatatacgaaaggaaacagactttttaaatggacttttggaggctggtgccacagaaagttcaggttctcccaattgccaactaggaaatgacgtctcttcagaacaatcaacaacaattgatattctgcagaagctattccttccatcaagtggtccatggcatgtgaataacgagtttgtttctgctgctctcatgaagttgccagaaaatgaacacagcaggcaattgcacaatgctaccagcgatgtgttatccaagcttcatgtggtgatgcgtacagtagataatcttcacttgaaacacaggcagttagcagcgaactatcaaaaacaaagagattcgagtgcctggaacagagctgaacagaaacgtctgaaagaggagttgactagtgttgttgccaagttggaaggaagcaaacaaaaactggcagtactgaaagcacagggagacaataaacaagcaacaccgatcctggttcctacgctgggaaacaaaaatatgactgcagaaaaggtgagagataaacaaacagaactgcaagatcttgaagctactcacaaggagttaatggaattgatttcaaagcgtctggaggaaattagaaggctgcatacagagagaattgaaattttgaacaagttagcaacttttcagaatatactaacggatttcaaaagcattcactcttccaaagcttttcaacttgtcaatgaccaacttcagaagtcacaagcagaactggatgatcaccaaacgttgttagagaaattacaggttgagatggatacctttgtttggcgagaaaggcaatttaatcaaaaagttgatttggctgaaatcccccagaaggtttctgcatactgtgtgtctagaattgctgaccttgaaaaggatgtccagaaactgtgtaatgaaaagaatatgcttgtgctgaaacttgaagaggcttcgagagaacctggtcggaaccaggttatctcagagtttaaagctctggtgtcatcactaccgagggaaatgggtgccgtgcaaagtgaactgtccaaacacaaggatgcttccttacagttgcattctttgcgagcagaagttcattcactttctagtatccaaaccagaaaggaacaagaaattgaagaaatgtcatttagatctgcccatgctggatctgatataagccaacttcaatctctggtccgtgagctgagggaaaatacacaggagcttaagctatttgtggagttgtataagcatgagtccactgattccagagatctagtgaaacaatctgatatactgaagtctaaacatgaagaatgtgaagcgtatgttgtggagatcgagagcattggccatgcctatgaagatataatgtcacaaaatcaacaattgctacagcagattattgaaagagatgatcataataccaagcttttcatggagggtgttaaatcaaaacagtcacacgatgctttgcatttggaggtgcgctcgttgcaaagaaatttgcagcatgcaagtactttgatggatttgtgcaaccagaaaactatccgcctagaggaccagctaagaggttggtcagagcggttgaggagactgtcagaggatggaatgcagcagtctatttcattgggcaattatcaaaaaaagctgtctggtatgcatggagaagctccaaagctcaggcagtcaatggatgttctacaagcgaaggctgggagcaatcggctggaaattgctgagctgcttatagaactagagaatgagaggtttggtaaaaagagactagaggatgatcttgatctaatgtcaagtaaagctaattctctaagagagaagacagataattcagcagttcttcagaaacttctccatgaggccaaggagtacaggggaatattgaagtgtggtatttgtcatgataggcagaaagaggttgtgattgccaaatgctaccatctcttctgcagtcagtgcatacagaagccacttgggagccgtcagaagaggtgtccatcttgtggactaagcttcggtgttaatgatgtgaaacctatctacatatgaaacagaaggttggcgcctgtgtcgcagcaccaaaacaaaactgcttggcgcttactaatttccggtatatggtaggcggccatggtaattcagtcggtgatgtagcataagattatgtagcatttaagttgctacatgtgattgctggtacccgctggcatatatgatgctggtgttacctcaagcgccttttgtaaagtctgcttgccttgcccaatctggtagaatagcctgacatcgtcaaccattagttccttttaggagaaaaaaatatccaacaaatgaggattgatgcttcctgcaatagtgagcaatgtacaatatatagctttagtcagtttcattgttgtagctgacagtaagaatgtagttttcttttctttttaatataccggttatccagtttgtatgtttctggagtttgccaattctgtttatcaaaaaaaggagatttagtcatttctaaccatttttttcttgtcacgatatccaaaattaccacattatatttaatatagaagatatagttatttcagtatatagtatcatatcttgtttcatcattcaacaaaacaattaaatgctagatgtat

SEQ ID NO: 48982 - DNA, 3527 bp, Zea Mays
ggagactggagttcacaactgttttcgctgtttctctctcccgtagcccagtttacctcgcctagggcgaccaccgccgccgccctacgccagctgcccaggtcttgggcggaccctttgccggcgacgagcacccaccacaccagatcaaactctagatattgccactctacgtcccagcatcctatgaccacatggtttagacagtgctgtccaggtggatgatgaattgtggtgcccaaacggaggcacgtggcacgcctcttgaagataggcactggttggaaacagattttgttggcgctccaagagttcatacttatgtactttcctttctcaaatcataacaaatcttaggcagttcaagcttagctgaatgtcaacttgcctccacgtgcaagatcccagaaacattgctatgtctcgtccgcttgattttgctgtgcttaaatacaaaaaccaaaagcttgcggaacaactggaagtccacaaatttgagttctgtgctcttgagagtagatttaatgatctaaaagagaaacaaaggacacataataagacacttgttctagtcaaaagttattgggagcgactcatagcagatctgggtatagtttctgtttgcaaaaatgaatcttcacgttcaagctgcagtacagggaacaacaatatacgaaaggaaacagactttttaaatggacttttggaggctggtgccacagaaagttcaggttctcccaattgccaactaggaaatgacgtctcttcagaacaatcaacaacaattgatattctgcagaagctattccttccatcaagtggtccatggcatgtgaataacgagtttgtttctgctgctctcatgaagttgccagaaaatgaacacagcaggcaattgcacaatgctaccagcgatgtgttatccaagcttcatgtggtgatgcgtacagtagataatcttcacttgaaacacaggcagttagcagcgaactatcaaaaacaaagagattcgagtgcctggaacagagctgaacagaaacgtctgaaagaggagttgactagtgttgttgccaagttggaaggaagcaaacaaaaactggcagtactgaaagcacagggagacaataaacaagcaacaccgatcctggttcctacgctgggaaacaaaaatatgactgcagaaaaggtgagagataaacaaacagaactgcaagatcttgaagctactcacaaggagttaatggaattgatttcaaagcgtctggaggaaattagaaggctgcatacagagagaattgaaattttgaacaagttagcaacttttcagaatatactaacggatttcaaaagcattcactcttccaaagcttttcaacttgtcaatgaccaacttcagaagtcacaagcagaactggatgatcaccaaacgttgttagagaaattacaggttgagatggatacctttgtttggcgagaaaggcaatttaatcaaaaagttgatttggctgaaatcccccagaaggtttctgcatactgtgtgtctagaattgctgaccttgaaaaggatgtccagaaactgtgtaatgaaaagaatatgcttgtgctgaaacttgaagaggcttcgagagaacctggtcggaaccaggttatctcagagtttaaagctctggtgtcatcactaccgagggaaatgggtgccgtgcaaagtgaactgtccaaacacaaggatgcttccttacagttgcattctttgcgagcagaagttcattcactttctagtatccaaaccagaaaggaacaagaaattgaagaaatgtcatttagatctgcccatgctggatctgatataagccaacttcaatctctggtccgtgagctgagggaaaatacacaggagcttaagctatttgtggagttgtataagcatgagtccactgattccagctgatggaatcgagagatagggaactcgctgaatgggctcgagttcacattctcaaatattctcttagtgaaagtaaattagagcaacgtgtaatttcagccaatgaagctgaagcaatctctcagcagaggttggcaactgctgaagctgagattgctgaattagggcagaagctagaaacttctaggagagatctagtgaaacaatctgatatactgaagtctaaacatgaagaatgtgaagcgtatgttgtggagatcgagagcattggccatgcctatgaagatataatgtcacaaaatcaacaattgctacagcagattattgaaagagatgatcataataccaagcttttcatggagggtgttaaatcaaaacagtcacacgatgctttgcatttggaggtgcgctcgttgcaaagaaatttgcagcatgcaagtactttgatggatttgtgcaaccagaaaactatccgcctagaggaccagctaagaggttggtcagagcggttgaggagactgtcagaggatggaatgcagcagtctatttcattgggcaattatcaaaaaaagctgtctggtatgcatggagaagctccaaagctcaggcagtcaatggatgttctacaagcgaaggctgggagcaatcggctggaaattgctgagctgcttatagaactagagaatgagaggtttggtaaaaagagactagaggatgatcttgatctaatgtcaagtaaagctaattctctaagagagaagacagataattcagcagttcttcagaaacttctccatgaggccaaggagtacaggggaatattgaagtgtggtatttgtcatgataggcagaaagaggttgtgattgccaaatgctaccatctcttctgcagtcagtgcatacagaagccacttgggagccgtcagaagaggtgtccatcttgtggactaagcttcggtgttaatgatgtgaaacctatctacatatgaaacagaaggttggcgcctgtgtcgcagcaccaaaacaaaactgcttggcgcttactaatttccggtatatggtaggcggccatggtaattcagtcggtgatgtagcataagattatgtagcatttaagttgctacatgtgattgctggtacccgctggcatatatgatgctggtgttacctcaagcgccttttgtaaagtctgcttgccttgcccaatctggtagaatagcctgacatcgtcaaccattagttccttttaggagaaaaaaatatccaacaaatgaggattgatgcttcctgcaatagtgagcaatgtacaatatatagctttagtcagtttcattgttgtagctgacagtaagaatgtagttttcttttctttttaatataccggttatccagtttgtatgtttctggagtttgccaattctgtttatcaaaaaaaggagatttagtcatttctaaccatttttttcttgtcacgatatccaaaattaccacattatatttaatatagaagatatagttatttcagtatatagtatcatatcttgtttcatcattcaacaaaacaattaaatgctagatgtat

SEQ ID NO: 48983 - DNA, 3475 bp, Zea Mays
ggagactggagttcacaactgttttcgctgtttctctctcccgtagcccagtttacctcgcctagggcgaccaccgccgccgccctacgccagctgcccaggtcttgggcggaccctttgccggcgacgagcacccaccacaccagatcaaactctagatattgccactctacgtcccagcatcctatgaccacatggtttagacagtgctgtccaggtggatgatgaattgtggtgcccaaacggaggcacgtggcacgcctcttgaagataggcactggttggaaacagattttgttggcgctccaagagttcatacttatgtactttcctttctcaaatcataacaaatcttaggcagttcaagcttagctgaatgtcaacttgcctccacgtgcaagatcccagaaacattgctatgtctcgtccgcttgattttgctgtgcttaaatacaaaaaccaaaagcttgcggaacaactggaagtccacaaatttgagttctgtgctcttgagagtagatttaatgatctaaaagagaaacaaaggacacataataagacacttgttctagtcaaaagttattgggagcgactcatagcagatctgggtatagtttctgtttgcaaaaatgaatcttcacgttcaagctgcagtacagggaacaacaatatacgaaaggaaacagactttttaaatggacttttggaggctggtgccacagaaagttcaggttctcccaattgccaactaggaaatgacgtctcttcagaacaatcaacaacaattgatattctgcagaagctattccttccatcaagtggtccatggcatgtgaataacgagtttgtttctgctgctctcatgaagttgccagaaaatggcaattgcacaatgctaccagcgatgtgttatccaagcttcatgtggtgatgcgtacagtagataatcttcacttgaaacacaggcagttagcagcgaactatcaaaaacaaagagattcgagtgcctggaacagagctgaacagaaacgtctgaaagaggagttgactagtgttgttgccaagttggaaggaagcaaacaaaaactggcagtactgaaagcacagggagacaataaacaagcaacaccgatcctggttcctacgctgggaaacaaaaatatgactgcagaaaaggtgagagataaacaaacagaactgcaagatcttgaagctactcacaaggagttaatggaattgatttcaaagcgtctggaggaaattagaaggctgcatacagagagaattgaaattttgaacaagttagcaacttttcagaatatactaacggatttcaaaagcattcactcttccaaagcttttcaacttgtcaatgaccaacttcagaagtcacaagcagaactggatgatcaccaaacgttgttagagaaattacaggttgagatggatacctttgtttggcgagaaaggcaatttaatcaaaaagttgatttggctgaaatcccccagaaggtttctgcatactgtgtgtctagaattgctgaccttgaaaaggatgtccagaaactgtgtaatgaaaagaatatgcttgtgctgaaacttgaagaggcttcgagagaacctggtcggaaccaggttatctcagagtttaaagctctggtgtcatcactaccgagggaaatgggtgccgtgcaaagtgaactgtccaaacacaaggatgcttccttacagttgcattctttgcgagcagaagttcattcactttctagtatccaaaccagaaaggaacaagaaattgaagaaatgtcatttagatctgcccatgctggatctgatataagccaacttcaatctctggtccgtgagctgagggaaaatacacaggagcttaagctatttgtggagttgtataagcatgagtccactgattccagacagctgatggaatcgagagatagggaactcgctgaatgggctcgagttcacattctcaaatattctcttagtgaaagtaaattagagcaacgtgtaatttcagccaatgaagctgaagcaatctctcagcagaggttggcaactgctgaagctgagattgctgaattagggcagaagctagaaacttctaggaggcctcaaaatgttattttctatgacagagcattggccatgcctatgaagatataatgtcacaaaatcaacaattgctacagcagattattgaaagagatgatcataataccaagcttttcatggagggtgttaaatcaaaacagtcacacgatgctttgcatttggaggtgcgctcgttgcaaagaaatttgcagcatgcaagtactttgatggatttgtgcaaccagaaaactatccgcctagaggaccagctaagaggttggtcagagcggttgaggagactgtcagaggatggaatgcagcagtctatttcattgggcaattatcaaaaaaagctgtctggtatgcatggagaagctccaaagctcaggcagtcaatggatgttctacaagcgaaggctgggagcaatcggctggaaattgctgagctgcttatagaactagagaatgagaggtttggtaaaaagagactagaggatgatcttgatctaatgtcaagtaaagctaattctctaagagagaagacagataattcagcagttcttcagaaacttctccatgaggccaaggagtacaggggaatattgaagtgtggtatttgtcatgataggcagaaagaggttgtgattgccaaatgctaccatctcttctgcagtcagtgcatacagaagccacttgggagccgtcagaagaggtgtccatcttgtggactaagcttcggtgttaatgatgtgaaacctatctacatatgaaacagaaggttggcgcctgtgtcgcagcaccaaaacaaaactgcttggcgcttactaatttccggtatatggtaggcggccatggtaattcagtcggtgatgtagcataagattatgtagcatttaagttgctacatgtgattgctggtacccgctggcatatatgatgctggtgttacctcaagcgccttttgtaaagtctgcttgccttgcccaatctggtagaatagcctgacatcgtcaaccattagttccttttaggagaaaaaaatatccaacaaatgaggattgatgcttcctgcaatagtgagcaatgtacaatatatagctttagtcagtttcattgttgtagctgacagtaagaatgtagttttcttttctttttaatataccggttatccagtttgtatgtttctggagtttgccaattctgtttatcaaaaaaaggagatttagtcatttctaaccatttttttcttgtcacgatatccaaaattaccacattatatttaatatagaagatatagttatttcagtatatagtatcatatcttgtttcatcattcaacaaaacaattaaatgctagatgtat

SEQ ID NO: 48984 - DNA, 3037 bp, Zea Mays
gagggaagagggcgttgatcacctaggtcccctgcgccgacgccgtgctggccagcttgattttgctgtgcttaaatacaaaaaccaaaagcttgcggaacaactggaagtccacaaatttgagttctgtgctcttgagagtagatttaatgatctaaaagagaaacaaaggacacataataagacacttgttctagtcaaaagttattgggagcgactcatagcagatctgggtatagtttctgtttgcaaaaatgaatcttcacgttcaagctgcagtacagggaacaacaatatacgaaaggaagctattccttccatcaagtggtccatggcatgtgaataacgagtttgtttctgctgctctcatgaagttgccagaaaatgaacacagcaggcaattgcacaatgctaccagcgatgtgttatccaagcttcatgtggtgatgcgtacagtagataatcttcacttgaaacacaggcagttagcagcgaactatcaaaaacaaagagattcgagtgcctggaacagagctgaacagaaacgtctgaaagaggagttgactagtgttgttgccaagttggaaggaagcaaacaaaaactggcagtactgaaagcacagggagacaataaacaagcaacaccgatcctggttcctacgctgggaaacaaaaatatgactgcagaaaaggtgagagataaacaaacagaactgcaagatcttgaagctactcacaaggagttaatggaattgatttcaaagcgtctggaggaaattagaaggctgcatacagagagaattgaaattttgaacaagttagcaacttttcagaatatactaacggatttcaaaagcattcactcttccaaagcttttcaacttgtcaatgaccaacttcagaagtcacaagcagaactggatgatcaccaaacgttgttagagaaattacaggttgagatggatacctttgtttggcgagaaaggcaatttaatcaaaaagttgatttggctgaaatcccccagaaggtttctgcatactgtgtgtctagaattgctgaccttgaaaaggatgtccagaaactgtgtaatgaaaagaatatgcttgtgctgaaacttgaagaggcttcgagagaacctggtcggaaccaggttatctcagagtttaaagctctggtgtcatcactaccgagggaaatgggtgccgtgcaaagtgaactgtccaaacacaaggatgcttccttacagttgcattctttgcgagcagaagttcattcactttctagtatccaaaccagaaaggaacaagaaattgaagaaatgtcatttagatctgcccatgctggatctgatataagccaacttcaatctctggtccgtgagctgagggaaaatacacaggagcttaagctatttgtggagttgtataagcatgagtccactgattccagacagctgatggaatcgagagatagggaactcgctgaatgggctcgagttcacattctcaaatattctcttagtgaaagtaaattagagcaacgtgtaatttcagccaatgaagctgaagcaatctctcagcagaggttggcaactgctgaagctgagattgctgaattagggcagaagctagaaacttctaggagagatctagtgaaacaatctgatatactgaagtctaaacatgaagaatgtgaagcgtatgttgtggagatcgagagcattggccatgcctatgaagatataatgtcacaaaatcaacaattgctacagcagattattgaaagagatgatcataataccaagcttttcatggagggtgttaaatcaaaacagtcacacgatgctttgcatttggaggtgcgctcgttgcaaagaaatttgcagcatgcaagtactttgatggatttgtgcaaccagaaaactatccgcctagaggaccagctaagaggttggtcagagcggttgaggagactgtcagaggatggaatgcagcagtctatttcattgggcaattatcaaaaaaagctgtctggtatgcatggagaagctccaaagctcaggcagtcaatggatgttctacaagcgaaggctgggagcaatcggctggaaattgctgagctgcttatagaactagagaatgagaggtttggtaaaaagagactagaggatgatcttgatctaatgtcaagtaaagctaattctctaagagagaagacagataattcagcagttcttcagaaacttctccatgaggccaaggagtacaggggaatattgaagtgtggtatttgtcatgataggcagaaagaggttgtgattgccaaatgctaccatctcttctgcagtcagtgcatacagaagccacttgggagccgtcagaagaggtgtccatcttgtggactaagcttcggtgttaatgatgtgaaacctatctacatatgaaacagaaggttggcgcctgtgtcgcagcaccaaaacaaaactgcttggcgcttactaatttccggtatatggtaggcggccatggtaattcagtcggtgatgtagcataagattatgtagcatttaagttgctacatgtgattgctggtacccgctggcatatatgatgctggtgttacctcaagcgccttttgtaaagtctgcttgccttgcccaatctggtagaatagcctgacatcgtcaaccattagttccttttaggagaaaaaaatatccaacaaatgaggattgatgcttcctgcaatagtgagcaatgtacaatatatagctttagtcagtttcattgttgtagctgacagtaagaatgtagttttcttttctttttaatataccggttatccagtttgtatgtttctggagtttgccaattctgtttatcaaaaaaaggagatttagtcatttctaaccatttttttcttgtcacgatatccaaaattaccacattatatttaatatagaagatatagttatttcagtatatagtatcatatcttgtttcatcattcaacaaaacaattaaatgctagatgtat

SEQ ID NO: 48985 - DNA, 3231 bp, Zea Mays
cttatcttccaaggaatcttgtcttctcctaatctggcgctgattggctctgctgcctcttcttgcgccccttccattttcttgcgcctggtgaactggcggtccacaaaagcgtctataacactattaccttgattttgctgtgcttaaatacaaaaaccaaaagcttgcggaacaactggaagtccacaaatttgagttctgtgctcttgagagtagatttaatgatctaaaagagaaacaaaggacacataataagacacttgttctagtcaaaagttattgggagcgactcatagcagatctgggtatagtttctgtttgcaaaaatgaatcttcacgttcaagctgcagtacagggaacaacaatatacgaaaggaaacagactttttaaatggacttttggaggctggtgccacagaaagttcaggttctcccaattgccaactaggaaatgacgtctcttcagaacaatcaacaacaattgatattctgcagaagctattccttccatcaagtggtccatggcatgtgaataacgagtttgtttctgctgctctcatgaagttgccagaaaatgaacacagcaggcaattgcacaatgctaccagcgatgtgttatccaagcttcatgtggtgatgcgtacagtagataatcttcacttgaaacacaggcagttagcagcgaactatcaaaaacaaagagattcgagtgcctggaacagagctgaacagaaacgtctgaaagaggagttgactagtgttgttgccaagttggaaggaagcaaacaaaaactggcagtactgaaagcacagggagacaataaacaagcaacaccgatcctggttcctacgctgggaaacaaaaatatgactgcagaaaaggtgagagataaacaaacagaactgcaagatcttgaagctactcacaaggagttaatggaattgatttcaaagcgtctggaggaaattagaaggctgcatacagagagaattgaaattttgaacaagttagcaacttttcagaatatactaacggatttcaaaagcattcactcttccaaagcttttcaacttgtcaatgaccaacttcagaagtcacaagcagaactggatgatcaccaaacgttgttagagaaattacaggttgagatggatacctttgtttggcgagaaaggcaatttaatcaaaaagttgatttggctgaaatcccccagaaggtttctgcatactgtgtgtctagaattgctgaccttgaaaaggatgtccagaaactgtgtaatgaaaagaatatgcttgtgctgaaacttgaagaggcttcgagagaacctggtcggaaccaggttatctcagagtttaaagctctggtgtcatcactaccgagggaaatgggtgccgtgcaaagtgaactgtccaaacacaaggatgcttccttacagttgcattctttgcgagcagaagttcattcactttctagtatccaaaccagaaaggaacaagaaattgaagaaatgtcatttagatctgcccatgctggatctgatataagccaacttcaatctctggtccgtgagctgagggaaaatacacaggagcttaagctatttgtggagttgtataagcatgagtccactgattccagacagctgatggaatcgagagatagggaactcgctgaatgggctcgagttcacattctcaaatattctcttagtgaaagtaaattagagcaacgtgtaatttcagccaatgaagctgaagcaatctctcagcagaggttggcaactgctgaagctgagattgctgaattagggcagaagctagaaacttctaggagagatctagtgaaacaatctgatatactgaagtctaaacatgaagaatgtgaagcgtatgttgtggagatcgagagcattggccatgcctatgaagatataatgtcacaaaatcaacaattgctacagcagattattgaaagagatgatcataataccaagcttttcatggagggtgttaaatcaaaacagtcacacgatgctttgcatttggaggtgcgctcgttgcaaagaaatttgcagcatgcaagtactttgatggatttgtgcaaccagaaaactatccgcctagaggaccagctaagaggttggtcagagcggttgaggagactgtcagaggatggaatgcagcagtctatttcattgggcaattatcaaaaaaagctgtctggtatgcatggagaagctccaaagctcaggcagtcaatggatgttctacaagcgaaggctgggagcaatcggctggaaattgctgagctgcttatagaactagagaatgagaggtttggtaaaaagagactagaggatgatcttgatctaatgtcaagtaaagctaattctctaagagagaagacagataattcagcagttcttcagaaacttctccatgaggccaaggagtacaggggaatattgaagtgtggtatttgtcatgataggcagaaagaggttgtgattgccaaatgctaccatctcttctgcagtcagtgcatacagaagccacttgggagccgtcagaagaggtgtccatcttgtggactaagcttcggtgttaatgatgtgaaacctatctacatatgaaacagaaggttggcgcctgtgtcgcagcaccaaaacaaaactgcttggcgcttactaatttccggtatatggtaggcggccatggtaattcagtcggtgatgtagcataagattatgtagcatttaagttgctacatgtgattgctggtacccgctggcatatatgatgctggtgttacctcaagcgccttttgtaaagtctgcttgccttgcccaatctggtagaatagcctgacatcgtcaaccattagttccttttaggagaaaaaaatatccaacaaatgaggattgatgcttcctgcaatagtgagcaatgtacaatatatagctttagtcagtttcattgttgtagctgacagtaagaatgtagttttcttttctttttaatataccggttatccagtttgtatgtttctggagtttgccaattctgtttatcaaaaaaaggagatttagtcatttctaaccatttttttcttgtcacgatatccaaaattaccacattatatttaatatagaagatatagttatttcagtatatagtatcatatcttgtttcatcattcaacaaaacaattaaatgctagatgtat

SEQ ID NO: 48986 - DNA, 3499 bp, Zea Mays
aaaaagagagagaggaaacgggcgcacgcggccttcctccccctccgcctcctctcctcggccgcgccttggacgcgtccgacgccgagccttcctttcgttcctctccaatcgagccaaaaggactcccgtctctttccctcctcctttctcgcctcgccccccttttccagcctaaaccccctcgcccccgcacctctttcttccccatatggccatactatcacactagactcctctcctctccgctccgcgccggcatggcctcctgttcccagcgcctctcacctaccgtgtgccagtccccctcacgcgccacgccccccctcggataactactagttgccgtaccgtgggagcgccgcctcgagtctcaccaacaacacctgctggggcgtccgtgcgtgcgtgctccggatgggggcgtcccacgacgacgaggcggggccgctggcgagcctcctggcggcgcgccgcgcgctgcgggccggcctggacaagtcgcgcgcgctgagccgcgcgctggcgccccggctggaggggatccaggcgcggctgccggccatggaggcgtcagtgcgcccgatccgcgcgccgccggaggcgctcgccacggcggggcccaacatcgaccgcgccgtgggccccgccgccgccgtgctcaaggtgttcgacgccgtgcacggcctcgagccgccgctcctcgaccgcgccgccgccgccgccgacctcccgggctacctcgccgtgctcgcgcagctcgaggccgcgctccgcctcctctccgacaactgcggcctcgccacgcagtggctggccgacatcgtcgcctacctcggggagcgcaggctcgccgacgcccgcttcgtggccggcctcgccgccgcgctcgaccgcctcagggacgacgcctccgccggcctcgacgccgggctgctcgccgccgcgcttgacatgctccaggctgagttccgccggctcctcaaggaccactccgcgccgcttgctatgaaggaccccgacggctctggctccgatccgccccccgtcgtcccttctcggatccctgccgcagtcgtgcacaagctcagcctcatccttgaccgcctcgctgccaacggccggcttgaccactgctcctcggcgtatggggacgcgcgaggggataccgtgtgcgccagcctccgcgcgctcggccttgattacctcaaggagacgtcgggggacgcgcaggcgctcagcccgagcgtcgagcgctgggcccggcatctggagtttgcggtgcaccacctccttgaagctgagagaaagctctgtgtcgcggtgtttgaacggcggcctgaggccgcgcccttgtgctttgctgagattgcagctcgtgctggcattcttgatttcctcgactttggccgtgccctggctgatgccaggaaggaccccatcaagctattgcggctgctcgatgtgttccattgtttgaacaagctgaggctggatttcaaccgtttgttcggtggaaaggcctgcgtagagatccaaagcaggactagggagctcgtcaagagggtcgtggatggtgctgttgagatctttgaggaattgcttgttcaggttgagctgcagcgcactataccgccaccagttgacggcggggtgccacgcctagtgagctttgtcgctaagtactgcaatcagcttcttggggagcagtatcgatctgtgctaacacaggtgatcaccatccaccgcagctggcgcaaagaagtgtttaatgacaagatgcttgttgatgcggtgcttaatatcgttaagacacttgagctcaactttgatacatggtcaaaggcttatggagatacaacactgtcgtctctcttcatgatgaacatacactggcacttcttcaaacacctaaagggtactaagctgggcgagctgttaggtgatccatggctccgggagcatgaacagtacaaggattactactcagcgatgtttctgagggagagctggggaacacttgcacccctgttgagcagggagggcctgatcatgttttccaagggccgggctactgcaagagatttagtgaaacagaggctcaaatcattcaatgctagcttcgacgagatgtttcaaaagcagtctaaatgggtgatatcggatagggatttgcagcagaagacatgccacctcgtggtgcaggccgtagtgcctgtttacaggagcttcatgcagaattatgggccgcttgttgagcaggacgttagtgcgagcaggtatgtgaagtacagcgccgaggatctggataagatgctcaacacgctcttcctgtccaagccaggcaggccaatgagagctggaagcttccaaatcaaaaattcgaatgacaagattaccagtgcaatgacaggattgtatcggagtgcttctactctgaagtagcttcagtggcagttgggaaatactgaatgcacaatttgtgcaataagccaataacttcgtaggcaaaggtggttcgggccagtaagtcaagatccccacttatgtggggggtgcaataatggttccatgattagagcagctggagcataagatgaacataaaactcttccagaactgatattgtgggggagaaagatgacaggagtgtttcctcagcgggtctccttcctgtcgatcatcttttcaccttctattgcattcttatctgtagcaagtatactcaattcattttaggaacttgtgtgggagcagaggatgtgtaatcagttatctggtacatggtagaagattggttgtattataggaggtgttaagttgttgcatatggttatggtatactatgttttagatctcatgaacatgcagtgaattatatggagtacattataactggtggcgaatggtaattacagcagttaattatatgggatggcatactgtttttttccttttccaagtctctattgcagtattgctacactattacatagttctttccgcttttatggaatggtttacttttggatctgttctttgttctttgatgttgtgatgtacagaagcatgcagtcgattataggcttactaccttttatgctaatgcataacactaccatgaaactgatacagtagaggcatacattatagtcagtgctattcattcctttccatttcatcatgtatttctgctcgtccaaagcttggtaatattttcttgtcgattgtgttgtctaaatttctggaaaacagctatggctgcacacacatgctgacttgacgagtgattttgctttttgtatgagaaaacatgtttcttgttggttatgtagacttatattatggattccaggtattaactagctgattgcttagtatacaggatggagggaacatgaatccccctttacgatcatttttaggtatttttttgttactcagggatttctagcccctggtgtttccaaacagcggcagcagggtgctgggaatcccc

SEQ ID NO: 48987 - DNA, 2319 bp, Zea Mays
aaaggactcccgtctctttccctcctcctttctcgcctcgccccccttttccagcctaaaccccctcgcccccgcacctctttcttccccatatggccatactatcacactagactcctctcctctccgctccgcgccggcatggcctcctgttcccagcgcctctcacctaccgtgtgccagtccccctcacgcgccacgccccccctcggataactactagttgccgtaccgtgggagcgccgcctcgagtctcaccaacaacacctgctggtgcgtagccgcgcccgcgcccccgccgcggctctctggttggattcccgtgcgggatcggcgggcgaacctccgactcaccgccgcgaccgttcccgcattacaggggcgtccgtgcgtgcgtgctccggatgggggcgtcccacgacgacgaggcggggccgctggcgagcctcctggcggcgcgccgcgcgctgcgggccggcctggacaagtcgcgcgcgctgagccgcgcgctggcgccccggctggaggggatccaggcgcggctgccggccatggaggcgtcagtgcgcccgatccgcgcgccgccggaggcgctcgccacggcggggcccaacatcgaccgcgccgtgggccccgccgccgccgtgctcaaggtgttcgacgccgtgcacggcctcgagccgccgctcctcgaccgcgccgccgccgccgccgacctcccgggctacctcgccgtgctcgcgcagctcgaggccgcgctccgcctcctctccgacaactgcggcctcgccacgcagtggctggccgacatcgtcgcctacctcggggagcgcaggctcgccgacgcccgcttcgtggccggcctcgccgccgcgctcgaccgcctcagggacgacgcctccgccggcctcgacgccgggctgctcgccgccgcgcttgacatgctccaggctgagttccgccggctcctcaaggaccactccgcgccgcttgctatgaaggaccccgacggctctggctccgatccgccccccgtcgtcccttctcggatccctgccgcagtcgtgcacaagctcagcctcatccttgaccgcctcgctgccaacggccggcttgaccactgctcctcggcgtatggggacgcgcgaggggataccgtgtgcgccagcctccgcgcgctcggccttgattacctcaaggagacgtcgggggacgcgcaggcgctcagcccgagcgtcgagcgctgggcccggcatctggagtttgcggtgcaccacctccttgaagctgagagaaagctctgtgtcgcggtgtttgaacggcggcctgaggccgcgcccttgtgctttgctgagattgcagctcgtgctggcattcttgatttcctcgactttggccgtgccctggctgatgccaggaaggaccccatcaagctattgcggctgctcgatgtgttccattgtttgaacaagctgaggctggatttcaaccgtttgttcggtggaaaggcctgcgtagagatccaaagcaggactagggagctcgtcaagagggtcgtggatggtgctgttgagatctttgaggaattgcttgttcaggttgagctgcagcgcactataccgccaccagttgacggcggggtgccacgcctagtgagctttgtcgctaagtactgcaatcagcttcttggggagcagtatcgatctgtgctaacacaggtgatcaccatccaccgcagctggcgcaaagaagtgtttaatgacaagatgcttgttgatgcggtgcttaatatcgttaagacacttgagctcaactttgatacatggtcaaaggcttatggagatacaacactgtcgtctctcttcatgatgaacatacactggcacttcttcaaacacctaaagggtactaagctgggcgagctgttaggtgatccatggctccgggagcatgaacagtacaaggattactactcagcgatgtttctgagggagagctggggaacacttgcacccctgttgagcagggagggcctgatcatgttttccaagggccgggctactgcaagagatttagtgaaacagaggctcaaatcattcaatgctagcttcgacgagatgtttcaaaagcagtctaaatgggtgatatcggatagggatttgcagcagaagacatgccacctcgtggtgcaggccgtagtgcctgtttacaggagcttcatgcagaattatgggccgcttgttgagcaggacgttagtgcgagcaggtatgtgaagtacagcgccgaggatctggataagatgctcaacacgctcttcc

SEQ ID NO: 48988 - DNA, 2372 bp, Zea Mays
gaaccaatgaaaaatggtgttttatatagtagtgagggtctggtaattcttttttggtaaactcacagtttacatgcgactaaccgtataaagtacagactgaccaagtctagcgatggtacaatgagaaattctcctacaggccttgctacaacaaagtatttcaggtgacacggagctcaagcaaaaccactgccactctcctatctcaaatctctggcagtggcaccctgttcaaccaaacgtctactgttttcctgctggccgttttcagcaaacacggaatcttcaagcaagacccatgcttcagccgccatgcagacagatggcggatgtttcctgaatccagcattgttggtggctgcaaattgttttttttttctaaaaaacgcaggagagttgtgtttcattccattaagaagaaaaaaacagagataatacaaaacagccacctcacagggggccaaatacagacatactgatactcatccatgaataaagcacccaaaactacaaattcctacagacccgggatgtgactagtcagcaaggatagttttcttgccccagtcagctcccgcttctctcgctcttgatcgccattctgacagcaagagccacattaggtctgtttctgtcgaagacacagctattccgacgtttccatattgtccaagctcctgaaattaccagggagtttactgcttcccctgccactgactccatgtatctgattgcccagccatctccaccagcccataaaagatgcatcaacaagctgagaggccatgttttggagattaacttgagatagtagtttaaaccagaaatctcgggcgaacacacacccaatcagcaaatggcctgctcctgacaaagggcagctcgtagggtgatccatgcctctcttttccaacctgttagctgtccaaagccgtcgcgaccagccacatgaagaacttggcctttggaggagcccgggttttccaaattatgtggtacggttcaaaaatcgtcgacccaaggaaaaaaaccctcatagactgcctttgttgaatacttcccattggcggcgagacgaaagaagtgagtgtcattcacttcgcgtctaagctgaaccgaggtgacaatatcccatagagcaaggtattcagaaataaccccaacagcaagagctccttgtatgtctgaaatccaagtctgattagtgagagcatccaaaacagtcctcttattaaccctccttttaggaacattctggagtaatcttggggcaatgtccatgaccctgtgtcccatcaaccaacggtcagaccaaaaaagagtagaggctccattaccaatttcagtttgcatagccaccgagaagaaaactttagccttgctgggaacttgtatagcaagggaggcccatggccgtcccggatcagtttttgctaaccaaaaccaacgcatacgaagtgcccaagcaagatcaatgagattggaaatccctagcccaccaagctcaagcggccgacaaacttttccccaagcaacaagacagtgtccccccctcgcttctttgcgccatcgccaaagaaagcctcggcggatcttgtcaatagctttgagagcccaaggaggtaaatccacagccattgcgagatatatgaccatccctgtgaggacaaactgcacatggaccttccatccagccttagtcatcaaatcagatttccaccccgatagttggttggcaattttatcaataatcgtttgtacttggtccttggtaagtttcttgatggcaagaagtagacccaagtatttgcagggaaattgtgagatctcacaaggcagcaagctttgcagtaaggtcaagtcttgttccccgcatctaattgggcatacattgcttttctggatattagttcgcaacctggaagcctccccaaagatatgaagaatgtccagtacagtcctgatatccccgactgttggttggataaatataaccacatcatcaacataaatagagaatctgtgatggagagttcttgtagcaaggggccgaagcaacccttcattctcagccttggtaataagaaagcccagaacgtccatcaccaaaatgaataacattggggaaagtgggtcatcttgtctgagcccacgccgatgagatatatgctgccctggagatccattaagcaacacctgtgtggaggaagtccatagcaggccactagctaggttcaaaagccataaacgaggcacaacacgaacaatcagttccgtctcaagttccggcaccaagatgaacagcatattgcgcggctggttcattgaagaagaattctcaccgactgtcagatgccagatgatcccag

SEQ ID NO: 48989 - DNA, 1751 bp, Zea Mays
cggcactcgactccgcacgctgccagaccggcgacgagcggcggcggaagggagggacgggtcattggcgtgtgctccttggcagaaaatggcgatgatggtggatccccccaatggcatggcaagtcaaggaaagcattactatactatgtggcagacactgtttgagatcgacaccaagtacgtgccgatcaagcccatcggaagaggagcttacggaatcgtttgctcatctgttaaccgcgagaccaatgaaaaagtcgcgataaaaaagataaacaacgtctttgacaaccgtgtggatgcgctaaggacgctgagagagctgaaactccttcggcacctgaggcacgagaatgttattgctctcaaggacataatgatgcctgcgcatagaaggagcttcaaggacgtttacttggtttatgagctcatggacactgatctgcatcaaataattaagtcatctcaaccactatccaatgaccactgccagtatttcctttttcagctgctccgaggcctgaagtacctccattcagccgggatactccacagagacctaaagccagggaacctcctggtcaacgcaaactgtgacctgaagatatgcgacttcgggctcgcccgcacgaacaacaccaagggccagttcatgacggagtacgtggtgacccgctggtacagggcacccgagctgctgctctgctgcgacaactacggcacgtccattgacgtctggtctgtggggtgcatattcgcggagctgcttggccgcaagccgatcttcccaggaaccgagtgcctgaaccagctcaagctcatcgtcaacgtcctcggcaccatgggcgaggccgacctcgcgttcatcgacaacccgaaggcccgcaagtacatcaagtcccttccgtacgccccgggcgcccccttcaccggcatgtaccctcaggcgcaccctctcgccatcgacctgctgcagaagatgctcgtgttcgacccgtccaagaggatcagcgtcaccgaggcgctggagcacccgtacatgtctccgctctatgacccgagcgcgaaccctcccgcgcaggtgccgatcgacctcgacatcgacgagaacctcggcgtcgacatgatcagggagatgatgtggcaggagatgatccactaccaccccgaggtcctcacgagaatcagcatgtgagtatgtgatgtgaccagacaggcagcaatgaaacatgtggacagaggtctgctgcgccaggatcatcacatgttcgcccttcttacgagcttaactgcgattacggcaccgagtcgaggtatcactacatgtatcggaaccgtcaggcggtctcttgtgtaaatatgcgctgaataagatgtgtggcaatctcttgttttttggttgtacatggacctcgctgttgtacgagtctgtgaagtggaaccctggtactaagacctgtaatttcagaccctaatctgttgtatggaaatctgaaggccttgactcccatctgtttgtgtcacacccagatttaaaacctgtttgtatcacacccggatttaaaacccggaagaacatcacatacaatttgagataaatatcataaatgtcattattacataacaaaagtcttataagaggataaataataataaaacaaactaaatattattttctcggtgccacaaagctgactaggagacgccacctagatcaactcgtaagctttattgcagggcggctcctc

SEQ ID NO: 48990 - DNA, 1769 bp, Zea Mays
cttagctcggggagccgcgtccgactatggtggagtccaatcaacgctgcctgccgcgggaattggcgctccagtgaggtcattggcgtgtgctccttggcagaaaatggcgatgatggtggatccccccaatggcatggcaagtcaaggaaagcattactatactatgtggcagacactgtttgagatcgacaccaagtacgtgccgatcaagcccatcggaagaggagcttacggaatcgtttgctcatctgttaaccgcgagaccaatgaaaaagtcgcgataaaaaagataaacaacgtctttgacaaccgtgtggatgcgctaaggacgctgagagagctgaaactccttcggcacctgaggcacgagaatgttattgctctcaaggacataatgatgcctgcgcatagaaggagcttcaaggacgtttacttggtttatgagctcatggacactgatctgcatcaaataattaagtcatctcaaccactatccaatgaccactgccagtatttcctttttcagctgctccgaggcctgaagtacctccattcagccgggatactccacagagacctaaagccagggaacctcctggtcaacgcaaactgtgacctgaagatatgcgacttcgggctcgcccgcacgaacaacaccaagggccagttcatgacggagtacgtggtgacccgctggtacagggcacccgagctgctgctctgctgcgacaactacggcacgtccattgacgtctggtctgtggggtgcatattcgcggagctgcttggccgcaagccgatcttcccaggaaccgagtgcctgaaccagctcaagctcatcgtcaacgtcctcggcaccatgggcgaggccgacctcgcgttcatcgacaacccgaaggcccgcaagtacatcaagtcccttccgtacgccccgggcgcccccttcaccggcatgtaccctcaggcgcaccctctcgccatcgacctgctgcagaagatgctcgtgttcgacccgtccaagaggatcagcgtcaccgaggcgctggagcacccgtacatgtctccgctctatgacccgagcgcgaaccctcccgcgcaggtgccgatcgacctcgacatcgacgagaacctcggcgtcgacatgatcagggagatgatgtggcaggagatgatccactaccaccccgaggtcctcacgagaatcagcatgtgagtatgtgatgtgaccagacaggcagcaatgaaacatgtggacagaggtctgctgcgccaggatcatcacatgttcgcccttcttacgagcttaactgcgattacggcaccgagtcgaggtatcactacatgtatcggaaccgtcaggcggtctcttgtgtaaatatgcgctgaataagatgtgtggcaatctcttgttttttggttgtacatggacctcgctgttgtacgagtctgtgaagtggaaccctggtactaagacctgtaatttcagaccctaatctgttgtatggaaatctgaaggccttgactcccatctgtttgtgtcacacccagatttaaaacctgtttgtatcacacccggatttaaaacccggaagaacatcacatacaatttgagataaatatcataaatgtcattattacataacaaaagtcttataagaggataaataataataaaacaaactaaatattattttctcggtgccacaaagctgactaggagacgccacctagatcaactcgtaagctttattgcagggcggctcctc

SEQ ID NO: 48991 - DNA, 1265 bp, Zea Mays
gatttttcttagggattgttttattctgctccgaggcctgaagtacctccattcagccgggatactccacagagacctaaagccagggaacctcctggtcaacgcaaactgtgacctgaagatatgcgacttcgggctcgcccgcacgaacaacaccaagggccagttcatgacggagtacgtggtgacccgctggtacagggcacccgagctgctgctctgctgcgacaactacggcacgtccattgacgtctggtctgtggggtgcatattcgcggagctgcttggccgcaagccgatcttcccaggaaccgagtgcctgaaccagctcaagctcatcgtcaacgtcctcggcaccatgggcgaggccgacctcgcgttcatcgacaacccgaaggcccgcaagtacatcaagtcccttccgtacgccccgggcgcccccttcaccggcatgtaccctcaggcgcaccctctcgccatcgacctgctgcagaagatgctcgtgttcgacccgtccaagaggatcagcgtcaccgaggcgctggagcacccgtacatgtctccgctctatgacccgagcgcgaaccctcccgcgcaggtgccgatcgacctcgacatcgacgagaacctcggcgtcgacatgatcagggagatgatgtggcaggagatgatccactaccaccccgaggtcctcacgagaatcagcatgtgagtatgtgatgtgaccagacaggcagcaatgaaacatgtggacagaggtctgctgcgccaggatcatcacatgttcgcccttcttacgagcttaactgcgattacggcaccgagtcgaggtatcactacatgtatcggaaccgtcaggcggtctcttgtgtaaatatgcgctgaataagatgtgtggcaatctcttgttttttggttgtacatggacctcgctgttgtacgagtctgtgaagtggaaccctggtactaagacctgtaatttcagaccctaatctgttgtatggaaatctgaaggccttgactcccatctgtttgtgtcacacccagatttaaaacctgtttgtatcacacccggatttaaaacccggaagaacatcacatacaatttgagataaatatcataaatgtcattattacataacaaaagtcttataagaggataaataataataaaacaaactaaatattattttctcggtgccacaaagctgactaggagacgccacctagatcaactcgtaagctttattgcagggcggctcctc

SEQ ID NO: 48992 - DNA, 1310 bp, Zea Mays
cttcctctgggcgccggctggcccgccggccgccgcacctcctgttcttgttcgctccacctccgccaaaaaagaaaaagaaaaaggccaaacgtgggtcctcctccctcccttcgctaaaacctcattcgtcatcttgggcgaatccaagcgctaggtctcgcttgcttgctccctcccggtccctgatcgagtcggagacggctctctgcttcctccgcccgatgctcggttcacttcactccaaccaagtcgaaccacgcctccgctgtccgcccgtccacgctgcctctctctgcctgccctcctctccttcctccactccttgccgaaactgccacgagcacctcctgagcccaagctcgtttactttccaagtttggtgcggtgctcgcagctcgctggtgctgctgacgcggccgccgccttgattagcgacaagccacacccgctgttcctggcttcctgctcgggccggccgctttgattattcgtctctttttctttctcggcgatcgcctttttcccgagattgcattttttttattttgtcggcggtacggcactttggctccttccgcgaggccgccggccgtgcagatgcagcagcagcagcagaagctggtggtggcgtcgtgaacaagaaattcctccggttccacgcggttaaacatgaagacaatgatctcttcccaaagaatggtaccggcgctgttatcagggaaggcaacattctgaagatgcagcgcaagcagaagccatgcactcccctcccctccaacaagcagagtcggtactaccggcctcgggtcaaggggaggtttgtcagcaaggcttgtttcctccagcgacagcaagcgttagagaaggagagctagagaaagatggatcctgctccaaggcgcatttctggggctctcttggagaagcagcagagcttctccgttttcatctctgcggcggtacagtgcggcagatgtagagatgcctgtagagtggtgcttgtgaacctcaattctcagtttcttctatccattccaggttcccatattgtggagggttcgaacgtgcctaaagtgaagacagaaaacaacaacagactcctagttcacacacaatacgttttcagagcccaggtcacgtacccagcactcgaaaagaaaaaaaacagtaacctccagcttcgttcgtcttcccgctgaccaccacccatcagctggttctcatcaccttgtttgtctgcgctgtcaccatcgacatgttgctgcaagtagaagctattagagcatttccaactgacttacaaaaat

SEQ ID NO: 48993 - DNA, 2360 bp, Zea Mays
ctaaaacctcattcgtcatcttgggcgaatccaagcgctaggtctcgcttgcttgctccctcccggtccctgatcgagtcggagacggctctctgcttcctccgcccgatgctcggttcacttcactccaaccaagtcgaaccacgcctccgctgtccgcccgtccacgctgcctctctctgcctgccctcctctccttcctccactccttgccgaaactgccacgagcacctcctgagcccaagctcgtttactttccaagtttggtgcggtgctcgcagctcgctggtgctgctgacgcggccgccgccttgattagcgacaagccacacccgctgttcctggcttcctgctcgggccggccgctttgattattcgtctctttttctttctcggcgatcgcctttttcccgagattgcattttttttattttgtcggcggtacggcactttggctccttccgcgaggccgccggccgtgcagatgcagcagcagcagcagaagctggtggtggcgtcgtgaacaagaaattcctccggttccacgcggtcccctcccctcgctttggccccatttattttcttccttttccgctggttttctggtggggggcggggggttttgcgctggttgttccggttgggtttaggacgccaaccagctggttttccccaccccgcttgcgcttccatccgtgagctcatccgcccagctggaaaacaagaatcctcatgagttctagaagggaagtcgcgatctctgggtgaggtgtccgtttcctcccgttgctggatccgctgactgaccgatcggcagagccgccatggcgtcgtcgtgcatcccggccggcggcatccggctgccggacctggagatggtcaaggccgcgccgccggcgcactccgcggcgtcctccacgctctcggaggcgtccagcgcgtccgcagtctcctcgtcggccacctcgtcatcggtggcgtcgctgtcgctcaagcgcccgcgcacgccgcggaagcggtccagccagacgtacaacgaggcggcggcactgctcgcgtccatgtacccctccgtcttccccgtcgccaggggcggcgccgcgccgcgccgcctcctcggcctcgcctccgcgctcgccgacgactcgtcctgctccgacctcctcccgccgttcccagtccccggcggccacgccgccttcctcctccgcgacctgacgccgcggatccccgccgccgaaagctgcccgtcgcccgctgccgtcagcagcgtcttcagcgagttccgcgacccggcgccgtctcctgcgacccctgacgacgctgcggcggcgcctgacgagcgcagggatcttggcttcgacgatgacgacggtttcgacgccgattctattctgtgcggcgtcgaccagagcgcggccgagggcatcgatggcatcatgggatcagaatatcatcatcaatcaagcgctgaagcggcatagtgtcgatcctgaatggtggatgtgccctgccatacctgtgaaagacattaccccggcaccaccgccttcagtggcaatggccaaggtgacagacaagaagaagactaagaagaagtcactggggacaatatacgaggaggggagtcctgagcctgccaatggcgatgacgatggagctttggcactgccagagacaggattggggcttagcttgaatactgacggggtgctcaaggcgtggtgtggcagaggctctgcgtttgctgatggcaatgggcctgacttgccattgtcccctgctcatgtggtagttaaacatgaagacaatgatctcttcccaaagaatggtaccggcgctgttatcagggaaggcaacattctgaagatgcagcgcaagcagaagccatgcactcccctcccctccaacaagcagagtcggtactaccggcctcgggtcaaggggaggtttgtcagcaaggcttgtttcctccagcgacagcaagcgttagagaaggagagctagagaaagatggatcctgctccaaggcgcatttctggggctctcttggagaagcagcagagcttctccgttttcatctctgcggcggttcccatattgtggagggttcgaacgtgcctaaagtgaagacagaaaacaacaacagactcctagttcacacacaatacgttttcagagcccaggtcacgtacccagcactcgaaaagaaaaaaaacagtaacctccagcttcgttcgtcttcccgctgaccaccacccatcagctggttctcatcaccttgtttgtctgcgctgtcaccatcgacatgttgctgcaagtagaagctattagagcatttccaactgacttacaaaaat

SEQ ID NO: 48994 - DNA, 1377 bp, Zea Mays
attaaaagcaacaacgatcaggaaaaggaaaatccagagtgaagaagctggtatcgtttcttcagcattaaaacttaagacgcaggccttatgatccctgctggaaacaaacgctcatccagcaactatctttcagatttctatacttcgttcgtggaagtccccttatttaagtaacttatgtcaaatggctgagctttcccttacagttgcccagttatcctaaccattttaacgagccatagatagccagtaaccacttcagcacagaagacatgcaggtaccccaaggcatgtatgcatatgctcagttcaattgttggtagagtggttgggctcaatttggctgtgcaaaagctagcgcaatgaaccccagccaacctggcctttctgcttttgaatagcaagtatattggagcggctgtgcttttggaaagaaacccattcgttaaagcttttgttggctctcctgacatagacatgttaatgatcaattgccccgcattttgcaaaaaactgtctcattgtgctaaaactggctcgtttggtaagacatgttaatgatcaattgcctatccccaacttgctgttgtacactgtacatgaacctggttttctttcaaacatatatatgtttttttgtttttgagaaacttcttgcatataaagctacacttttactgaagagacgagacatgcttctcactggcaagtgtggaacttccatcgcaggttaaacatgaagacaatgatctcttcccaaagaatggtaccggcgctgttatcagggaaggcaacattctgaagatgcagcgcaagcagaagccatgcactcccctcccctccaacaagcagagtcggtactaccggcctcgggtcaaggggaggtttgtcagcaaggcttgtttcctccagcgacagcaagcgttagagaaggagagctagagaaagatggatcctgctccaaggcgcatttctggggctctcttggagaagcagcagagcttctccgttttcatctctgcggcggtacagtgcggcagatgtagagatgcctgtagagtggtgcttgtgaacctcaattctcagtttcttctatccattccaggttcccatattgtggagggttcgaacgtgcctaaagtgaagacagaaaacaacaacagactcctagttcacacacaatacgttttcagagcccaggtcacgtacccagcactcgaaaagaaaaaaaacagtaacctccagcttcgttcgtcttcccgctgaccaccacccatcagctggttctcatcaccttgtttgtctgcgctgtcaccatcgacatgttgctgcaagtagaagctattagagcatttccaactgacttacaaaaat

SEQ ID NO: 48995 - DNA, 3088 bp, Zea Mays
attgcctatccctccattaaagacaagggaggcagccaaaaggtgacggcaccactaaccaagccagcaccagcggaactgtgctgtgcaagcactcagcttcgcctccattccgctcacttcccgcggccactccgctccccaaaccctaacgccctcgagcggagcgatctctttgcttcgccagtgccgcgcccgggcatgccgccgccactgggtggcgcggtcaaggccgactgatccgtgcgcttgggagccgccaccgccgccgccgccgccgctgccattcctccctcggtgcccactggggtggagcggagactggagattctgccgtctgtcgcaagtcacacactaggtttctcgggcgctgacattgttggaagatgtggaggatcaagctcgcctgtttgcttcttatctttgtgcaagtgcaacgagtggtccttggaacacatgacgtgtacatcgtggtgatggaaggggatccggttgtgagctaccgaggtggcgttgacggatttccggcaactgctgtggatttggacgaggaaatggacgttaccagtgaagctgttacatcgtatgccctccacctccgagggcaccatgacaagctcctagactcacatttagtagaaggaacgtatgagaagctttatagctaccaccatcttatcaatggctttgcagttcacatgtcgtcactgcaggctgagttcttgaggaaagcgccaggagttaagcatgttgagagagacatgaaggtacagaaattgactacacacacccctcagtttctcggattgccaactggggtatggccaacaggaggtggacttgatagagctggtgaagatgttgtgatcggttttgtggattctggaatttacccccaacatccgagcttcgcggcgcacaagactgatcgatatggtcctgtccctcgttataaaggaaaatgcgagaaggatctagtaacacaaagaagcttttgtaatgggaagatagttggggctcagcattttgcaaaagctgcaatggctgctgccacacagctgcaattgctgctggaaacaatgggattccggtgcgaatgcatggtcacgagtttggcaaagcaagtggcatggccccacgtgctagggtagctgtctacaaggttctttacaggcttttcggtggttatgtggctgatgttgtggcagctattgatcaggctgttcaggatggtgttgacattctcaacctttctgttggacccaatagcccaccaacagctacaaggactacttttttgaatccttttgacgctgcacttctttctgctgtgaaagctggggtatttgttgcccaagctgcaggaaatggcggaccatttccaaaaacactggtgtctttcagcccatggataaccactgttgctgctggagttgatgaccgcagatacaagaatcatttaacactaggaaatggaaaacttatttctggacttggagtatctcctgcaacacatgggaatatgtcgtttagcctgatttctgcagctgatgctcttctgggctcatctgcaagcaagtacagtgcattagactgtcagaggccagaactattgaataagaggaaagttcagggaaaaattcttttgtgtggctattcattcaattacatttctgggacagcctcaataaagaaagtgtctcagacggccaggagtctcggcgcagctggctttgttgttgctgtggagaatagttacccaggaacaaaatttgaccctgtaccagtcagcatccctggaattctcatcacagatgtcagcaaaaccgaggatcttatagactactacaattcttccaccgtaagagattgggctggaagggctacagcctttaaagcaacagccggtattgcagatggtttggcaccaacactatacaattcagctccccaggttgcgctgttctcttctcgaggacctgatgtgaaagattttagctttcaagatgctgatgtccttaaaccagacatacttgctcctggcaatctcatatgggctgcatgggcgcctaatggaacagatgaatcaaattatgctggtgaaggatttgcaatggtttctggaactagcatggctgcgccgcatattgctggcattgcagcactgataaagcagaagaacccaaagtggagcccctcagcaataaaatctgccctgatgacaacggccaatacactggacaaagggagccatcctcttagagcgcagcagtacaccgcatcagaaatgatgacactttcacgggccacaccgttcgattgtggcagtggcgctgttaacccaaaaggcgccctcgatcctggccttgttctagacgcaagccatgaagactacatcacgtttctgtgctcgatccccgacgtcaaccagagcgaagtatcaaacatagccggctcggcttgcaactccaactccaagggacaacgccccttcgacctcaacatcccctcgatcgccgtctctcagcttcgaggcacggtggtagtgaagcggaccgtcacgagcgtgtccgacgaaaccgagacctacaccatcatgacaaggatgccgccagaggtcgccctggaggtgacgcctccggcggtgaccgtggtccccggagcatcacgagagataactgtgaccctgacggcgaggtccgtgaccggcacctacagtttcggtgagattgccatgaaaggtgaccgcggtcacctcgtcagaatcccagtcgtagctatgggattcaagtaggtagaagacgactgtgacatctcctagggagtagaggataggaagagcgagttgtgcctctgtaatctgaggtcttgagctgcagaggaacgttgtataattttttcataggttgtagagaataagagttggcacaatgctgtaagtgttatgcatgccccctccaggttgtaaaatatatttgggtgccctaaatcctctgacatggtgactagaggacctcttgtattgtagtccagccttgttctgattctctaatgcatgaaggtttgaatctcatctggttttcttcta

SEQ ID NO: 48996 - DNA, 2742 bp, Zea Mays
ccaagccagcaccagcggaactgtgctgtgcaagcactcagcttcgcctccattccgctcacttcccgcggccactccgctccccaaaccctaacgccctcgagcggagcgatctctttgcttcgccagtgccgcgcccgggcatgccgccgccactgggtggcgcggtcaaggccgactgatccgtgcgcttgggagccgccaccgccgccgccgccgccgctgccattcctccctcggtgcccactggggtggagcggagactggagattctgccgtctgtcgcaagtcacacactaggtttctcgggcgctgacattgttggaagatgtggaggatcaagctcgcctgtttgcttcttatctttgtgcaagtgcaacgagtggtccttggaacacatgacgtgtacatcgtggtgatggaaggggatccggttgtgagctaccgaggtggcgttgacggatttccggcaactgctgtggatttggacgaggaaatggacgttaccagtgaagctgttacatcgtatgccctccacctccgagggcaccatgacaagctcctagactcacatttagtagaaggaacgtatgagaagctttatagctaccaccatcttatcaatggctttgcagttcacatgtcgtcactgcaggctgagttcttgaggaaagcgccaggagttaagcatgttgagagagacatgaagccacacagctgcaattgctgctggaaacaatgggattccggtgcgaatgcatggtcacgagtttggcaaagcaagtggcatggccccacgtgctagctgtctacaaggttctttacaggcttttcggtggttatgtggctgatgttgtggcagctattgatcaggctgttcaggatggtgttgacattctcaacctttctgttggacccaatagcccaccaacagctacaaggactacttttttgaatccttttgacgctgcacttctttctgctgtgaaagctggggtatttgttgcccaagctgcaggaaatggcggaccatttccaaaaacactggtgtctttcagcccatggataaccactgttgctgctggagttgatgaccgcagatacaagaatcatttaacactaggaaatggaaaacttatttctggacttggagtatctcctgcaacacatgggaatatgtcgtttagcctgatttctgcagctgatgctcttctgggctcatctgcaagcaagtacagtgcattagactgtcagaggccagaactattgaataagaggaaagttcagggaaaaattcttttgtgtggctattcattcaattacatttctgggacagcctcaataaagaaagtgtctcagacggccaggagtctcggcgcagctggctttgttgttgctgtggagaatagttacccaggaacaaaatttgaccctgtaccagtcagcatccctggaattctcatcacagatgtcagcaaaaccgaggatcttatagactactacaattcttccaccgtaagagattgggctggaagggctacagcctttaaagcaacagccggtattgcagatggtttggcaccaacactatacaattcagctccccaggttgcgctgttctcttctcgaggacctgatgtgaaagattttagctttcaagatgctgatgtccttaaaccagacatacttgctcctggcaatctcatatgggctgcatgggcgcctaatggaacagatgaatcaaattatgctggtgaaggatttgcaatggtttctggaactagcatggctgcgccgcatattgctggcattgcagcactgataaagcagaagaacccaaagtggagcccctcagcaataaaatctgccctgatgacaacggccaatacactggacaaagggagccatcctcttagagcgcagcagtacaccgcatcagaaatgatgacactttcacgggccacaccgttcgattgtggcagtggcgctgttaacccaaaaggcgccctcgatcctggccttgttctagacgcaagccatgaagactacatcacgtttctgtgctcgatccccgacgtcaaccagagcgaagtatcaaacatagccggctcggcttgcaactccaactccaagggacaacgccccttcgacctcaacatcccctcgatcgccgtctctcagcttcgaggcacggtggtagtgaagcggaccgtcacgagcgtgtccgacgaaaccgagacctacaccatcatgacaaggatgccgccagaggtcgccctggaggtgacgcctccggcggtgaccgtggtccccggagcatcacgagagataactgtgaccctgacggcgaggtccgtgaccggcacctacagtttcggtgagattgccatgaaaggtgaccgcggtcacctcgtcagaatcccagtcgtagctatgggattcaagtaggtagaagacgactgtgacatctcctagggagtagaggataggaagagcgagttgtgcctctgtaatctgaggtcttgagctgcagaggaacgttgtataattttttcataggttgtagagaataagagttggcacaatgctgtaagtgttatgcatgccccctccaggttgtaaaatatatttgggtgccctaaatcctctgacatggtgactagaggacctcttgtattgtagtccagccttgttctgattctctaatgcatgaaggtttgaatctcatctggttttcttcta

SEQ ID NO: 48997 - DNA, 2912 bp, Zea Mays
ccaagccagcaccagcggaactgtgctgtgcaagcactcagcttcgcctccattccgctcacttcccgcggccactccgctccccaaaccctaacgccctcgagcggagcgatctctttgcttcgccagtgccgcgcccgggcatgccgccgccactgggtggcgcggtcaaggccgactgatccgtgcgcttgggagccgccaccgccgccgccgccgccgctgccattcctccctcggtgcccactggggtggagcggagactggagattctgccgtctgtcgcaagtcacacactaggtttctcgggcgctgacattgttggaagatgtggaggatcaagctcgcctgtttgcttcttatctttgtgcaagtgcaacgagtggtccttggaacacatgacgtgtacatcgtggtgatggaaggggatccggttgtgagctaccgaggtggcgttgacggatttccggcaactgctgtggatttggacgaggaaatggacgttaccagtgaagctgttacatcgtatgccctccacctccgagggcaccatgacaagctcctagactcacatttagtagaaggaacgtatgagaagctttatagctaccaccatcttatcaatggctttgcagttcacatgtcgtcactgcaggctgagttcttgaggaaagcgccaggagttaagcatgttgagagagacatgaaggtacagaaattgactacacacacccctcagtttctcggattgccaactggggtatggccaacaggaggtggacttgatagagctggtgaagatgttgtgatcggttttgtggattctggaatttacccccaacatccgagcttcgcggcgcacaagactgatcgatatggtcctgtccctcgttataaaggaaaatgcgagaaggatctagtaacacaaagaagcttttgtaatgggaagatagttggggctcagcattttgcaaaagctgcaatggctgctgccacacagctgcaattgctgctggaaacaatgggattccggtgcgaatgcatggtcacgagtttggcaaagcaagtggcatggccccacgtgctagggtagctgtctacaaggttctttacaggcttttcggtggttatgtggctgatgttgtggcagctattgatcagctggggtatttgttgcccaagctgcaggaaatggcggaccatttccaaaaacactggtgtctttcagcccatggataaccactgttgctgctggagttgatgaccgcagatacaagaatcatttaacactaggaaatggaaaacttatttctggacttggagtatctcctgcaacacatgggaatatgtcgtttagcctgatttctgcagctgatgctcttctgggctcatctgcaagcaagtacagtgcattagactgtcagaggccagaactattgaataagaggaaagttcagggaaaaattcttttgtgtggctattcattcaattacatttctgggacagcctcaataaagaaagtgtctcagacggccaggagtctcggcgcagctggctttgttgttgctgtggagaatagttacccaggaacaaaatttgaccctgtaccagtcagcatccctggaattctcatcacagatgtcagcaaaaccgaggatcttatagactactacaattcttccaccgtaagagattgggctggaagggctacagcctttaaagcaacagccggtattgcagatggtttggcaccaacactatacaattcagctccccaggttgcgctgttctcttctcgaggacctgatgtgaaagattttagctttcaagatgctgatgtccttaaaccagacatacttgctcctggcaatctcatatgggctgcatgggcgcctaatggaacagatgaatcaaattatgctggtgaaggatttgcaatggtttctggaactagcatggctgcgccgcatattgctggcattgcagcactgataaagcagaagaacccaaagtggagcccctcagcaataaaatctgccctgatgacaacggccaatacactggacaaagggagccatcctcttagagcgcagcagtacaccgcatcagaaatgatgacactttcacgggccacaccgttcgattgtggcagtggcgctgttaacccaaaaggcgccctcgatcctggccttgttctagacgcaagccatgaagactacatcacgtttctgtgctcgatccccgacgtcaaccagagcgaagtatcaaacatagccggctcggcttgcaactccaactccaagggacaacgccccttcgacctcaacatcccctcgatcgccgtctctcagcttcgaggcacggtggtagtgaagcggaccgtcacgagcgtgtccgacgaaaccgagacctacaccatcatgacaaggatgccgccagaggtcgccctggaggtgacgcctccggcggtgaccgtggtccccggagcatcacgagagataactgtgaccctgacggcgaggtccgtgaccggcacctacagtttcggtgagattgccatgaaaggtgaccgcggtcacctcgtcagaatcccagtcgtagctatgggattcaagtaggtagaagacgactgtgacatctcctagggagtagaggataggaagagcgagttgtgcctctgtaatctgaggtcttgagctgcagaggaacgttgtataattttttcataggttgtagagaataagagttggcacaatgctgtaagtgttatgcatgccccctccaggttgtaaaatatatttgggtgccctaaatcctctgacatggtgactagaggacctcttgtattgtagtccagccttgttctgattctctaatgcatgaaggtttgaatctcatctggttttcttcta

SEQ ID NO: 48998 - DNA, 2853 bp, Zea Mays
ccaagccagcaccagcggaactgtgctgtgcaagcactcagcttcgcctccattccgctcacttcccgcggccactccgctccccaaaccctaacgccctcgagcggagcgatctctttgcttcgccagtgccgcgcccgggcatgccgccgccactgggtggcgcggtcaaggccgactgatccgtgcgcttgggagccgccaccgccgccgccgccgccgctgccattcctccctcggtgcccactggggtggagcggagactggagattctgccgtctgtcgcaagtcacacactaggtttctcgggcgctgacattgttggaagatgtggaggatcaagctcgcctgtttgcttcttatctttgtgcaagtgcaacgagtggtccttggaacacatgacgtgtacatcgtggtgatggaaggggatccggttgtgagctaccgaggtggcgttgacggatttccggcaactgctgtggatttggacgaggaaatggacgttaccagtgaagctgttacatcgtatgccctccacctccgagggcaccatgacaagctcctagactcacatttagtagaaggaacgtatgagaagctttatagctaccaccatcttatcaatggctttgcagttcacatgtcgtcactgcaggctgagttcttgaggaaagcgccaggagttaagcatgttgagagagacatgaaggtacagaaattgactacacacacccctcagtttctcggattgccaactggggtatggccaacaggaggtggacttgatagagctggtgaagatgttgtgatcggttttgtggattctggaatttacccccaacatccgagcttcgcggcgcacaagactgatcgatatggtcctgtccctcgttataaaggaaaatgcgagaaggatctagtaacacaaagaagcttttgtaatgggaagatagttggggctcagcattttgcaaaagctgcaatggctgctgccacacagctgcaattgctgctggaaacaatgggattccggtgcgaatgcatggtcacgagtttggcaaagcaagtggcatggccccacgtgctagggtagctgtctacaaggttctttacaggcttttcggtggttatgtggctgatgttgtggcagctattgatcaggctgttcaggatggtgttgacattctcaacctttctgttggacccaatagcccaccaacagctacaaggactacttttttgaatccttttgacgctgcacttctttctgctgtgaaagctggggtatttgttgcccaagctgcaggaaatggcggaccatttccaaaaacactggtgtctttcagcccatggataaccactgttgctgctggagttgatgaccgcagatacaagaatcatttaacactaggaaatggaaaacttatttctggacttggagtatctccctcaataaagaaagtgtctcagacggccaggagtctcggcgcagctggctttgttgttgctgtggagaatagttacccaggaacaaaatttgaccctgtaccagtcagcatccctggaattctcatcacagatgtcagcaaaaccgaggatcttatagactactacaattcttccaccgtaagagattgggctggaagggctacagcctttaaagcaacagccggtattgcagatggtttggcaccaacactatacaattcagctccccaggttgcgctgttctcttctcgaggacctgatgtgaaagattttagctttcaagatgctgatgtccttaaaccagacatacttgctcctggcaatctcatatgggctgcatgggcgcctaatggaacagatgaatcaaattatgctggtgaaggatttgcaatggtttctggaactagcatggctgcgccgcatattgctggcattgcagcactgataaagcagaagaacccaaagtggagcccctcagcaataaaatctgccctgatgacaacggccaatacactggacaaagggagccatcctcttagagcgcagcagtacaccgcatcagaaatgatgacactttcacgggccacaccgttcgattgtggcagtggcgctgttaacccaaaaggcgccctcgatcctggccttgttctagacgcaagccatgaagactacatcacgtttctgtgctcgatccccgacgtcaaccagagcgaagtatcaaacatagccggctcggcttgcaactccaactccaagggacaacgccccttcgacctcaacatcccctcgatcgccgtctctcagcttcgaggcacggtggtagtgaagcggaccgtcacgagcgtgtccgacgaaaccgagacctacaccatcatgacaaggatgccgccagaggtcgccctggaggtgacgcctccggcggtgaccgtggtccccggagcatcacgagagataactgtgaccctgacggcgaggtccgtgaccggcacctacagtttcggtgagattgccatgaaaggtgaccgcggtcacctcgtcagaatcccagtcgtagctatgggattcaagtaggtagaagacgactgtgacatctcctagggagtagaggataggaagagcgagttgtgcctctgtaatctgaggtcttgagctgcagaggaacgttgtataattttttcataggttgtagagaataagagttggcacaatgctgtaagtgttatgcatgccccctccaggttgtaaaatatatttgggtgccctaaatcctctgacatggtgactagaggacctcttgtattgtagtccagccttgttctgattctctaatgcatgaaggtttgaatctcatctggttttcttcta

SEQ ID NO: 48999 - DNA, 3083 bp, Zea Mays
ccaagccagcaccagcggaactgtgctgtgcaagcactcagcttcgcctccattccgctcacttcccgcggccactccgctccccaaaccctaacgccctcgagcggagcgatctctttgcttcgccagtgccgcgcccgggcatgccgccgccactgggtggcgcggtcaaggccgactgatccgtgcgcttgggagccgccaccgccgccgccgccgccgctgccattcctccctcggtgcccactggggtggagcggagactggagattctgccgtctgtcgcaagtcacacactaggtttctcgggcgctgacattgttggaagatgtggaggatcaagctcgcctgtttgcttcttatctttgtgcaagtgcaacgagtggtccttggaacacatgacgtgtacatcgtggtgatggaaggggatccggttgtgagctaccgaggtggcgttgacggatttccggcaactgctgtggatttggacgaggaaatggacgttaccagtgaagctgttacatcgtatgccctccacctccgagggcaccatgacaagctcctagactcacatttagtagaaggaacgtatgagaagctttatagctaccaccatcttatcaatggctttgcagttcacatgtcgtcactgcaggctgagttcttgaggaaagcgccaggagttaagcatgttgagagagacatgaaggtacagaaattgactacacacacccctcagtttctcggattgccaactggggtatggccaacaggaggtggacttgatagagctggtgaagatgttgtgatcggttttgtggattctggaatttacccccaacatccgagcttcgcggcgcacaagactgatcgatatggtcctgtccctcgttataaaggaaaatgcgagaaggatctagtaacacaaagaagcttttgtaatgggaagatagttggggctcagcattttgcaaaagctgcaatggctgctggtgcgtttaaccccgatgttgaatttgcatctccattagacggtgatggtcatggaagccacacagctgcaattgctgctggaaacaatgggattccggtgcgaatgcatggtcacgagtttggcaaagcaagtggcatggccccacgtgctagctgtctacaaggttctttacaggcttttcggtggttatgtggctgatgttgtggcagctattgatcaggctgttcaggatggtgttgacattctcaacctttctgttggacccaatagcccaccaacagctacaaggactacttttttgaatccttttgacgctgcacttctttctgctgtgaaagctggggtatttgttgcccaagctgcaggaaatggcggaccatttccaaaaacactggtgtctttcagcccatggataaccactgttgctgctggagttgatgaccgcagatacaagaatcatttaacactaggaaatggaaaacttatttctggacttggagtatctcctgcaacacatgggaatatgtcgtttagcctgatttctgcagctgatgctcttctgggctcatctgcaagcaagtacagtgcattagactgtcagaggccagaactattgaataagaggaaagttcagggaaaaattcttttgtgtggctattcattcaattacatttctgggacagcctcaataaagaaagtgtctcagacggccaggagtctcggcgcagctggctttgttgttgctgtggagaatagttacccaggaacaaaatttgaccctgtaccagtcagcatccctggaattctcatcacagatgtcagcaaaaccgaggatcttatagactactacaattcttccaccgtaagagattgggctggaagggctacagcctttaaagcaacagccggtattgcagatggtttggcaccaacactatacaattcagctccccaggttgcgctgttctcttctcgaggacctgatgtgaaagattttagctttcaagatgctgatgtccttaaaccagacatacttgctcctggcaatctcatatgggctgcatgggcgcctaatggaacagatgaatcaaattatgctggtgaaggatttgcaatggtttctggaactagcatggctgcgccgcatattgctggcattgcagcactgataaagcagaagaacccaaagtggagcccctcagcaataaaatctgccctgatgacaacggccaatacactggacaaagggagccatcctcttagagcgcagcagtacaccgcatcagaaatgatgacactttcacgggccacaccgttcgattgtggcagtggcgctgttaacccaaaaggcgccctcgatcctggccttgttctagacgcaagccatgaagactacatcacgtttctgtgctcgatccccgacgtcaaccagagcgaagtatcaaacatagccggctcggcttgcaactccaactccaagggacaacgccccttcgacctcaacatcccctcgatcgccgtctctcagcttcgaggcacggtggtagtgaagcggaccgtcacgagcgtgtccgacgaaaccgagacctacaccatcatgacaaggatgccgccagaggtcgccctggaggtgacgcctccggcggtgaccgtggtccccggagcatcacgagagataactgtgaccctgacggcgaggtccgtgaccggcacctacagtttcggtgagattgccatgaaaggtgaccgcggtcacctcgtcagaatcccagtcgtagctatgggattcaagtaggtagaagacgactgtgacatctcctagggagtagaggataggaagagcgagttgtgcctctgtaatctgaggtcttgagctgcagaggaacgttgtataattttttcataggttgtagagaataagagttggcacaatgctgtaagtgttatgcatgccccctccaggttgtaaaatatatttgggtgccctaaatcctctgacatggtgactagaggacctcttgtattgtagtccagccttgttctgattctctaatgcatgaaggtttgaatctcatctggttttcttcta

SEQ ID NO: 49000 - DNA, 1641 bp, Zea Mays
ctcggtttatcccttccctagaccaccccactcatgtggtggaagcctttgacactagctgcaacacatgggaatatgtcgtttagcctgatttctgcagctgatgctcttctgggctcatctgcaagcaagtacagtgcattagactgtcagaggccagaactattgaataagaggaaagttcagggaaaaattcttttgtgtggctattcattcaattacatttctgggacagcctcaataaagaaagtgtctcagacggccaggagtctcggcgcagctggctttgttgttgctgtggagaatagttacccaggaacaaaatttgaccctgtaccagtcagcatccctggaattctcatcacagatgtcagcaaaaccgaggatcttatagactactacaattcttccaccgtaagagattgggctggaagggctacagcctttaaagcaacagccggtattgcagatggtttggcaccaacactatacaattcagctccccaggttgcgctgttctcttctcgaggacctgatgtgaaagattttagctttcaagatgctgatgtccttaaaccagacatacttgctcctggcaatctcatatgggctgcatgggcgcctaatggaacagatgaatcaaattatgctggtgaaggatttgcaatggtttctggaactagcatggctgcgccgcatattgctggcattgcagcactgataaagcagaagaacccaaagtggagcccctcagcaataaaatctgccctgatgacaacggccaatacactggacaaagggagccatcctcttagagcgcagcagtacaccgcatcagaaatgatgacactttcacgggccacaccgttcgattgtggcagtggcgctgttaacccaaaaggcgccctcgatcctggccttgttctagacgcaagccatgaagactacatcacgtttctgtgctcgatccccgacgtcaaccagagcgaagtatcaaacatagccggctcggcttgcaactccaactccaagggacaacgccccttcgacctcaacatcccctcgatcgccgtctctcagcttcgaggcacggtggtagtgaagcggaccgtcacgagcgtgtccgacgaaaccgagacctacaccatcatgacaaggatgccgccagaggtcgccctggaggtgacgcctccggcggtgaccgtggtccccggagcatcacgagagataactgtgaccctgacggcgaggtccgtgaccggcacctacagtttcggtgagattgccatgaaaggtgaccgcggtcacctcgtcagaatcccagtcgtagctatgggattcaagtaggtagaagacgactgtgacatctcctagggagtagaggataggaagagcgagttgtgcctctgtaatctgaggtcttgagctgcagaggaacgttgtataattttttcataggttgtagagaataagagttggcacaatgctgtaagtgttatgcatgccccctccaggttgtaaaatatatttgggtgccctaaatcctctgacatggtgactagaggacctcttgtattgtagtccagccttgttctgattctctaatgcatgaaggtttgaatctcatctggttttcttcta

SEQ ID NO: 49001 - DNA, 1295 bp, Zea Mays
ctgcttactgcgctactgtaggatgacagggcagaaaggatcttatagactactacaattcttccaccgtaagagattgggctggaagggctacagcctttaaagcaacagccggtattgcagatggtttggcaccaacactatacaattcagctccccaggttgcgctgttctcttctcgaggacctgatgtgaaagattttagctttcaagatgctgatgtccttaaaccagacatacttgctcctggcaatctcatatgggctgcatgggcgcctaatggaacagatgaatcaaattatgctggtgaaggatttgcaatggtttctggaactagcatggctgcgccgcatattgctggcattgcagcactgataaagcagaagaacccaaagtggagcccctcagcaataaaatctgccctgatgacaacggccaatacactggacaaagggagccatcctcttagagcgcagcagtacaccgcatcagaaatgatgacactttcacgggccacaccgttcgattgtggcagtggcgctgttaacccaaaaggcgccctcgatcctggccttgttctagacgcaagccatgaagactacatcacgtttctgtgctcgatccccgacgtcaaccagagcgaagtatcaaacatagccggctcggcttgcaactccaactccaagggacaacgccccttcgacctcaacatcccctcgatcgccgtctctcagcttcgaggcacggtggtagtgaagcggaccgtcacgagcgtgtccgacgaaaccgagacctacaccatcatgacaaggatgccgccagaggtcgccctggaggtgacgcctccggcggtgaccgtggtccccggagcatcacgagagataactgtgaccctgacggcgaggtccgtgaccggcacctacagtttcggtgagattgccatgaaaggtgaccgcggtcacctcgtcagaatcccagtcgtagctatgggattcaagtaggtagaagacgactgtgacatctcctagggagtagaggataggaagagcgagttgtgcctctgtaatctgaggtcttgagctgcagaggaacgttgtataattttttcataggttgtagagaataagagttggcacaatgctgtaagtgttatgcatgccccctccaggttgtaaaatatatttgggtgccctaaatcctctgacatggtgactagaggacctcttgtattgtagtccagccttgttctgattctctaatgcatgaaggtttgaatctcatctggttttcttcta

SEQ ID NO: 49002 - DNA, 1623 bp, Zea Mays
cccatcgcgaggcgaactccttgggcctccccattcccagaaaaaaaaaatgatggtgacccgttcgcgtcggctcgccccgccaccatgacccataagcgccacgccgccaccggcttgcgcacgggcggcaccatactgcacgcgctctccgccgcctcggccgcccacctgcacgcgcacgccctgaaggtcggcgtcctcttcacctgcctccacctctgctcgggcttgctcaaaacctacgcgtcctccggccgcatcgccgccgcgcggcagctgttcgacgaagcgcctcgccggaacgtcccgctatggaacacgctggtgtccgcctacgcgcgctgcggccacccgcgcagcgcgctggccgccgcgtccgccatggcgcgcggcggcggcggcggcgcgggggcccggccgaacgtcgtcacggtggcgatcctgatgtcggcgtgcgcgaagctgaggaggccggcgcccgggcgggaggtccacgggtacgcggcccggaacgtggccgcgctcgacctccacgcgctcaacgcgctggtgcacatgtacggcaggtgcgggcggctcagggacgcgaggacggcgttcgccggcatcggggccggcgcgaggaacgccgtgtcgtggacggccatgatcgacgcgtgccgcgagaacgggcgccccgcggaggcgctgggggtgttcgaggagatgcgtcggctcgctggcgccgaggtcgacgaggccgccctgctcgccgccgtgtcggcgtgcgcgagcctggactgcgcggcggggctaggggactgggtggaggcgtgcgcggcggagagcgggttcctgcggcgggggacgacgagcgcccgcgtcgccaacgcgctcatacacatgcacggcaaggcggggcaggtggagaggtcgtgcgcgatattcgactcgatgggcgccgcgaggaggacggtggtctcgtggacggccatggtccaggccctggccacgaacgggcacgcggtggccgcgctcgtccggttcgcgcagatgctcagggaagggttcgtgcccgacgaggtggccttcctgagcgcgatcggcgcctgcgcctgcgcggggctggtgagcgaggggcgccggctgttcgagtccatggtggaggagcaccgcatcgcgccgcagatggagcactacggcagcatggtggagctgctgtgcagggccgggtcgttggccgacgcgttcgagttcgtcctggccatgcccgtcgcgcccgaccctgtgatctggcgtgccctggccggcgcctgccgggaccatggggacgccggcttggccaggagggtgatggatcatgtgatcgcgatggagccccaccatgcagggaactacctgctggcgtccaacttgtgcgcggcggatgaggactggggacgtgtcgtggatgttaggctggagatgggagccaggaaagcgacgatctcgaggactgctagtggtgccgtgtcttcagttcaagtcaacgcctgcgcggggtggaaggatggcgctgctgtcaacaaaagcgggtcccctttgccccactgcgaggtggagctggaaaagtgaaggcagcggaggactggccgctggcgt

SEQ ID NO: 49003 - DNA, 1216 bp, Zea Mays
gctctgctcagtcaaaatcctacatcatttttttctccagcaaacctatatagtaactagactactagatcaaacaccctgcaccggcgatcttagtctacatttacgccggcgagtcacactcacctcacagttgcttgttcatatgtgcacacccttctcccacggtggaatttccaccctactacagtactactactactctaccacgatctcgggcagcttcagcatgctgtggccgcagcagctgctcctgctcgccgccgccgtcctggggcacttcacgtagctccggcagcacgggccggtctccctagcacgcgcggcctgcacgctcgagcaggcgtctccacctttgacgccgcagcagttcttgctcgcagcgcagtcggtgggagcagcgccgccgccgccgccgcagtctttcgccttcctgcagtgctccccattgtgttgttcctcgctgtggtggtggccttcgtctttgggcagggcagcgattgagatcgtgacctcttcaactggctcggccgcgaccttgtccttgccgtgaggctcatggcagcagtggtggctgtggtcgtggcagtccttctcaggttcctcgatctccccaagctcatgctgtccgtgctcatggtcgtggtcatggcagtggtgtgtttccacagcgtgcacagtttggtgctcaccatggcactcatgctcgcaagcatgctcaacagcggtgtctgaatggccgtgctcctcgcagtggctgtgcgcatcatgttcatggcagccatgctcacctgtagcgtgtgagtggctgtccccttcgcagtgccgatgttcgtgtccatggccatggccatggcaagcagcctcactgtcagcacacggagtcttgggctctttgcagtggctatgctcatggtcatggcactcgtgcttgctggtgaagcgcgggctgctgagctctttgcagcggtcatggctatgcccatggccatggtcattgcaaccgtggctctctacaagcagcagctggttgcctgcctcttcgcagtggctatgggtgttgccgtggtcatggcagacatgcttttctgtaaccacatggctgctgggctctttgcagtggttatggctgtggccgtgatcatgacaggcatgcctttccggccggtggttgctcggctctttgcagtgggtgtgggcatggccatgatcactg

SEQ ID NO: 49004 - DNA, 3042 bp, Zea Mays
aatcaccacgtgtgctgggaccaagtctcacacatatgatgaatcatggcacaggatcgaatgtcacatctttactatataacaggagttctatacaaaataaataattacattataaggagacaacggtccagcaacccaaagttgactgggagacgatggcctagacctctcacgaactcgtcacagcatcctccatgcgcctcatcctgtggtacctgttcttgacctgtgggggggtgtgagacagcaagagtgagctcacatacgttcatagatcaacaagttgtggggaataatgtgcatgaactcgccaaaggcgggagctctcatgaagtgtaagacttaccaaagaggatggttagagctgagcattgcttttaaagttggtcaaaattttattagcagttactaagtataagtaaataccaacccagttaaatagtagaacaaaagtaacaacatcacctgcgatgcaatgcatatgacaaattgaatttagttccataatttaatcatgtgagtgttcgagctgctcatgaccgtgagcacggctagtataccagttttatactctgtagaggttgcgcatctttacccacaagtcatgttacccatctgccaagagacggccaatcccatacacctctaccgaggaggcgaggcagggtaacactacgaggcctttacaaagttccactagcttcagaaaacccgctacagtttataggaagctccaatgcaggaatccctcgcatgaccaccatcgcagcaaaatcatcccaagggcctccctacacttaccactcccctactgcccttgcccctttcgggtaaggtagtcatccactagctttcctaattaatcagccaagggcgtcccattaaacccttgtggtagcactgttttcccgggtggttctccatgttccaattaacataatgatcttatcatgaacagtaaataacaacttataacaaaagtgtaatcatgaataatgtatctccatacctagaaccacatatagcactagcaagtactacccagaaagttcagtggtaaacaaggtataaagatagacaaactagggtatcctattgggtcccatcaaaattaacctatgcagatcattatgattaattagaacatgagtgggtaaaaagaagtgatcaagggcacaacttgcctgggacttgagattccaggtaccaggatgattcttcagatcctcgtgacctcactgctaatcgtagcaatacaaacaaacatggtataggcaaaataaacatcacaccaaacataagaacaaactacgtaataatactctacgcgtctctacgagatcgtgggatgagaaccgctaaattcggggttacggttgtgaagttatggttttccgaagatccatgtggttaagtatagaatagactaagtgcaacattttaacctatatttcatgacaaaacaaagttaccagatgataataaatattattatgagactaatgcaactagaatggatcaaaacggagttacagttattgagttatgaatttccaaagttaataagtacttggcacgaaataaattaagtaaacaattttaatctatgtttcatgtctaaatagagtcactaggtgataaacaatattaaaacaaaattaatacaacttgaatgaatcaaaaaggagttaaaataaattttctatgaattaaacaagatcctagaattatttttatactaaaaaatcattttctttattagttttaccaattatattaacctttggaccgcggccactaataccagagagcgcagggtgtttcttataaaatttggggctaaaccgcgagactcttcctatagccccagacggcgggttaattgtggcaaagagcaggggcacttttgtaagacttcccggtcgaaggggtatcccgcactcagagccgcccgatccagatccggcggcccagattagatcgtgctttaaatgaaacggtatgcaatacgagcccttggatccgagatcagcggtcgtggtttaatgaaacgagatcgaatctgggtcacgggatcctgattgaacgacccaagatgatcccaccgaaggggtctactacttctaatctaacccgttcgtccaagatccttcggtagacacccccccaatcccagctgctcagtgcacatccaacgatagagccacgccctccccaaccagagccgagacgcggcggcggcgttctgtccctctagcggagaagtgcctccacggcggagctgtcgccggagaaggcgatgttgcgcccccgtaacccaaacctcgacaaaaacatgttatgcaaaagaggagttcacaaggaacagaatgaagggctccctacccaaagccgatgcatggagatccatggccgcggaagtagcagcgggcggcggaggaaacaatccgatgaaaaatatccaggctccggtggatttccccgcgtccgagaaggccacgagcatgcctctgggtcccggcgcggcacccagaagcttctaccagagcaggacgcggcccgcgacagcgctaatggcgttgatgaagaatcccttttactctagtgtcccagattgcctccgtgaagcccggtgatgcttaacggtgacgcgtcaacggccgagcgatggcgtgtcgtcgtaaagcctagtgtgtcgagcttggattctctgctcttccacactcgtcttccttgtttctctgtccgagcattggggatgtcgacgaagacgctggcccatgatgaccagtggattcatggcgccgaagggaccttggtgagcaatccacccgcccgagatgatcctctagactggactaagccatgtgcacatccgccatgtttgggcgagtcaccacggctgcttcacagaggctcgtcgacaaccaaggcgcgggtcgacgccggctacttcactctctgccttcttttgcttggcggtagggctctcggtgcttgttagtgggttggacgaagagggggaggcgagctcggtac

SEQ ID NO: 49005 - DNA, 1352 bp, Zea Mays
gtttgtcgttttctctagtgccgccgagacgctttccttccacctgccgaccgacgcacgcggacgcctccgttcgtactcccgccgcctgtagaggcctcgtcctctcgcccaccggcgaaaaaccgttcccctctgccgtttccgggtgagtctacgcggcgcaacttctccggtcccatcggttttgggtgcgcgaccctccttcggcttctcatcgtcgttcttcggtctcttagtgcaagcaaggaggccgttccacgctcctccagcgagctccgttctgaagcggcaagaaagatgattaatcttttcaaaataaagggtcaaaagaaagatgaggcagcaagtgctactggaaaggcccctgttaagaaacagtctgctggggagctccgtcttcataaagatattagtgagctcaacctgccgaagaccacatcaatttcttttcccaatggcaaggatgatctgatgaattttgagatcaccatccgacctgatgaaggatattacatgggaggcgctttcgttttcacctttcaagtgtccccatcttatcctcatgatcctccgaaggtcaaatgcaagaccaaggtgtaccatccaaatattgatttggaaggcaatgtctgtctgaacattctgcgtgaagattggaagcctgttctcaacatcaacaccgttatttatggcctgaatcttctttttacgcaaccaaacgacgaggatcctttgaaccacgaagctgcagctgtcctccgtggcaacccaaagatgtttgaggcaaatgtgaaaagagccatgaccggaggctacgtaggccaacactatttccaaagatgcttggcttgatgtgatggcttcaagccagcgggcccatgtatcagcaccagcgcgcccaggtttggaggatttttgtggatttagggcgcttctggaagcaaaggtcaaatcggtcgttgttgataatgtgatgtactccctcagttctttttatttttcatgttttagtataaaaatgaactaacaaacgacaaatattcgataacgaggtagtatctgtttgccctgtgacgtgtttaaaaccggtgaatttggggatatggtggtgtcacaagggaaaatgcttctccaattatatcactcgataaatactaaacgagaaatgggaactggattgtaaagaagatcgcttcttttccagaaaaaacaaaattgaggtggtatctttgattttgtactcggctgtcttcaatgtccgatcttccaggtaaacaccctctatttcaaacgtttcgattttttgtaagtttttagtctgatgtgcatttattttaaattataaggta

SEQ ID NO: 49006 - DNA, 1092 bp, Zea Mays
cctaaatgtacctctgcaaccttttccataaggaagaaagatgattaatcttttcaaaataaagggtcaaaagaaagatgaggcagcaagtgctactggaaaggcccctgttaagaaacagtctgctggggagctccgtcttcataaagatattagtgagctcaacctgccgaagaccacatcaatttcttttcccaatggcaaggatgatctgatgaattttgagatcaccatccgacctgatgaaggatattacatgggaggcgctttcgttttcacctttcaagtgtccccatcttatcctcatgatcctccgaaggtcaaatgcaagaccaaggtgtaccatccaaatattgatttggaaggcaatgtctgtctgaacattctgcgtgaagattggaagcctgttctcaacatcaacaccgttatttatggcctgaatcttctttttacgcaaccaaacgacgaggatcctttgaaccacgaagctgcagctgtcctccgtggcaacccaaagatgtttgaggcaaatgtgaaaagagccatgaccggaggctacgtaggccaacactatttccaaagatgcttggcttgatgtgatggcttcaagccagcgggcccatgtatcagcaccagcgcgcccaggtttggaggatttttgtggatttagggcgcttctggaagcaaaggtcaaatcggtcgttgttgataatgtgatgtactccctcagttctttttatttttcatgttttagtataaaaatgaactaacaaacgacaaatattcgataacgaggtagtatctgtttgccctgtgacgtgtttaaaaccggtgaatttggggatatggtggtgtcacaagggaaaatgcttctccaattatatcactcgataaatactaaacgagaaatgggaactggattgtaaagaagatcgcttcttttccagaaaaaacaaaattgaggtggtatctttgattttgtactcggctgtcttcaatgtccgatcttccaggtaaacaccctctatttcaaacgtttcgattttttgtaagtttttagtctgatgtgcatttattttaaattataaggta

SEQ ID NO: 49007 - DNA, 1043 bp, Zea Mays
gcagcctcctcccatttacaacatgtctgaaggttccgacaccaatgccatgatattttttgtatgctggtggctgcttcaggcatattcacatctgaagatattagtgagctcaacctgccgaagaccacatcaatttcttttcccaatggcaaggatgatctgatgaattttgagatcaccatccgacctgatgaaggatattacatgggaggcgctttcgttttcacctttcaagtgtccccatcttatcctcatgatcctccgaaggtcaaatgcaagaccaaggtgtaccatccaaatattgatttggaaggcaatgtctgtctgaacattctgcgtgaagattggaagcctgttctcaacatcaacaccgttatttatggcctgaatcttctttttacgcaaccaaacgacgaggatcctttgaaccacgaagctgcagctgtcctccgtggcaacccaaagatgtttgaggcaaatgtgaaaagagccatgaccggaggctacgtaggccaacactatttccaaagatgcttggcttgatgtgatggcttcaagccagcgggcccatgtatcagcaccagcgcgcccaggtttggaggatttttgtggatttagggcgcttctggaagcaaaggtcaaatcggtcgttgttgataatgtgatgtactccctcagttctttttatttttcatgttttagtataaaaatgaactaacaaacgacaaatattcgataacgaggtagtatctgtttgccctgtgacgtgtttaaaaccggtgaatttggggatatggtggtgtcacaagggaaaatgcttctccaattatatcactcgataaatactaaacgagaaatgggaactggattgtaaagaagatcgcttcttttccagaaaaaacaaaattgaggtggtatctttgattttgtactcggctgtcttcaatgtccgatcttccaggtaaacaccctctatttcaaacgtttcgattttttgtaagtttttagtctgatgtgcatttattttaaattataaggta

SEQ ID NO: 49008 - DNA, 967 bp, Zea Mays
gaaattatggtagcattgttagagatattagtgagctcaacctgccgaagaccacatcaatttcttttcccaatggcaaggatgatctgatgaattttgagatcaccatccgacctgatgaaggatattacatgggaggcgctttcgttttcacctttcaagtgtccccatcttatcctcatgatcctccgaaggtcaaatgcaagaccaaggtgtaccatccaaatattgatttggaaggcaatgtctgtctgaacattctgcgtgaagattggaagcctgttctcaacatcaacaccgttatttatggcctgaatcttctttttacgcaaccaaacgacgaggatcctttgaaccacgaagctgcagctgtcctccgtggcaacccaaagatgtttgaggcaaatgtgaaaagagccatgaccggaggctacgtaggccaacactatttccaaagatgcttggcttgatgtgatggcttcaagccagcgggcccatgtatcagcaccagcgcgcccaggtttggaggatttttgtggatttagggcgcttctggaagcaaaggtcaaatcggtcgttgttgataatgtgatgtactccctcagttctttttatttttcatgttttagtataaaaatgaactaacaaacgacaaatattcgataacgaggtagtatctgtttgccctgtgacgtgtttaaaaccggtgaatttggggatatggtggtgtcacaagggaaaatgcttctccaattatatcactcgataaatactaaacgagaaatgggaactggattgtaaagaagatcgcttcttttccagaaaaaacaaaattgaggtggtatctttgattttgtactcggctgtcttcaatgtccgatcttccaggtaaacaccctctatttcaaacgtttcgattttttgtaagtttttagtctgatgtgcatttattttaaattataaggta

SEQ ID NO: 49009 - DNA, 2180 bp, Zea Mays
cacatcacaaaatttcccctcgctcctagcactcgagcactcaactgtcgcaccatcgggacgccgcggcggcggccagcacgttcgaggctgcggcggcaaggtgggctgtcgtgcgaggtcagcgaggacaggtcgtctgggagcacctgaggctgtgcgaggtgccggcaggctatgacatttctagagtaagtaatactctgggggcatctcccgctcgcttagctgtgcccgccaggccatggagcgtgaggacgccgacggcgctctcgattcgtgggctcaattctgcactctttccaacgagcttctcgccggagacggtgatctcgccgtcggcccacgcctagctcccgtcgttggtgacctctgcacacgcggcctcgccacgctcgtccgcgactacttcctccactccctcgaggaaacatttcgaaaccatgcagtcaagaagttctggcagcactttcatccttattgcagtgcctcaaccgtagacagaattaagttctgtgttaaggaacattggcctgaagaaatcttaagtaaagcactggaggacatatgcttggaaaggggttaccaggaaaaatgtgttcttgttcttgtccaagttttacaatcatatgaggataggatgccacgaaaaaaaatcaaagaagtggtctgtagttccagcttaatgcctaggtatcagttaatggtatcatcagtacttctgacaacactgcccttgagctttcctgacatattgaatatctatttcaagaagaagctggaagaacttaatagtattatggctggatcttatgagagtgatcaacttgtggatcatgaaccttttcaaaggagtaatacatctgactggcattctggaatggacattgatggttctgaagtttcagaaaatagctccttggtaaagaacattggcaaagttgttcgtgatcttagatgtattggttttacatcgatgactgaagatgcttattcctctgcaataatctggcttttaaagtctaaggtttatgaactagctggtgatgattatagagtgtcagtcctttggtgtgtgaagaagtggattcaggctgttcctcttcagtttctgcatgctcttttaacatatctcggtgactctgtggaccatggcagtggatcttctggtctcaaatcaccattagcttcacgcccttcttccttcccagggattggtgttccttctgaagcccttgtgagatggcacatgcgccttgaatattttgcttatgaaaccttgcaggacctacgaattggcaaactttttgaaataattgtagattaccctgagagctctcccgctattgaagacctaaagctgtgtttagagtacacgggccaacactctaagcttgttgactcatttatctcatcgcttcgatatcgtctacttactgctggtgcatcaacaaatgatatattgcaccaatatgtgtccactataaaggcattgcggacaattgaccccaccggggtgttcttggaagcagttggtgaaccaattagggattatctgagaggtagaaaagacactatcaaatgcatagtgacaatgctaactgatgggtcaggaggaagtggaagtggaacaggcaatgcaggtgacaatcttctggaagagttgaacagagatgctgaaaaccaggaaaatgctgattacgacgatcatgcaaacattgatgagaaacaagcatggctcaattctgaaagctgggaacccgatcctgtagaagcagacccattgaaaggcaacaggaacagaaggaaggtcgatatacttggactaatggttagtataattggctcaaaggaccaactagtcaatgaataccgtgtaatgctggcagaaaagctgctcaacaaatctgactttgaaattgattcagacattcgcacattggaactcctgaagattcattttggtgagagcagcatgcagaagtgtgagattatgcttaatgacttgattgactcgaagagaaccaattcgaacattaaaacatctttgctgaagtcatctcaaactgttcctgggcaagaggaggcagaagtgtctcatgatgttttggatgccactataatatcatctaatttttggccaccaattcaggggtggcacgagcggatcctgtccttgc

SEQ ID NO: 49010 - DNA, 3114 bp, Zea Mays
cacatcacaaaatttcccctcgctcctagcactcgagcactcaactgtcgcaccatcgggacgccgcggcggcggccagcacgttcgaggctgcggcggcaaggtgggctgtcgtgcgaggtcagcgaggacaggtcgtctgggagcacctgaggctgtgcgaggtgccggcaggctatgacatttctagagtaagtaatactctgggggcatctcccgctcgcttagctgtgcccgccaggccatggagcgtgaggacgccgacggcgctctcgattcgtgggctcaattctgcactctttccaacgagcttctcgccggagacggtgatctcgccgtcggcccacgcctagctcccgtcgttggtgacctctgcacacgcggcctcgccacgctcgtccgcgactacttcctccactccctcgagatttgggcggtggatcgatgatagtttcatggtgtgaaggaaacatttcgaaaccatgcagtcaagaagttctggcagcactttcatccttattgcagtgcctcaaccgtagacagaattaagttctgtgttaaggaacattggcctgaagaaatcttaagtaaagcactggaggacatatgcttggaaaggggttaccaggaaaaatgtgttcttgttcttgtccaagttttacaatcatatgaggataggatgccacgaaaaaaaatcaaagaagtggtctgtagttccagcttaatgcctaggtatcagttaatggtatcatcagtacttctgacaacactgcccttgagctttcctgacatattgaatatctatttcaagaagaagctggaagaacttaatagtattatggctggatcttatgagagtgatcaacttgtggatcatgaaccttttcaaaggagtaatacatctgactggcattctggaatggacattgatggttctgaagtttcagaaaatagctccttggtaaagaacattggcaaagttgttcgtgatcttagatgtattggttttacatcgatgactgaagatgcttattcctctgcaataatctggcttttaaagtctaaggtttatgaactagctggtgatgattatagagtgtcagtcctttggtgtgtgaagaagtggattcaggctgttcctcttcagtttctgcatgctcttttaacatatctcggtgactctgtggaccatggcagtggatcttctggtctcaaatcaccattagcttcacgcccttcttccttcccagggattggtgttccttctgaagcccttgtgagatggcacatgcgccttgaatattttgcttatgaaaccttgcaggacctacgaattggcaaactttttgaaataattgtagattaccctgagagctctcccgctattgaagacctaaagctgtgtttagagtacacgggccaacactctaagcttgttgactcatttatctcatcgcttcgatatcgtctacttactgctggtgcatcaacaaatgatatattgcaccaatatgtgtccactataaaggcattgcggacaattgaccccaccggggtgttcttggaagcagttggtgaaccaattagggattatctgagaggtagaaaagacactatcaaatgcatagtgacaatgctaactgatgggtcaggaggaagtggaagtggaacaggcaatgcaggtgacaatcttctggaagagttgaacagagatgctgaaaaccaggaaaatgctgattacgacgatcatgcaaacattgatgagaaacaagcatggctcaattctgaaagctgggaacccgatcctgtagaagcagacccattgaaaggcaacaggaacagaaggaaggtcgatatacttggactaatggttagtataattggctcaaaggaccaactagtcaatgaataccgtgtaatgctggcagaaaagctgctcaacaaatctgactttgaaattgattcagacattcgcacattggaactcctgaagattcattttggtgagagcagcatgcagaagtgtgagattatgcttaatgacttgattgactcgaagagaaccaattcgaacattaaaacatctttgctgaagtcatctcaaactgttcctgggcaagaggaggcagaagtgtctcatgatgttttggatgccactataatatcatctaatttttggccaccaattcagatagaagaccttgttgttcctgcttcagttgatcagttgctatcggattacgcaaaacgatttcaccagataaaaactccacgaaagctattatggaagaaaaatcttggaacagttaagttagaactgcaatttgacggaagaagcgtgcaatttactgtagctcctgtgcatgctgcaatcataatgcggtttcaagagaaatctagggggtcctgactgaatcagcaggaccagatgccgatgatcgcaccttcactgttgtcgatagcatgtctgatgtcaacaaggacagtattgtgaatgaacgcatggcagagtatcagatgactgaggaggaaggtgaaagctctgtggcttcagtggaggaacagcttaagaaagaaatgacagtctacgagaaatacatcgtcggaatgctaacaaattttgggagtatgtcgctggacaggatacataacactctaaagatgttttgtattgccgagccatcgtatgacaagtcgctgcagcagctgcaaagttttctttctggtctagtagcagatgaaaagctagaaacgagggatgggctgtacttgctaaagaggtagcagccgtttctatactaggatagtgggttgttagactagggttgtacacttgtactatttgctaatgagttgtttagactagagatgtcaggtaatcagatataacacacttcattatcaaagctatgttatcgggttcagaggcagcttacatatcctatctcacatcctcctttattttaaacttcattatgtaaacaatgactatgaaggtgttactatggaggtatttgagatggctctaggttctagatccagtatggagctgtagtttatgtcagtttatttaaatagttttaaagtatttataatctaaataataaataaaat

SEQ ID NO: 49011 - DNA, 3196 bp, Zea Mays
cacatcacaaaatttcccctcgctcctagcactcgagcactcaactgtcgcaccatcgggacgccgcggcggcggccagcacgttcgaggctgcggcggcaaggtgggctgtcgtgcgaggtcagcgaggacaggtcgtctgggagcacctgaggctgtgcgaggtgccggcaggctatgacatttctagagtaagtaatactctgggggcatctcccgctcgcttagctgtgcccgccaggccatggagcgtgaggacgccgacggcgctctcgattcgtgggctcaattctgcactctttccaacgagcttctcgccggagacggtgatctcgccgtcggcccacgcctagctcccgtcgttggtgacctctgcacacgcggcctcgccacgctcgtccgcgactacttcctccactccctcgagatttgggcggtggatcgatgatagtttcatggtgtgaaggaaacatttcgaaaccatgcagtcaagaagttctggcagcactttcatccttattgcagtgcctcaaccgtagacagaattaagttctgtgttaaggaacattggcctgaagaaatcttaagtaaagcactggaggacatatgcttggaaaggggttaccaggaaaaatgtgttcttgttcttgtccaagttttacaatcatatgaggataggatgccacgaaaaaaaatcaaagaagtggtctgtagttccagcttaatgcctaggtatcagttaatggtatcatcagtacttctgacaacactgcccttgagctttcctgacatattgaatatctatttcaagaagaagctggaagaacttaatagtattatggctggatcttatgagagtgatcaacttgtggatcatgaaccttttcaaaggagtaatacatctgactggcattctggaatggacattgatggttctgaagtttcagaaaatagctccttggtaaagaacattggcaaagttgttcgtgatcttagatgtattggttttacatcgatgactgaagatgcttattcctctgcaataatctggcttttaaagtctaaggtttatgaactagctggtgatgattatagagtgtcagtcctttggtgtgtgaagaagtggattcaggctgttcctcttcagtttctgcatgctcttttaacatatctcggtgactctgtggaccatggcagtggatcttctggtctcaaatcaccattagcttcacgcccttcttccttcccagggattggtgttccttctgaagcccttgtgagatggcacatgcgccttgaatattttgcttatgaaaccttgcaggacctacgaattggcaaactttttgaaataattgtagattaccctgagagctctcccgctattgaagacctaaagctgtgtttagagtacacgggccaacactctaagcttgttgactcatttatctcatcgcttcgatatcgtctacttactgctggtgcatcaacaaatgatatattgcaccaatatgtgtccactataaaggcattgcggacaattgaccccaccggggtgttcttggaagcagttggtgaaccaattagggattatctgagaggtagaaaagacactatcaaatgcatagtgacaatgctaactgatgggtcaggaggaagtggaagtggaacaggcaatgcaggtgacaatcttctggaagagttgaacagagatgctgaaaaccaggaaaatgctgattacgacgatcatgcaaacattgatgagaaacaagcatggctcaattctgaaagctgggaacccgatcctgtagaagcagacccattgaaaggcaacaggaacagaaggaaggtcgatatacttggactaatggttagtataattggctcaaaggaccaactagtcaatgaataccgtgtaatgctggcagaaaagctgctcaacaaatctgactttgaaattgattcagacattcgcacattggaactcctgaagattcattttggtgagagcagcatgcagaagtgtgagattatgcttaatgacttgattgactcgaagagaaccaattcgaacattaaaacatctttgctgaagtcatctcaaactgttcctgggcaagaggaggcagaagtgtctcatgatgttttggatgccactataatatcatctaatttttggccaccaattcagatagaagaccttgttgttcctgcttcagttgatcagttgctatcggattacgcaaaacgatttcaccagataaaaactccacgaaagctattatggaagaaaaatcttggaacagttaagttagaactgcaatttgacggaagaagcgtgcaatttactgtagctcctgtgcatgctgcaatcataatgcggtttcaagagaaatctagttggacttcaaaggcacttgctacagaaattggcatacctatggattctcttaacagaagaataagtttctggacaagcaagggggtcctgactgaatcagcaggaccagatgccgatgatcgcaccttcactgttgtcgatagcatgtctgatgtcaacaaggacagtattgtgaatgaacgcatggcagagtatcagatgactgaggaggaaggtgaaagctctgtggcttcagtggaggaacagcttaagaaagaaatgacagtctacgagaaatacatcgtcggaatgctaacaaattttgggagtatgtcgctggacaggatacataacactctaaagatgttttgtattgccgagccatcgtatgacaagtcgctgcagcagctgcaaagttttctttctggtctagtagcagatgaaaagctagaaacgagggatgggctgtacttgctaaagaggtagcagccgtttctatactaggatagtgggttgttagactagggttgtacacttgtactatttgctaatgagttgtttagactagagatgtcaggtaatcagatataacacacttcattatcaaagctatgttatcgggttcagaggcagcttacatatcctatctcacatcctcctttattttaaacttcattatgtaaacaatgactatgaaggtgttactatggaggtatttgagatggctctaggttctagatccagtatggagctgtagtttatgtcagtttatttaaatagttttaaagtatttataatctaaataataaataaaat

SEQ ID NO: 49012 - DNA, 2802 bp, Zea Mays
cacatcacaaaatttcccctcgctcctagcactcgagcactcaactgtcgcaccatcgggacgccgcggcggcggccagcacgttcgaggctgcggcggcaaggtgggctgtcgtgcgaggtcagcgaggacaggtcgtctgggagcacctgaggctgtgcgaggtgccggcaggctatgacatttctagagtaagtaatactctgggggcatctcccgctcgcttagctgtgcccgccaggccatggagcgtgaggacgccgacggcgctctcgattcgtgggctcaattctgcactctttccaacgagcttctcgccggagacggtgatctcgccgtcggcccacgcctagctcccgtcgttggtgacctctgcacacgcggcctcgccacgctcgtccgcgactacttcctccactccctcgaggaaacatttcgaaaccatgcagtcaagaagttctggcagcactttcatccttattgcagtgcctcaaccgtagacagaattaagttctgtacatattgaatatctatttcaagaagaagctggaagaacttaatagtattatggctggatcttatgagagtgatcaacttgtggatcatgaaccttttcaaaggagtaatacatctgactggcattctggaatggacattgatggttctgaagtttcagaaaatagctccttggtaaagaacattggcaaagttgttcgtgatcttagatgtattggttttacatcgatgactgaagatgcttattcctctgcaataatctggcttttaaagtctaaggtttatgaactagctggtgatgattatagagtgtcagtcctttggtgtgtgaagaagtggattcaggctgttcctcttcagtttctgcatgctcttttaacatatctcggtgactctgtggaccatggcagtggatcttctggtctcaaatcaccattagcttcacgcccttcttccttcccagggattggtgttccttctgaagcccttgtgagatggcacatgcgccttgaatattttgcttatgaaaccttgcaggacctacgaattggcaaactttttgaaataattgtagattaccctgagagctctcccgctattgaagacctaaagctgtgtttagagtacacgggccaacactctaagcttgttgactcatttatctcatcgcttcgatatcgtctacttactgctggtgcatcaacaaatgatatattgcaccaatatgtgtccactataaaggcattgcggacaattgaccccaccggggtgttcttggaagcagttggtgaaccaattagggattatctgagaggtagaaaagacactatcaaatgcatagtgacaatgctaactgatgggtcaggaggaagtggaagtggaacaggcaatgcaggtgacaatcttctggaagagttgaacagagatgctgaaaaccaggaaaatgctgattacgacgatcatgcaaacattgatgagaaacaagcatggctcaattctgaaagctgggaacccgatcctgtagaagcagacccattgaaaggcaacaggaacagaaggaaggtcgatatacttggactaatgattcattttggtgagagcagcatgcagaagtgtgagattatgcttaatgacttgattgactcgaagagaaccaattcgaacattaaaacatctttgctgaagtcatctcaaactgttcctgggcaagaggaggcagaagtgtctcatgatgttttggatgccactataatatcatctaatttttggccaccaattcagatagaagaccttgttgttcctgcttcagttgatcagttgctatcggattacgcaaaacgatttcaccagataaaaactccacgaaagctattatggaagaaaaatcttggaacagttaagttagaactgcaatttgacggaagaagcgtgcaatttactgtagctcctgtgcatgctgcaatcataatgcggtttcaagagaaatctagttggacttcaaaggcacttgctacagaaattggcatacctatggattctcttaacagaagaataagtttctggacaagcaagggggtcctgactgaatcagcaggaccagatgccgatgatcgcaccttcactgttgtcgatagcatgtctgatgtcaacaaggacagtattgtgaatgaacgcatggcagagtatcagatgactgaggaggaaggtgaaagctctgtggcttcagtggaggaacagcttaagaaagaaatgacagtctacgagaaatacatcgtcggaatgctaacaaattttgggagtatgtcgctggacaggatacataacactctaaagatgttttgtattgccgagccatcgtatgacaagtcgctgcagcagctgcaaagttttctttctggtctagtagcagatgaaaagctagaaacgagggatgggctgtacttgctaaagaggtagcagccgtttctatactaggatagtgggttgttagactagggttgtacacttgtactatttgctaatgagttgtttagactagagatgtcaggtaatcagatataacacacttcattatcaaagctatgttatcgggttcagaggcagcttacatatcctatctcacatcctcctttattttaaacttcattatgtaaacaatgactatgaaggtgttactatggaggtatttgagatggctctaggttctagatccagtatggagctgtagtttatgtcagtttatttaaatagttttaaagtatttataatctaaataataaataaaat

SEQ ID NO: 49013 - DNA, 3151 bp, Zea Mays
cacatcacaaaatttcccctcgctcctagcactcgagcactcaactgtcgcaccatcgggacgccgcggcggcggccagcacgttcgaggctgcggcggcaaggtgggctgtcgtgcgaggtcagcgaggacaggtcgtctgggagcacctgaggctgtgcgaggtgccggcaggctatgacatttctagagtaagtaatactctgggggcatctcccgctcgcttagctgtgcccgccaggccatggagcgtgaggacgccgacggcgctctcgattcgtgggctcaattctgcactctttccaacgagcttctcgccggagacggtgatctcgccgtcggcccacgcctagctcccgtcgttggtgacctctgcacacgcggcctcgccacgctcgtccgcgactacttcctccactccctcgaggaaacatttcgaaaccatgcagtcaagaagttctggcagcactttcatccttattgcagtgcctcaaccgtagacagaattaagttctgtgttaaggaacattggcctgaagaaatcttaagtaaagcactggaggacatatgcttggaaaggggttaccaggaaaaatgtgttcttgttcttgtccaagttttacaatcatatgaggataggatgccacgaaaaaaaatcaaagaagtggtctgtagttccagcttaatgcctaggtatcagttaatggtatcatcagtacttctgacaacactgcccttgagctttcctgacatattgaatatctatttcaagaagaagctggaagaacttaatagtattatggctggatcttatgagagtgatcaacttgtggatcatgaaccttttcaaaggagtaatacatctgactggcattctggaatggacattgatggttctgaagtttcagaaaatagctccttggtaaagaacattggcaaagttgttcgtgatcttagatgtattggttttacatcgatgactgaagatgcttattcctctgcaataatctggcttttaaagtctaaggtttatgaactagctggtgatgattatagagtgtcagtcctttggtgtgtgaagaagtggattcaggctgttcctcttcagtttctgcatgctcttttaacatatctcggtgactctgtggaccatggcagtggatcttctggtctcaaatcaccattagcttcacgcccttcttccttcccagggattggtgttccttctgaagcccttgtgagatggcacatgcgccttgaatattttgcttatgaaaccttgcaggacctacgaattggcaaactttttgaaataattgtagattaccctgagagctctcccgctattgaagacctaaagctgtgtttagagtacacgggccaacactctaagcttgttgactcatttatctcatcgcttcgatatcgtctacttactgctggtgcatcaacaaatgatatattgcaccaatatgtgtccactataaaggcattgcggacaattgaccccaccggggtgttcttggaagcagttggtgaaccaattagggattatctgagaggtagaaaagacactatcaaatgcatagtgacaatgctaactgatgggtcaggaggaagtggaagtggaacaggcaatgcaggtgacaatcttctggaagagttgaacagagatgctgaaaaccaggaaaatgctgattacgacgatcatgcaaacattgatgagaaacaagcatggctcaattctgaaagctgggaacccgatcctgtagaagcagacccattgaaaggcaacaggaacagaaggaaggtcgatatacttggactaatggttagtataattggctcaaaggaccaactagtcaatgaataccgtgtaatgctggcagaaaagctgctcaacaaatctgactttgaaattgattcagacattcgcacattggaactcctgaagattcattttggtgagagcagcatgcagaagtgtgagattatgcttaatgacttgattgactcgaagagaaccaattcgaacattaaaacatctttgctgaagtcatctcaaactgttcctgggcaagaggaggcagaagtgtctcatgatgttttggatgccactataatatcatctaatttttggccaccaattcagatagaagaccttgttgttcctgcttcagttgatcagttgctatcggattacgcaaaacgatttcaccagataaaaactccacgaaagctattatggaagaaaaatcttggaacattagaactgcaatttgacggaagaagcgtgcaatttactgtagctcctgtgcatgctgcaatcataatgcggtttcaagagaaatctagttggacttcaaaggcacttgctacagaaattggcatacctatggattctcttaacagaagaataagtttctggacaagcaagggggtcctgactgaatcagcaggaccagatgccgatgatcgcaccttcactgttgtcgatagcatgtctgatgtcaacaaggacagtattgtgaatgaacgcatggcagagtatcagatgactgaggaggaaggtgaaagctctgtggcttcagtggaggaacagcttaagaaagaaatgacagtctacgagaaatacatcgtcggaatgctaacaaattttgggagtatgtcgctggacaggatacataacactctaaagatgttttgtattgccgagccatcgtatgacaagtcgctgcagcagctgcaaagttttctttctggtctagtagcagatgaaaagctagaaacgagggatgggctgtacttgctaaagaggtagcagccgtttctatactaggatagtgggttgttagactagggttgtacacttgtactatttgctaatgagttgtttagactagagatgtcaggtaatcagatataacacacttcattatcaaagctatgttatcgggttcagaggcagcttacatatcctatctcacatcctcctttattttaaacttcattatgtaaacaatgactatgaaggtgttactatggaggtatttgagatggctctaggttctagatccagtatggagctgtagtttatgtcagtttatttaaatagttttaaagtatttataatctaaataataaataaaat

SEQ ID NO: 49014 - DNA, 2556 bp, Zea Mays
ggatcctgtcttaagctcgggtgtttatggaaatggcgcccaaatgaaatctcagtgctggactgaaacatttcgaaaccatgcagtcaagaagttctggcagcactttcatccttattgcagtgcctcaaccgtagacagaattaagttctgtacatattgaatatctatttcaagaagaagctggaagaacttaatagtattatggctggatcttatgagagtgatcaacttgtggatcatgaaccttttcaaaggagtaatacatctgactggcattctggaatggacattgatggttctgaagtttcagaaaatagctccttggtaaagaacattggcaaagttgttcgtgatcttagatgtattggttttacatcgatgactgaagatgcttattcctctgcaataatctggcttttaaagtctaaggtttatgaactagctggtgatgattatagagtgtcagtcctttggtgtgtgaagaagtggattcaggctgttcctcttcagtttctgcatgctcttttaacatatctcggtgactctgtggaccatggcagtggatcttctggtctcaaatcaccattagcttcacgcccttcttccttcccagggattggtgttccttctgaagcccttgtgagatggcacatgcgccttgaatattttgcttatgaaaccttgcaggacctacgaattggcaaactttttgaaataattgtagattaccctgagagctctcccgctattgaagacctaaagctgtgtttagagtacacgggccaacactctaagcttgttgactcatttatctcatcgcttcgatatcgtctacttactgctggtgcatcaacaaatgatatattgcaccaatatgtgtccactataaaggcattgcggacaattgaccccaccggggtgttcttggaagcagttggtgaaccaattagggattatctgagaggtagaaaagacactatcaaatgcatagtgacaatgctaactgatgggtcaggaggaagtggaagtggaacaggcaatgcaggtgacaatcttctggaagagttgaacagagatgctgaaaaccaggaaaatgctgattacgacgatcatgcaaacattgatgagaaacaagcatggctcaattctgaaagctgggaacccgatcctgtagaagcagacccattgaaaggcaacaggaacagaaggaaggtcgatatacttggactaatggttagtataattggctcaaaggaccaactagtcaatgaataccgtgtaatgctggcagaaaagctgctcaacaaatctgactttgaaattgattcagacattcgcacattggaactcctgaagattcattttggtgagagcagcatgcagaagtgtgagattatgcttaatgacttgattgactcgaagagaaccaattcgaacattaaaacatctttgctgaagtcatctcaaactgttcctgggcaagaggaggcagaagtgtctcatgatgttttggatgccactataatatcatctaatttttggccaccaattcagatagaagaccttgttgttcctgcttcagttgatcagttgctatcggattacgcaaaacgatttcaccagataaaaactccacgaaagctattatggaagaaaaatcttggaacattagaactgcaatttgacggaagaagcgtgcaatttactgtagctcctgtgcatgctgcaatcataatgcggtttcaagagaaatctagttggacttcaaaggcacttgctacagaaattggcatacctatggattctcttaacagaagaataagtttctggacaagcaagggggtcctgactgaatcagcaggaccagatgccgatgatcgcaccttcactgttgtcgatagcatgtctgatgtcaacaaggacagtattgtgaatgaacgcatggcagagtatcagatgactgaggaggaaggtgaaagctctgtggcttcagtggaggaacagcttaagaaagaaatgacagtctacgagaaatacatcgtcggaatgctaacaaattttgggagtatgtcgctggacaggatacataacactctaaagatgttttgtattgccgagccatcgtatgacaagtcgctgcagcagctgcaaagttttctttctggtctagtagcagatgaaaagctagaaacgagggatgggctgtacttgctaaagaggtagcagccgtttctatactaggatagtgggttgttagactagggttgtacacttgtactatttgctaatgagttgtttagactagagatgtcaggtaatcagatataacacacttcattatcaaagctatgttatcgggttcagaggcagcttacatatcctatctcacatcctcctttattttaaacttcattatgtaaacaatgactatgaaggtgttactatggaggtatttgagatggctctaggttctagatccagtatggagctgtagtttatgtcagtttatttaaatagttttaaagtatttataatctaaataataaataaaat

SEQ ID NO: 49015 - DNA, 2455 bp, Zea Mays
ccgctacaggagcacgggcaacgtagggttcccaacatatcccgcagacatattgaatatctatttcaagaagaagctggaagaacttaatagtattatggctggatcttatgagagtgatcaacttgtggatcatgaaccttttcaaaggagtaatacatctgactggcattctggaatggacattgatggttctgaagtttcagaaaatagctccttggtaaagaacattggcaaagttgttcgtgatcttagatgtattggttttacatcgatgactgaagatgcttattcctctgcaataatctggcttttaaagtctaaggtttatgaactagctggtgatgattatagagtgtcagtcctttggtgtgtgaagaagtggattcaggctgttcctcttcagtttctgcatgctcttttaacatatctcggtgactctgtggaccatggcagtggatcttctggtctcaaatcaccattagcttcacgcccttcttccttcccagggattggtgttccttctgaagcccttgtgagatggcacatgcgccttgaatattttgcttatgaaaccttgcaggacctacgaattggcaaactttttgaaataattgtagattaccctgagagctctcccgctattgaagacctaaagctgtgtttagagtacacgggccaacactctaagcttgttgactcatttatctcatcgcttcgatatcgtctacttactgctggtgcatcaacaaatgatatattgcaccaatatgtgtccactataaaggcattgcggacaattgaccccaccggggtgttcttggaagcagttggtgaaccaattagggattatctgagaggtagaaaagacactatcaaatgcatagtgacaatgctaactgatgggtcaggaggaagtggaagtggaacaggcaatgcaggtgacaatcttctggaagagttgaacagagatgctgaaaaccaggaaaatgctgattacgacgatcatgcaaacattgatgagaaacaagcatggctcaattctgaaagctgggaacccgatcctgtagaagcagacccattgaaaggcaacaggaacagaaggaaggtcgatatacttggactaatggttagtataattggctcaaaggaccaactagtcaatgaataccgtgtaatgctggcagaaaagctgctcaacaaatctgactttgaaattgattcagacattcgcacattggaactcctgaagattcattttggtgagagcagcatgcagaagtgtgagattatgcttaatgacttgattgactcgaagagaaccaattcgaacattaaaacatctttgctgaagtcatctcaaactgttcctgggcaagaggaggcagaagtgtctcatgatgttttggatgccactataatatcatctaatttttggccaccaattcagatagaagaccttgttgttcctgcttcagttgatcagttgctatcggattacgcaaaacgatttcaccagataaaaactccacgaaagctattatggaagaaaaatcttggaacagttaagttagaactgcaatttgacggaagaagcgtgcaatttactgtagctcctgtgcatgctgcaatcataatgcggtttcaagagaaatctagttggacttcaaaggcacttgctacagaaattggcatacctatggattctcttaacagaagaataagtttctggacaagcaagggggtcctgactgaatcagcaggaccagatgccgatgatcgcaccttcactgttgtcgatagcatgtctgatgtcaacaaggacagtattgtgaatgaacgcatggcagagtatcagatgactgaggaggaaggtgaaagctctgtggcttcagtggaggaacagcttaagaaagaaatgacagtctacgagaaatacatcgtcggaatgctaacaaattttgggagtatgtcgctggacaggatacataacactctaaagatgttttgtattgccgagccatcgtatgacaagtcgctgcagcagctgcaaagttttctttctggtctagtagcagatgaaaagctagaaacgagggatgggctgtacttgctaaagaggtagcagccgtttctatactaggatagtgggttgttagactagggttgtacacttgtactatttgctaatgagttgtttagactagagatgtcaggtaatcagatataacacacttcattatcaaagctatgttatcgggttcagaggcagcttacatatcctatctcacatcctcctttattttaaacttcattatgtaaacaatgactatgaaggtgttactatggaggtatttgagatggctctaggttctagatccagtatggagctgtagtttatgtcagtttatttaaatagttttaaagtatttataatctaaataataaataaaat

SEQ ID NO: 49016 - DNA, 2147 bp, Zea Mays
gcaacgtagggttcccaacatatcccgcagacatattgaatatctatttcaagaagaagctggaagaacttaatagtattatggctggatcttatgagagtgatcaacttgtggatcatgaaccttttcaaaggagtaatacatctgactggcattctggaatggacattgatggttctgaagtttcagaaaatagctccttggtaaagaacattggcaaagttgttcgtgatcttagatgtattggttttacatcgatgactgaagatgcttattcctctgcaataatctggcttttaaagtctaaggtttatgaactagctggtgatgattatagagtgtcagtcctttggtgtgtgaagaagtggattcaggctgttcctcttcagtttctgcatgctcttttaacatatctcggtgactctgtggaccatggcagtggatcttctggtctcaaatcaccattagcttcacgcccttcttccttcccagggattggtgttccttctgaagcccttgtgagatggcacatgcgccttgaatattttgcttatgaaaccttgcaggacctacgaattggcaaactttttgaaataattgtagattaccctgagagctctcccgctattgaagacctaaagctgtgtttagagtacacgggccaacactctaagcttgttgactcatttatctcatcgcttcgatatcgtctacttactgctggtgcatcaacaaatgatatattgcaccaatatgtgtccactataaaggcattgcggacaattgaccccaccggggtgttcttggaagcagttggtgaaccaattagggattatctgagaggtagaaaagacactatcaaatgcatagtgacaatgctaactgatgggtcaggaggaagtggaagtggaacaggcaatgcaggtgacaatcttctggaagagttgaacagagatgctgaaaaccaggaaaatgctgattacgacgatcatgcaaacattgatgagaaacaagcatggctcaattctgaaagctgggaacccgatcctgtagaagcagacccattgaaaggcaacaggaacagaaggaaggtcgatatacttggactaatggttagtataattggctcaaaggaccaactagtcaatgaataccgtgtaatgctggcagaaaagctgctcaacaaatctgactttgaaattgattcagacattcgcacattggaactcctgaagattcattttggtgagagcagcatgcagaagtgtgagattatgcttaatgacttgattgactcgaagagaaccaattcgaacattaaaacatctttgctgaagtcatctcaaactgttcctgggcaagaggaggcagaagtgtctcatgatgttttggatgccactataatatcatctaatttttggccaccaattcagggggtcctgactgaatcagcaggaccagatgccgatgatcgcaccttcactgttgtcgatagcatgtctgatgtcaacaaggacagtattgtgaatgaacgcatggcagagtatcagatgactgaggaggaaggtgaaagctctgtggcttcagtggaggaacagcttaagaaagaaatgacagtctacgagaaatacatcgtcggaatgctaacaaattttgggagtatgtcgctggacaggatacataacactctaaagatgttttgtattgccgagccatcgtatgacaagtcgctgcagcagctgcaaagttttctttctggtctagtagcagatgaaaagctagaaacgagggatgggctgtacttgctaaagaggtagcagccgtttctatactaggatagtgggttgttagactagggttgtacacttgtactatttgctaatgagttgtttagactagagatgtcaggtaatcagatataacacacttcattatcaaagctatgttatcgggttcagaggcagcttacatatcctatctcacatcctcctttattttaaacttcattatgtaaacaatgactatgaaggtgttactatggaggtatttgagatggctctaggttctagatccagtatggagctgtagtttatgtcagtttatttaaatagttttaaagtatttataatctaaataataaataaaat

SEQ ID NO: 49017 - DNA, 1588 bp, Zea Mays
gatgactctgtgtgtgtgcgcgcgcgcgccccaagtccagtccaaacatccatcggtagggatgggactgcctagtcgaggagaagcttcgctggcgccgcgccgccccgcattcgtcgacgagttcgacaggcccagtgctgccggctcccatatgagtggggtagtaaccgagccaagacttaattccgtggtacattctacatagaggcttcatcgaactcaggacctttggcttaatggaaaggcctgtcaccattgcgtcaggtggctgaccaagacagcttgacttgactcccaccttccatgaaatgcactggcactcagccaaaagacttcaggagttcgacacatacattgaatcgcaaaatcaatatttacattacttcactccattacgattcacaacagctaaagccgctccatgaccatgggcacagttgtcggtgagatgcttgcatcggctgtcctgaaggtggtcatggggaagcttggtgcggttattgggcctgaggtcaacatgctgtggaagttcaaggatgatcttgagtcgatcaggagcactctgttgactctccaagctgtattgaatgacgctgagaagcggtcttcacgagaggaacgtgtgcgcctctggctcaagaggcttaagtttgctgcttatgacattcatgacattttagaggaaatggaatcaaataatgacattggctatggttcgtttaagaaggtcggatgtgtcaggcatatagaacaggagaatggtatatgccaaaatgtttcagttgacaaggtcggatgtacgagctctatcgacgttatagttgtgcctccgcgagtccgagctgacccagcagcgagtcagaatccagcagttgttgccaggaggatggttctgaagtcaccacgcctaaggatcaaaaggcctgtcgtagtggcacagctgatgaagggcagccaccgcaagcggcccgcagccaggaaaacaagaactggggacaaggcttcgagtagcacccgccagggaacgccgaatgacagcaatatcacgggtgaggtagatattggagatcttatcgacttccttcgggaggagtacggatgtcgaggaacgtcgacaaggagctatcaggcgcggcaaatgacggtgatgagcggattctcatgtatgaacttattctgctagcgtcgtgtcgtgtataggcagagtcattgaaaaaaatgcaaacgtgaaggcggctcaagacggcttcgccaaaatgcccactgagccatgtaactcgtcaaaatacccatgtcaacatgaaaacattgatgtaatgctcatacctctttatatattatgttttgtagacttgtatagaccaaaatagccttcttagatatgcatacacaaataaaggtacaaaataaaacgtaccatatttcatcaccagcatacagtggccgcagatatagaatgataattcatgggggccaacaaaccgcacgataaaattaaacaagaccataaaaaactagtgttgcatataatttaacttttatatacaggtttaaagaatgaaactacataaacaaaagaaacaaa

SEQ ID NO: 49018 - DNA, 4939 bp, Zea Mays
gatgactctgtgtgtgtgcgcgcgcgcgccccaagtccagtccaaacatccatcggtagggatgggactgcctagtcgaggagaagcttcgctggcgccgcgccgccccgcattcgtcgacgagttcgacaggcccagtgctgccggctcccatatgagtggggtagtaaccgagccaagacttaattccgtggtacattctacatagaggcttcatcgaactcaggacctttggcttaatggaaaggcctgtcaccattgcgtcaggtggctgaccaagacagcttgacttgactcccaccttccatgaaatgcactggcactcagccaaaagacttcaggagttcgacacatacattgaatcgcaaaatcaatatttacattacttcactccattacgattcacaacagctaaagccgctccatgaccatgggcacagttgtcggtgagatgcttgcatcggctgtcctgaaggtggtcatggggaagcttggtgcggttattgggcctgaggtcaacatgctgtggaagttcaaggatgatcttgagtcgatcaggagcactctgttgactctccaagctgtattgaatgacgctgagaagcggtcttcacgagaggaacgtgtgcgcctctggctcaagaggcttaagtttgctgcttatgacattcatgacattttagaggaaatggaatcaaataatgacattggctatggttcgtttaagaagcttagcgcacacattaccattgctcacaagatgaagaagatgaggcagaggttggagaagattaaggaagaagcaaaactggatatattcaattttaaggctgattgttgctccttggatgaaaatgttaatagcagggctacgttttcttgtatcagtgaagatattgtggggaggtccacggagaaagaaactatagttgctatgttgacaacatatagtgaagaagagattttgaccatctgtatttatggttttggtggccttggtaagaccactcttgccaggttagctttcaatgatgaaaatgttgggggagttttcgattaccgagtatgggtctacgtatctatgaaatttgatctgaagaaaattggtgaatctatactttctgaaattgatgaaggcaactgtggccaccacggaaaccttcaggaggttactcgtcatctccaaagagtacttgatggcaagaaattcttggttgttcttgatgacttatgggaagacaattggatccaattgcaaaatctgaaggcaatgctcagctgtggtgcaaaaggaagtaagatcgttgtgactacacgcactgggaagattgcttccctgatggatcattgcatgccttacaagatggatgtcctatctgatgatgattgttggattttgtttaagagaagagcctttgttcctggaagggatgatcctaggatagaagtgattggaagggatatagtgaagaaatgcaatggtgtgcctttgtctgcacaagctttgggtttcatgatgcggttcaaggaaggggtggctgcatgggaagcagtgagggacagtgaaatatgggagatagaagatcagaatattatgccatctttgaagcttagttattgtctcatgccttgtcacctgaagttgtgctttgcatactgtgtagttttctccaaaggagctgccatagacaaggacatgctgatacagcagtggattgcacttggattcattcaacccactagtggaagcttgacacatgtaaagcgcggtgaggagtacatccgtgaactagcggataaccatcacatgaaagctgcaagggtattccagatgcatgatttggtgtatgaccttgcaagatgtgttgctaatgaagaattcctattcatggatgccaaaaagagtggcatgactagcgctagaaatgatcattatcgacatattgtgctgatgaattatgttgaggtaccaatgaacagcaaggctgcactttgtaaggcaaaatcacttcattttagagattgcaaaaggctgcagatttctgggagatcactctccctgaccctgagtaaattcttgcgagtcttggacataagtggctgttctatgttagggttaccaagtcaacttaaccagatgaagcagttacgttatcttgatgcatcgggaatgcagaatgaattgaaacaggagtctttcgctggtttaaaatgcctaaatgcactaaacctttcggcaggttattttcagaaactgccagttcaaatagttaaccttgagaaattgcattacttaaaccttcatggttgttctcgtctcatgttaattcctgagtccatttgtgaactaagggatctggtgcatctagacctatcaggatgcattaacctacgagttctgcccacatctttcggcaaactccataaattatcattcttggacatgtctggttgtctcaacctagttagcttgccagaatcattttgtgacctccgttccttggaaaaccttaacttgtcatccttccatgaacttagagagttgccgttaggcaatcatcaagaactcctcatactggacatgtccaattgtcataaaatccaaattttacccatgtcattttgcaatctcctacatttagaggatctcaatttgtcatgctgttatgaacttcaagaactgccagaagattttggaaaaaatcgtgggcttcgtattctggatctaagtaactgccacagacttcagacattgcctgattcctttactgaccttgtaaacatagagaaactgatcttatccgattgctgggagctagtacagcttccagaactgcttgggttcctacagaaaattcaggttttggacctatcatgttgttcacagctttttgcattgcctgagagtgttactaagctcacaaatttagagcacctaaatctgtcatgctgcattagccttgaaaagatgcctggagactacggcagcttaaagaaacttaagcttctgaacatatcatattgttttaaggtccgtatccctaatggcatagccaatatgtctaacctgaaatgtttgatggcggttgggttggacggttactcttgtgggaataaggatgatttcaatattgtaagtagcttactgtgtatgcctaggatagatttgagtaaaaaggacagccccattggtgacttccatgggatcttgaagcacaaaagactacatctttttggtctcggcaacgtgcaaagcattgatgagtttgagaacttgggattatgcaggcatcagcagctcaactcactaagacttagtagctcctacatgaatggtaatgaagtggctaaatttatcccagatgacattgtacttgaaaagatcatacctccaaggaccctggaacactttgaacttttgggctatcatggttcagaatttcctgagtggatgctgaatctgacaaccattttgccaaaccttgtacaccttaagctttctggccttgctacatgtgaccatctgccgcctcttggccagctaccaaatttgcagtccctggtcatagaatgtataccaaatgtcaaggctgttggagaagtttttgctggtggcagcagagcgtttctgaaattaagggacctcactatcagtggtatgccaaacctagaaaggtggctgacaactctatcaactaccaatgaagaggcccatgtgtatgtgttccctaaccttcaccatctgaaggtgtcatggtgcccaaagttgatatttgaaccatctcttccacagtgccttttattggaaattgatgcatgtggtgagatcttgcaaggatggacagcctcacattcacaaataaaccttaggccaacaagaaggttaagcttccagttctgtgacttatcattttcaaggggggaccaacttcatttttttagctccttaagttcacttaagttcctgacacttccattcttgcggcagctacaaattgtttgttgcaacgctaagttagagttacctggtgaaataaccagagccatcttggctcgtattccaaatatcagcatacacaatgtcggatgtgtcaggcatatagaacaggagaatggtatatgccaaaatgtttcagttgacaaggtcggatgtacgagctctatcgacgttatagttgtgcctccgcgagtccgagctgacccagcagcgagtcagaatccagcagttgttgccaggaggatggttctgaagtcaccacgcctaaggatcaaaaggcctgtcgtagtggcacagctgatgaagggcagccaccgcaagcggcccgcagccaggaaaacaagaactggggacaaggcttcgagtagcacccgccagggaacgccgaatgacagcaatatcacgggtgaggtagatattggagatcttatcgacttccttcgggaggagtacggatgtcgaggaacgtcgacaaggagctatcaggcgcggcaaatgacggtgatgagcggattctcatgtatgaacttattctgctagcgtcgtgtcgtgtataggcagagtcattgaaaaaaatgcaaacgtgaaggcggctcaagacggcttcgccaaaatgcccactgagccatgtaactcgtcaaaatacccatgtcaacatgaaaacattgatgtaatgctcatacctctttatatattatgttttgtagacttgtatagaccaaaatagccttcttagatatgcatacacaaataaaggtacaaaataaaacgtaccatatttcatcaccagcatacagtggccgcagatatagaatgataattcatgggggccaacaaaccgcacgataaaattaaacaagaccataaaaaactagtgttgcatataatttaacttttatatacaggtttaaagaatgaaactacataaacaaaagaaacaaa

SEQ ID NO: 49019 - DNA, 1532 bp, Zea Mays
ctccgcttccggcttctccgtttctaggccacggcccatgtggttttagcccgtgtatctcggaccgagtccagcggggagaccgagtgcctgcctgggcctggcgttgagccgaggcccattgagcccagagggagagtgtttggaagcttcgattgcgtccccgccggtccatgctccatccggcttcccttgccgcaaccgcaagccccggccccgcaaggcgataggaagccggcagttcagccgcggcttcggttccgccgttccggagatggggtccggcatgagcagcgcccggcggcgccgcttcggcctggaggcgtcgcgggggatgctgcccctgctggctctgcaggtgctcatcgagtacggccgcgcgggggcctcccgcccgcccgtcacggccgcgctgctcgccgccaactcactcgtctacctccgccccggcgcgctcgacggggtcctgccctcgctcgcgcgcgtctccttcaaccctcagctcatcatcgagtatggcgacttgacgcgctttttcctgtcacccttctaccacttgagtgaaagtcacctcttctacaacatgacgtcgctgctgtggaagggcattcatctcgagacatcaatgggtagtgccgagtttgcttccatggtcgcggtgctgcttggcctgtcgcagggtatcacgctgctcctgtccagaggcttactcttgctcggtgacgataccatgtactatgatcagcatgccgttggattctctggtgttctgtttgccatgaaggttgtgctgaacgcctggtcagacgatttcgtgtatctgcacgggatggttattccagcgaaatacgctgcctgggcggagttgatcctcatccaggtttttattcctgggacatcctttcttggccatcttggtgggatacttgctggactggtttacctttggctgaagcgtgcatccaatgggccagatccgatcactcttttgatctcaagcgttgccaatgttgtgacctggccagtgaggttcgctcagaatcttctacggtctgcccgttcacagggccgcgtaacaggtcggggcagggttgggcgccgcatatcagcaagagatagccctcgaggtttttggagatgcccaacctgcacctatgataattcagtttccacagatatctgtgagatgtgcagcactgcacgagataaccatgcttttttgcggagacagcatcatcaagccgtaggtaacacggtggaactccctgttgatgagatgcgccgtaggaggctgcaaaggtttgacagatgatgtaaatcattgttgtcagtacacacattgtgcgctgctgaacacagttgaagtatggcaggttctaaggcaatcttggaggaagaatgtattgatgaactgtaggtcacgtgtttagttttgtatccatataataatttgatccattttatcaactggtatgaaacttgaaagtgtgggaaacatgtaagtgcctagcttttctttgtgtcataaactc

SEQ ID NO: 49020 - DNA, 4400 bp, Zea Mays
cctcgtccggagtatgttcgagtggagagagtagttgacttgcgagttagacaggtagactactcggggtcggggcagccaaggccaggtgggtcccccgaactcactcacggtcacggcaaccgccgccgcgacgccatcaacggcatcatcccatttccacttggatcccaacttcccaagccacctctgcttctcctccgtctcgtcgtcggccatgacacccgccggtggcgccaaccactccccggcgccgcgtagcctggtattcgccttctacctcaccggccatggcttcggccacgccacccgcgccatcgaggtggtgcggcacctgatcgcggacgggcacgaggtgcacgtggcgacggccgtgccggagttcgtcttcaccgccgaggtgcggtccccgcgcctccgcatccgcagggttatcctcgactgcggcgccgtccaggcagatgccctcaccgtcgaccctctcgccacgctggataagtaccgtgaggcggcagtgttaccccgcgagttcatcctcagggccgaggctgagtggcttagctccatcaaggcagaccttgtggtctcggatgttgttcctattgtgtgcaaggtggcttcagatctgggtgtccgctctgtatgcattgggaattttagttgggacttcatatatgctgaatacatcatggaggctggatatcatcaccgatctattgtgtggcagatagcagaggattactcccattgtgacatattacttcgactacctggatatggcccaatgccggcttttcgcaacgtcattgatgtgcctcttgtggttagaggattacgcaaatctagatctgaggtgaggaaggaactaggaattgaggagaatgctaaggtgctcgtttttaattttgggggtcaggtgggtcacttgtcatataggtggtttggtaagcttatggaatatgtttctattttctcatgtggtaatgttatgtggctattttaatgtgcttacagccctatttggcacagcttatttcacagtttctttaagcagaagttgtattatacagtaaacttctgcagtagcttatcagttcagctacttctcaaaatgaactaaaaacagacaatacacaaaagttgcttttcgccagcttcccagataaactgcttttccaacaagcaacagctaccaaatagggcctatcgtttcttctgcaccgatatctgctgattctgattctttcagtaatcacagccttttttgtaacgaagtggtgcttattacctattatttaaatcaaaagtgatgccttttcaattacttggaagtattatggttagctattacccagatactgcattttgtaatgaagtccctgcaatacttgaataattatcattatacctcctagtttttagcagaacacatcatcattaaattttgtatgtatcatgcttccttcaaaagcttagcgatccattcttctatcctgtatgctctaaactttttgtgaactacacaaaacttatcaccaacataataaaataatcagtgcgtcatggttcccagccagcaggatggaaactgaagcaagaatgtctccctgatggttggatttgtttggtctgtggtgcctctgattctcaagatgttccaccgaacttcattaagcttgcgaaagatgcttacacacctgatgttatggcagcatctgactgtatgcttggaaaaattggatatggaactgcaagtgaggctttggcctgcaagctaccattagtgtttgttcgcagagattacttcaacgaagagccatttttgcgaaatttgcttgagcactaccaaaacagcattgagatggtcagaagtgatttccttgctggacactggaaaccgtacctacttcgtgctctcacacttcaaccatgctacaatggcccaataaatggtggtgaggtggtttcccagattctccaggacactgctattggaaacaaatgtatttctgataaagctagtggtgcaagaagattgcaagatgccatggtctcaggatatgtacttcaaagggttcctgggagagatgcaggcattcctgactggtactctgtgtccgaaaccaaaactggtggcggtccgacctcacaaaatgttgctacaaaggaaagtgcagcattatgtattgaagacattgagatactccatggggaccttcaaggattaacagatacagtggactttttgaagagcttatctgaacttaatggaaatgatttgaagagccctaagaagcaagacctagagagaactgctgcatctgttctttttgactgggagacagaaatatatgtagcaagggcacctggacgtttggacgtcatgggtggcattgctgattattcagggagtcttgttttgcagatgcctcttcgggaagcttgccatgttgctgttcagagaaaccatcccagcaagcagaagctttggaaacatacaaaagcaagacagcttgttaacggaggcttggtacctgtgatacaaattgtatcatttggttctgatttgagtaaccgtgcaccaacttttgatatggacctgtcagattttatggatgatggtaaaccaatatcctatgagaaagccagggagcttttctgtcaggatccatcccaaaaatgggctgcctatgttgctggaacaattctagttttgatgactgaacttggtgcccagttcactgacagcattagcattctggtttcatctgccgtgccagaaggaaaaggtgtttcatcttctgcatcagtggaggttgctacaatgtctgctatcgccgcagcctatggtttaaacatcataccaagggatcttgctttgctttgtcagaaggttgagaatcatgtagttggagctccttgtggagtaatggatcaaatggcatctgcgtgtggagaagctaacaaactccttgcgatggtttgccagcctgccgaagtgaaggaattggttagcatacctactcatatacggttctggggtctagattcagggatacggcatagtgttggcgggggagattatggatctgtgagggtaggcacttacatgggacgaaagatgatcaagtgtacagcatcagatttagtttcagaatccttgacttcagggtcccctgctcagtctgattgttataaagaaaatggtgtgggcgtactgaaatctgaagctgcactggagtatttgtgcaacctaccacctcacagatatgaagctgtttatgcaaaagacattccagaggtgattagtggagaagcattttcagagaaatatggagatcacgatgacacagtgacagttattgatcctaaaagatcttacagtgtgaaggctcctactagacatcccatatatgagaacttccgtgtcgaggccttcaaaacgttattagaggcaggtaatacagacgagcagctgtcagcccttggagaacttatgtaccagtgccacaacagctacagcgcatgtggcctcggttctgatgggactgacagactagtcaacctggtacgagaagtgcaacacaggaggacatccgaaggcggaagccctagtctgtttggcgcaaagatcaccggcggaggctccggcggcacagtatgtgttgttgggaagaactgcgccaggagcagtgaagagattgcagagattcagcacagatacaaggctgagaccgggtatctgcccattcttttcgacgggtcgtctccaggagctgggaagtttggttacctgaagatccgacgtcgttgtccctagtggctgattgggaaacgaagaacttcagttcgagctttgtcacatatcactcaattgttaagaacctcactccaactctccaagccattgtagaacatagaggcgtattgccacttgcgatgattcgtcgttcacacacaaaatattatcatgtgctacaccaattctggaagctactagaggaaaatgtgaggaatataaagaaactcttgttgagcagatgtagtctagtggtctccgtgtgcttgctgcagtgtaaccaaactccaagtagatgtgctctgggctctggcatgtggtatgtgatgaagtcgaggatggtttcttgccgtttgatgaccagtgtagtcgttggttaacttgtcagtcgtaaactgatgttgtcagttaggagcggataaagtttgtgtgtgttgtcagtgtatctgtgtgtaagtttattggacagaccgaaagatacaccacgaacccagatgaagtaggtaatagtcgtatgtgaagtttttatcattagggttgcaaatgcattaaatcacttataaatatatgatgattataaacttcctctgcatttatttcc

SEQ ID NO: 49021 - DNA, 4489 bp, Zea Mays
gtggagagagtagttgacttgcgagttagacaggtagactactcggggtcggggcagccaaggccaggtgggtcccccgaactcactcacggtcacggcaaccgccgccgcgacgccatcaacggcatcatcccatttccacttggatcccaacttcccaagccacctctgcttctcctccgtctcgtcgtcggccatgacacccgccggtggcgccaaccactccccggcgccgcgtagcctggtattcgccttctacctcaccggccatggcttcggccacgccacccgcgccatcgaggtggtgcggcacctgatcgcggacgggcacgaggtgcacgtggcgacggccgtgccggagttcgtcttcaccgccgaggtgcggtccccgcgcctccgcatccgcagggttatcctcgactgcggcgccgtccaggcagatgccctcaccgtcgaccctctcgccacgctggataagtaccgtgaggcggcagtgttaccccgcgagttcatcctcagggccgaggctgagtggcttagctccatcaaggcagaccttgtggtctcggatgttgttcctattgtgtgcaaggtggcttcagatctgggtgtccgctctgtatgcattgggaattttagttgggacttcatatatgctgaatacatcatggaggctggatatcatcaccgatctattgtgtggcagatagcagaggattactcccattgtgacatattacttcgactacctggatatggcccaagtatactcaactatatttggttactcttttttccttaaaaattgtgttccctgtttctcagttatcatgaaaatagagtattatttcattccatagtgccggcttttcgcaacgtcattgatgtgcctcttgtggttagaggattacgcaaatctagatctgagttgtgatctattaggtgaggaaggaactaggaattgaggagaatgctaaggtgctcgtttttaattttgggggtcaggtgggtcacttgtcatataggtggtttggtaagcttatggaatatgtttctattttctcatgtggtaatgttatgtggctattttaatgtgcttacagccctatttggcacagcttatttcacagtttctttaagcagaagttgtattatacagtaaacttctgcagtagcttatcagttcagctacttctcaaaatgaactaaaaacagacaatacacaaaagttgcttttcgccagcttcccagataaactgcttttccaacaagcaacagctaccaaatagggcctatcgtttcttctgcaccgatatctgctgattctgattctttcagtaatcacagccttttttgtaacgaagtggtgcttattacctattatttaaatcaaaagtgatgccttttcaattacttggaagtattatggttagctattacccagatactgcattttgtaatgaagtccctgcaatacttgaataattatcattatacctcctagtttttagcagaacacatcatcattaaattttgtatgtatcatgcttccttcaaaagcttagcgatccattcttctatcctgtatgctctaaactttttgtgaactacacaaaacttatcaccaacataataaaataatcagtgcgtcatggttcccagccagcaggatggaaactgaagcaagaatgtctccctgatggttggatttgtttggtctgtggtgcctctgattctcaagatgttccaccgaacttcattaagcttgcgaaagatgcttacacacctgatgttatggcagcatctgactgtatgcttggaaaaattggatatggaactgcaagtgaggctttggcctgcaagctaccattagtgtttgttcgcagagattacttcaacgaagagccatttttgcgaaatttgcttgagcactaccaaaacagcattgagatggtcagaagtgatttccttgctggacactggaaaccgtacctacttcgtgctctcacacttcaaccatgctacaatggcccaataaatggtggtgaggtggtttcccagattctccaggacactgctattggaaacaaatgtatttctgataaagctagtggtgcaagaagattgcaagatgccatggtctcaggatatgtacttcaaagggttcctgggagagatgcaggcattcctgactggtactctgtgtccgaaaccaaaactggtggcggtccgacctcacaaaatgttgctacaaaggaaagtgcagcattatgtattgaagacattgagatactccatggggaccttcaaggattaacagatacagtggactttttgaagagcttatctgaacttaatggaaatgatttgaagagccctaagaagcaagacctagagagaactgctgcatctgttctttttgactgggagacagaaatatatgtagcaagggcacctggacgtttggacgtcatgggtggcattgctgattattcagggagtcttgttttgcagatgcctcttcgggaagcttgccatgttgctgttcagagaaaccatcccagcaagcagaagctttggaaacatacaaaagcaagacagcttgttaacggaggcttggtacctgtgatacaaattgtatcatttggttctgatttgagtaaccgtgcaccaacttttgatatggacctgtcagattttatggatgatggtaaaccaatatcctatgagaaagccagggagcttttctgtcaggatccatcccaaaaatgggctgcctatgttgctggaacaattctagttttgatgactgaacttggtgcccagttcactgacagcattagcattctggtttcatctgccgtgccagaaggaaaaggtgtttcatcttctgcatcagtggaggttgctacaatgtctgctatcgccgcagcctatggtttaaacatcataccaagggatcttgctttgctttgtcagaaggttgagaatcatgtagttggagctccttgtggagtaatggatcaaatggcatctgcgtgtggagaagctaacaaactccttgcgatggtttgccagcctgccgaagtgaaggaattggttagcatacctactcatatacggttctggggtctagattcagggatacggcatagtgttggcgggggagattatggatctgtgagggtaggcacttacatgggacgaaagatgatcaagtgtacagcatcagatttagtttcagaatccttgacttcagggtcccctgctcagtctgattgttataaagaaaatggtgtgggcgtactgaaatctgaagctgcactggagtatttgtgcaacctaccacctcacagatatgaagctgtttatgcaaaagacattccagaggtgattagtggagaagcattttcagagaaatatggagatcacgatgacacagtgacagttattgatcctaaaagatcttacagtgtgaaggctcctactagacatcccatatatgagaacttccgtgtcgaggccttcaaaacgttattagaggcaggtaatacagacgagcagctgtcagcccttggagaacttatgtaccagtgccacaacagctacagcgcatgtggcctcggttctgatgggactgacagactagtcaacctggtacgagaagtgcaacacaggaggacatccgaaggcggaagccctagtctgtttggcgcaaagatcaccggcggaggctccggcggcacagtatgtgttgttgggaagaactgcgccaggagcagtgaagagattgcagagattcagcacagatacaaggctgagaccgggtatctgcccattcttttcgacgggtcgtctccaggagctgggaagtttggttacctgaagatccgacgtcgttgtccctagtggctgattgggaaacgaagaacttcagttcgagctttgtcacatatcactcaattgttaagaacctcactccaactctccaagccattgtagaacatagaggcgtattgccacttgcgatgattcgtcgttcacacacaaaatattatcatgtgctacaccaattctggaagctactagaggaaaatgtgaggaatataaagaaactcttgttgagcagatgtagtctagtggtctccgtgtgcttgctgcagtgtaaccaaactccaagtagatgtgctctgggctctggcatgtggtatgtgatgaagtcgaggatggtttcttgccgtttgatgaccagtgtagtcgttggttaacttgtcagtcgtaaactgatgttgtcagttaggagcggataaagtttgtgtgtgttgtcagtgtatctgtgtgtaagtttattggacagaccgaaagatacaccacgaacccagatgaagtaggtaatagtcgtatgtgaagtttttatcattagggttgcaaatgcattaaatcacttataaatatatgatgattataaacttcctctgcatttatttcc

SEQ ID NO: 49022 - DNA, 3693 bp, Zea Mays
gcgagttagacaggtagactactcggggtcggggcagccaaggccaggtgggtcccccgaactcactcacggtcacggcaaccgccgccgcgacgccatcaacggcatcatcccatttccacttggatcccaacttcccaagccacctctgcttctcctccgtctcgtcgtcggccatgacacccgccggtggcgccaaccactccccggcgccgcgtagcctggtattcgccttctacctcaccggccatggcttcggccacgccacccgcgccatcgaggtggtgcggcacctgatcgcggacgggcacgaggtgcacgtggcgacggccgtgccggagttcgtcttcaccgccgaggtgcggtccccgcgcctccgcatccgcagggttatcctcgactgcggcgccgtccaggcagatgccctcaccgtcgaccctctcgccacgctggataagtaccgtgaggcggcagtgttaccccgcgagttcatcctcagggccgaggctgagtggcttagctccatcaaggcagaccttgtggtctcggatgttgttcctattgtgtgcaaggtggcttcagatctgggtgtccgctctgtatgcattgggaattttagttgggacttcatatatgctgaatacatcatggaggctggatatcatcaccgatctattgtgtggcagatagcagaggattactcccattgtgacatattacttcgactacctggatatggcccaatgccggcttttcgcaacgtcattgatgtgcctcttgtggttagaggattacgcaaatctagatctgaggtgaggaaggaactaggaattgaggagaatgctaaggtgctcgtttttaattttgggggtcagccagcaggatggaaactgaagcaagaatgtctccctgatggttggatttgtttggtctgtggtgcctctgattctcaagatgttccaccgaacttcattaagcttgcgaaagatgcttacacacctgatgttatggcagcatctgactgaaaaattggatatggaactgcaagtgaggctttggcctgcaagctaccattagtgtttgttcgcagagattacttcaacgaagagccatttttgcgaaatttgcttgagcactaccaaaacagcattgagatggtcagaagtgatttccttgctggacactggaaaccgtacctacttcgtgctctcacacttcaaccatgctacaatggcccaataaatggtggtgaggtggtttcccagattctccaggacactgctattggaaacaaatgtatttctgataaagctagtggtgcaagaagattgcaagatgccatggtctcaggatatgtacttcaaagggttcctgggagagatgcaggcattcctgactggtactctgtgtccgaaaccaaaactggtggcggtccgacctcacaaaatgttgctacaaaggaaagtgcagcattatgtattgaagacattgagatactccatggggaccttcaaggattaacagatacagtggactttttgaagagcttatctgaacttaatggaaatgatttgaagagccctaagaagcaagacctagagagaactgctgcatctgttctttttgactgggagacagaaatatatgtagcaagggcacctggacgtttggacgtcatgggtggcattgctgattattcagggagtcttgttttgcagatgcctcttcgggaagcttgccatgttgctgttcagagaaaccatcccagcaagcagaagctttggaaacatacaaaagcaagacagcttgttaacggaggcttggtacctgtgatacaaattgtatcatttggttctgatttgagtaaccgtgcaccaacttttgatatggacctgtcagattttatggatgatggtaaaccaatatcctatgagaaagccagggagcttttctgtcaggatccatcccaaaaatgggctgcctatgttgctggaacaattctagttttgatgactgaacttggtgcccagttcactgacagcattagcattctggtttcatctgccgtgccagaaggaaaaggtgtttcatcttctgcatcagtggaggttgctacaatgtctgctatcgccgcagcctatggtttaaacatcataccaagggatcttgctttgctttgtcagaaggttgagaatcatgtagttggagctccttgtggagtaatggatcaaatggcatctgcgtgtggagaagctaacaaactccttgcgatggtttgccagcctgccgaagtgaaggaattggttagcatacctactcatatacggttctggggtctagattcagggatacggcatagtgttggcgggggagattatggatctgtgagggtaggcacttacatgggacgaaagatgatcaagtgtacagcatcagatttagtttcagaatccttgacttcagggtcccctgctcagtctgattgttataaagaaaatggtgtgggcgtactgaaatctgaagctgcactggagtatttgtgcaacctaccacctcacagatatgaagctgtttatgcaaaagacattccagaggtgattagtggagaagcattttcagagaaatatggagatcacgatgacacagtgacagttattgatcctaaaagatcttacagtgtgaaggctcctactagacatcccatatatgagaacttccgtgtcgaggccttcaaaacgttattagaggcaggtaatacagacgagcagctgtcagcccttggagaacttatgtaccagtgccacaacagctacagcgcatgtggcctcggttctgatgggactgacagactagtcaacctggtacgagaagtgcaacacaggaggacatccgaaggcggaagccctagtctgtttggcgcaaagatcaccggcggaggctccggcggcacagtatgtgttgttgggaagaactgcgccaggagcagtgaagagattgcagagattcagcacagatacaaggctgagaccgggtatctgcccattcttttcgacgggtcgtctccaggagctgggaagtttggttacctgaagatccgacgtcgttgtccctagtggctgattgggaaacgaagaacttcagttcgagctttgtcacatatcactcaattgttaagaacctcactccaactctccaagccattgtagaacatagaggcgtattgccacttgcgatgattcgtcgttcacacacaaaatattatcatgtgctacaccaattctggaagctactagaggaaaatgtgaggaatataaagaaactcttgttgagcagatgtagtctagtggtctccgtgtgcttgctgcagtgtaaccaaactccaagtagatgtgctctgggctctggcatgtggtatgtgatgaagtcgaggatggtttcttgccgtttgatgaccagtgtagtcgttggttaacttgtcagtcgtaaactgatgttgtcagttaggagcggataaagtttgtgtgtgttgtcagtgtatctgtgtgtaagtttattggacagaccgaaagatacaccacgaacccagatgaagtaggtaatagtcgtatgtgaagtttttatcattagggttgcaaatgcattaaatcacttataaatatatgatgattataaacttcctctgcatttatttcc

SEQ ID NO: 49023 - DNA, 3831 bp, Zea Mays
ggcagccaaggccaggtgggtcccccgaactcactcacggtcacggcaaccgccgccgcgacgccatcaacggcatcatcccatttccacttggatcccaacttcccaagccacctctgcttctcctccgtctcgtcgtcggccatgacacccgccggtggcgccaaccactccccggcgccgcgtagcctggtattcgccttctacctcaccggccatggcttcggccacgccacccgcgccatcgaggtggtgcggcacctgatcgcggacgggcacgaggtgcacgtggcgacggccgtgccggagttcgtcttcaccgccgaggtgcggtccccgcgcctccgcatccgcagggttatcctcgactgcggcgccgtccaggcagatgccctcaccgtcgaccctctcgccacgctggataagtaccgtgaggcggcagtgttaccccgcgagttcatcctcagggccgaggctgagtggcttagctccatcaaggcagaccttgtggtctcggatgttgttcctattgtgtgcaaggtggcttcagatctgggtgtccgctctgtatgcattgggaattttagttgggacttcatatatgctgaatacatcatggaggctggatatcatcaccgatctattgtgtggcagatagcagaggattactcccattgtgacatattacttcgactacctggatatggcccaatgccggcttttcgcaacgtcattgatgtgcctcttgtggttagaggattacgcaaatctagatctgaggtttgtattctgctggagaacggtattctgccttgacaaaattctttgttccttattcacatgtttcagttgtgatctattaggtgaggaaggaactaggaattgaggagaatgctaaggtgctcgtttttaattttgggggtcaggatggaaactgaagcaagaatgtctccctgatggttggatttgtttggtctgtggtgcctctgattctcaagatgttccaccgaacttcattaagcttgcgaaagatgcttacacacctgatgttatggcagcatctgactgtatgcttggaaaaattggatatggaactgcaagtgaggctttggcctgcaagctaccattagtgtttgttcgcagagattacttcaacgaagagccatttttgcgaaatttgcttgagcactaccaaaacagcattgagatggtcagaagtgatttccttgctggacactggaaaccgtacctacttcgtgctctcacacttcaaccatgctacaatggcccaataaatggtggtgaggtggtttcccagattctccaggacactgctattggaaacaaatgtatttctgataaagctagtggtgcaagaagattgcaagatgccatggtctcaggatatgtacttcaaagggttcctgggagagatgcaggcattcctgactggtactctgtgtccgaaaccaaaactggtggcggtccgacctcacaaaatgttgctacaaaggaaagtgcagcattatgtattgaagacattgagatactccatggggaccttcaaggattaacagatacagtggactttttgaagagcttatctgaacttaatggaaatgatttgaagagccctaagaagcaagacctagagagaactgctgcatctgttctttttgactgggagacagaaatatatgtagcaagggcacctggacgtttggacgtcatgggtggcattgctgattattcagggagtcttgttttgcagatgcctcttcgggaagcttgccatgttgctgttcagagaaaccatcccagcaagcagaagctttggaaacatacaaaagcaagacagcttgttaacggaggcttggtacctgtgatacaaattgtatcatttggttctgatttgagtaaccgtgcaccaacttttgatatggacctgtcagattttatggatgatggtaaaccaatatcctatgagaaagccagggagcttttctgtcaggatccatcccaaaagtatgaaaacaagtttttattccagtacaaaatttcaactactgaatatgtttgcatatttgcgatctcaactatcctatctcagatgggctgcctatgttgctggaacaattctagttttgatgactgaacttggtgcccagttcactgacagcattagcattctggtttcatctgccgtgccagaaggaaaaggtgtttcatcttctgcatcagtggaggttgctacaatgtctgctatcgccgcagcctatggtttaaacatcataccaagggatcttgctttgctttgtcagaaggttgagaatcatgtagttggagctccttgtggagtaatggatcaaatggcatctgcgtgtggagaagctaacaaactccttgcgatggtttgccagcctgccgaagtgaaggaattggttagcatacctactcatatacggttctggggtctagattcagggatacggcatagtgttggcgggggagattatggatctgtgagggtaggcacttacatgggacgaaagatgatcaagtgtacagcatcagatttagtttcagaatccttgacttcagggtcccctgctcagtctgattgttataaagaaaatggtgtgggcgtactgaaatctgaagctgcactggagtatttgtgcaacctaccacctcacagatatgaagctgtttatgcaaaagacattccagaggtgattagtggagaagcattttcagagaaatatggagatcacgatgacacagtgacagttattgatcctaaaagatcttacagtgtgaaggctcctactagacatcccatatatgagaacttccgtgtcgaggccttcaaaacgttattagaggcaggtaatacagacgagcagctgtcagcccttggagaacttatgtaccagtgccacaacagctacagcgcatgtggcctcggttctgatgggactgacagactagtcaacctggtacgagaagtgcaacacaggaggacatccgaaggcggaagccctagtctgtttggcgcaaagatcaccggcggaggctccggcggcacagtatgtgttgttgggaagaactgcgccaggagcagtgaagagattgcagagattcagcacagatacaaggctgagaccgggtatctgcccattcttttcgacgggtcgtctccaggagctgggaagtttggttacctgaagatccgacgtcgttgtccctagtggctgattgggaaacgaagaacttcagttcgagctttgtcacatatcactcaattgttaagaacctcactccaactctccaagccattgtagaacatagaggcgtattgccacttgcgatgattcgtcgttcacacacaaaatattatcatgtgctacaccaattctggaagctactagaggaaaatgtgaggaatataaagaaactcttgttgagcagatgtagtctagtggtctccgtgtgcttgctgcagtgtaaccaaactccaagtagatgtgctctgggctctggcatgtggtatgtgatgaagtcgaggatggtttcttgccgtttgatgaccagtgtagtcgttggttaacttgtcagtcgtaaactgatgttgtcagttaggagcggataaagtttgtgtgtgttgtcagtgtatctgtgtgtaagtttattggacagaccgaaagatacaccacgaacccagatgaagtaggtaatagtcgtatgtgaagtttttatcattagggttgcaaatgcattaaatcacttataaatatatgatgattataaacttcctctgcatttatttcc

SEQ ID NO: 49024 - DNA, 4314 bp, Zea Mays
gccaaggccaggtgggtcccccgaactcactcacggtcacggcaaccgccgccgcgacgccatcaacggcatcatcccatttccacttggatcccaacttcccaagccacctctgcttctcctccgtctcgtcgtcggccatgacacccgccggtggcgccaaccactccccggcgccgcgtagcctggtattcgccttctacctcaccggccatggcttcggccacgccacccgcgccatcgaggtggtgcggcacctgatcgcggacgggcacgaggtgcacgtggcgacggccgtgccggagttcgtcttcaccgccgaggtgcggtccccgcgcctccgcatccgcagggttatcctcgactgcggcgccgtccaggcagatgccctcaccgtcgaccctctcgccacgctggataagtaccgtgaggcggcagtgttaccccgcgagttcatcctcagggccgaggctgagtggcttagctccatcaaggcagaccttgtggtctcggatgttgttcctattgtgtgcaaggtggcttcagatctgggtgtccgctctgtatgcattgggaattttagttgggacttcatatatgctgaatacatcatggaggctggatatcatcaccgatctattgtgtggcagatagcagaggattactcccattgtgacatattacttcgactacctggatatggcccaatgccggcttttcgcaacgtcattgatgtgcctcttgtggttagaggattacgcaaatctagatctgaggtgaggaaggaactaggaattgaggagaatgctaaggtgctcgtttttaattttgggggtcaggtgggtcacttgtcatataggtggtttggtaagcttatggaatatgtttctattttctcatgtggtaatgttatgtggctattttaatgtgcttacagccctatttggcacagcttatttcacagtttctttaagcagaagttgtattatacagtaaacttctgcagtagcttatcagttcagctacttctcaaaatgaactaaaaacagacaatacacaaaagttgcttttcgccagcttcccagataaactgcttttccaacaagcaacagctaccaaatagggcctatcgtttcttctgcaccgatatctgctgattctgattctttcagtaatcacagccttttttgtaacgaagtggtgcttattacctattatttaaatcaaaagtgatgccttttcaattacttggaagtattatggttagctattacccagatactgcattttgtaatgaagtccctgcaatacttgaataattatcattatacctcctagtttttagcagaacacatcatcattaaattttgtatgtatcatgcttccttcaaaagcttagcgatccattcttctatcctgtatgctctaaactttttgtgaactacacaaaacttatcaccaacataataaaataatcagtgcgtcatggttcccagccagcaggatggaaactgaagcaagaatgtctccctgatggttggatttgtttggtctgtggtgcctctgattctcaagatgttccaccgaacttcattaagcttgcgaaagatgcttacacacctgatgttatggcagcatctgactgaaaaattggatatggaactgcaagtgaggctttggcctgcaagctaccattagtgtttgttcgcagagattacttcaacgaagagccatttttgcgaaatttgcttgagcactaccaaaacagcattgagatggtcagaagtgatttccttgctggacactggaaaccgtacctacttcgtgctctcacacttcaaccatgctacaatggcccaataaatggtggtgaggtggtttcccagattctccaggacactgctattggaaacaaatgtatttctgataaagctagtggtgcaagaagattgcaagatgccatggtctcaggatatgtacttcaaagggttcctgggagagatgcaggcattcctgactggtactctgtgtccgaaaccaaaactggtggcggtccgacctcacaaaatgttgctacaaaggaaagtgcagcattatgtattgaagacattgagatactccatggggaccttcaaggattaacagatacagtggactttttgaagagcttatctgaacttaatggaaatgatttgaagagccctaagaagcaagacctagagagaactgctgcatctgttctttttgactgggagacagaaatatatgtagcaagggcacctggacgtttggacgtcatgggtggcattgctgattattcagggagtcttgttttgcagatgcctcttcgggaagcttgccatgttgctgttcagagaaaccatcccagcaagcagaagctttggaaacatacaaaagcaagacagcttgttaacggaggcttggtacctgtgatacaaattgtatcatttggttctgatttgagtaaccgtgcaccaacttttgatatggacctgtcagattttatggatgatggtaaaccaatatcctatgagaaagccagggagcttttctgtcaggatccatcccaaaaatgggctgcctatgttgctggaacaattctagttttgatgactgaacttggtgcccagttcactgacagcattagcattctggtttcatctgccgtgccagaaggaaaaggtgtttcatcttctgcatcagtggaggttgctacaatgtctgctatcgccgcagcctatggtttaaacatcataccaagggatcttgctttgctttgtcagaaggttgagaatcatgtagttggagctccttgtggagtaatggatcaaatggcatctgcgtgtggagaagctaacaaactccttgcgatggtttgccagcctgccgaagtgaaggaattggttagcatacctactcatatacggttctggggtctagattcagggatacggcatagtgttggcgggggagattatggatctgtgagggtaggcacttacatgggacgaaagatgatcaagtgtacagcatcagatttagtttcagaatccttgacttcagggtcccctgctcagtctgattgttataaagaaaatggtgtgggcgtactgaaatctgaagctgcactggagtatttgtgcaacctaccacctcacagatatgaagctgtttatgcaaaagacattccagaggtgattagtggagaagcattttcagagaaatatggagatcacgatgacacagtgacagttattgatcctaaaagatcttacagtgtgaaggctcctactagacatcccatatatgagaacttccgtgtcgaggccttcaaaacgttattagaggcaggtaatacagacgagcagctgtcagcccttggagaacttatgtaccagtgccacaacagctacagcgcatgtggcctcggttctgatgggactgacagactagtcaacctggtacgagaagtgcaacacaggaggacatccgaaggcggaagccctagtctgtttggcgcaaagatcaccggcggaggctccggcggcacagtatgtgttgttgggaagaactgcgccaggagcagtgaagagattgcagagattcagcacagatacaaggctgagaccgggtatctgcccattcttttcgacgggtcgtctccaggagctgggaagtttggttacctgaagatccgacgtcgttgtccctagtggctgattgggaaacgaagaacttcagttcgagctttgtcacatatcactcaattgttaagaacctcactccaactctccaagccattgtagaacatagaggcgtattgccacttgcgatgattcgtcgttcacacacaaaatattatcatgtgctacaccaattctggaagctactagaggaaaatgtgaggaatataaagaaactcttgttgagcagatgtagtctagtggtctccgtgtgcttgctgcagtgtaaccaaactccaagtagatgtgctctgggctctggcatgtggtatgtgatgaagtcgaggatggtttcttgccgtttgatgaccagtgtagtcgttggttaacttgtcagtcgtaaactgatgttgtcagttaggagcggataaagtttgtgtgtgttgtcagtgtatctgtgtgtaagtttattggacagaccgaaagatacaccacgaacccagatgaagtaggtaatagtcgtatgtgaagtttttatcattagggttgcaaatgcattaaatcacttataaatatatgatgattataaacttcctctgcatttatttcc

SEQ ID NO: 49025 - DNA, 4323 bp, Zea Mays
ctcactcacggtcacggcaaccgccgccgcgacgccatcaacggcatcatcccatttccacttggatcccaacttcccaagccacctctgcttctcctccgtctcgtcgtcggccatgacacccgccggtggcgccaaccactccccggcgccgcgtagcctggtattcgccttctacctcaccggccatggcttcggccacgccacccgcgccatcgaggtggtgcggcacctgatcgcggacgggcacgaggtgcacgtggcgacggccgtgccggagttcgtcttcaccgccgaggtgcggtccccgcgcctccgcatccgcagggttatcctcgactgcggcgccgtccaggcagatgccctcaccgtcgaccctctcgccacgctggataagtaccgtgaggcggcagtgttaccccgcgagttcatcctcagggccgaggctgagtggcttagctccatcaaggcagaccttgtggtctcggatgttgttcctattgtgtgcaaggtggcttcagatctgggtgtccgctctgtatgcattgggaattttagttgggacttcatatatgctgaatacatcatggaggctggatatcatcaccgatctattgtgtggcagatagcagaggattactcccattgtgacatattacttcgactacctggatatggcccaagtatactcaactatatttggttactcttttttccttaaaaattgtgttccctgtttctcagttatcatgaaaatagagtattatttcattccatagtgccggcttttcgcaacgtcattgatgtgcctcttgtggttagaggattacgcaaatctagatctgaggtgaggaaggaactaggaattgaggagaatgctaaggtgctcgtttttaattttgggggtcaggtgggtcacttgtcatataggtggtttggtaagcttatggaatatgtttctattttctcatgtggtaatgttatgtggctattttaatgtgcttacagccctatttggcacagcttatttcacagtttctttaagcagaagttgtattatacagtaaacttctgcagtagcttatcagttcagctacttctcaaaatgaactaaaaacagacaatacacaaaagttgcttttcgccagcttcccagataaactgcttttccaacaagcaacagctaccaaatagggcctatcgtttcttctgcaccgatatctgctgattctgattctttcagtaatcacagccttttttgtaacgaagtggtgcttattacctattatttaaatcaaaagtgatgccttttcaattacttggaagtattatggttagctattacccagatactgcattttgtaatgaagtccctgcaatacttgaataattatcattatacctcctagtttttagcagaacacatcatcattaaattttgtatgtatcatgcttccttcaaaagcttagcgatccattcttctatcctgtatgctctaaactttttgtgaactacacaaaacttatcaccaacataataaaataatcagtgcgtcatggttcccagccagcaggatggaaactgaagcaagaatgtctccctgatggttggatttgtttggtctgtggtgcctctgattctcaagatgttccaccgaacttcattaagcttgcgaaagatgcttacacacctgatgttatggcagcatctgactgaaaaattggatatggaactgcaagtgaggctttggcctgcaagctaccattagtgtttgttcgcagagattacttcaacgaagagccatttttgcgaaatttgcttgagcactaccaaaacagcattgagatggtcagaagtgatttccttgctggacactggaaaccgtacctacttcgtgctctcacacttcaaccatgctacaatggcccaataaatggtggtgaggtggtttcccagattctccaggacactgctattggaaacaaatgtatttctgataaagctagtggtgcaagaagattgcaagatgccatggtctcaggatatgtacttcaaagggttcctgggagagatgcaggcattcctgactggtactctgtgtccgaaaccaaaactggtggcggtccgacctcacaaaatgttgctacaaaggaaagtgcagcattatgtattgaagacattgagatactccatggggaccttcaaggattaacagatacagtggactttttgaagagcttatctgaacttaatggaaatgatttgaagagccctaagaagcaagacctagagagaactgctgcatctgttctttttgactgggagaaatatatgtagcaagggcacctggacgtttggacgtcatgggtggcattgctgattattcagggagtcttgttttgcagatgcctcttcgggaagcttgccatgttgctgttcagagaaaccatcccagcaagcagaagctttggaaacatacaaaagcaagacagcttgttaacggaggcttggtacctgtgatacaaattattttatggatgatggtaaaccaatatcctatgagaaagccagggagcttttctgtcaggatccatcccaaaaatgggctgcctatgttgctggaacaattctagttttgatgactgaacttggtgcccagttcactgacagcattagcattctggtttcatctgccgtgccagaaggaaaaggtgtttcatcttctgcatcagtggaggttgctacaatgtctgctatcgccgcagcctatggtttaaacatcataccaagggatcttgctttgctttgtcagaaggttgagaatcatgtagttggagctccttgtggagtaatggatcaaatggcatctgcgtgtggagaagctaacaaactccttgcgatggtttgccagcctgccgaagtgaaggaattggttagcatacctactcatatacggttctggggtctagattcagggatacggcatagtgttggcgggggagattatggatctgtgagggtaggcacttacatgggacgaaagatgatcaagtgtacagcatcagatttagtttcagaatccttgacttcagggtcccctgctcagtctgattgttataaagaaaatggtgtgggcgtactgaaatctgaagctgcactggagtatttgtgcaacctaccacctcacagatatgaagctgtttatgcaaaagacattccagaggtgattagtggagaagcattttcagagaaatatggagatcacgatgacacagtgacagttattgatcctaaaagatcttacagtgtgaaggctcctactagacatcccatatatgagaacttccgtgtcgaggccttcaaaacgttattagaggcaggtaatacagacgagcagctgtcagcccttggagaacttatgtaccagtgccacaacagctacagcgcatgtggcctcggttctgatgggactgacagactagtcaacctggtacgagaagtgcaacacaggaggacatccgaaggcggaagccctagtctgtttggcgcaaagatcaccggcggaggctccggcggcacagtatgtgttgttgggaagaactgcgccaggagcagtgaagagattgcagagattcagcacagatacaaggctgagaccgggtatctgcccattcttttcgacgggtcgtctccaggagctgggaagtttggttacctgaagatccgacgtcgttgtccctagtggctgattgggaaacgaagaacttcagttcgagctttgtcacatatcactcaattgttaagaacctcactccaactctccaagccattgtagaacatagaggcgtattgccacttgcgatgattcgtcgttcacacacaaaatattatcatgtgctacaccaattctggaagctactagaggaaaatgtgaggaatataaagaaactcttgttgagcagatgtagtctagtggtctccgtgtgcttgctgcagtgtaaccaaactccaagtagatgtgctctgggctctggcatgtggtatgtgatgaagtcgaggatggtttcttgccgtttgatgaccagtgtagtcgttggttaacttgtcagtcgtaaactgatgttgtcagttaggagcggataaagtttgtgtgtgttgtcagtgtatctgtgtgtaagtttattggacagaccgaaagatacaccacgaacccagatgaagtaggtaatagtcgtatgtgaagtttttatcattagggttgcaaatgcattaaatcacttataaatatatgatgattataaacttcctctgcatttatttcc

SEQ ID NO: 49026 - DNA, 3654 bp, Zea Mays
ctcacggtcacggcaaccgccgccgcgacgccatcaacggcatcatcccatttccacttggatcccaacttcccaagccacctctgcttctcctccgtctcgtcgtcggccatgacacccgccggtggcgccaaccactccccggcgccgcgtagcctggtattcgccttctacctcaccggccatggcttcggccacgccacccgcgccatcgaggtggtgcggcacctgatcgcggacgggcacgaggtgcacgtggcgacggccgtgccggagttcgtcttcaccgccgaggtgcggtccccgcgcctccgcatccgcagggttatcctcgactgcggcgccgtccaggcagatgccctcaccgtcgaccctctcgccacgctggataagtaccgtgaggcggcagtgttaccccgcgagttcatcctcagggccgaggctgagtggcttagctccatcaaggcagaccttgtggtctcggatgttgttcctattgtgtgcaaggtggcttcagatctgggtgtccgctctgtatgcattgggaattttagttgggacttcatatatgctgaatacatcatggaggctggatatcatcaccgatctattgtgtggcagatagcagaggattactcccattgtgacatattacttcgactacctggatatggcccaatgccggcttttcgcaacgtcattgatgtgcctcttgtggttagaggattacgcaaatctagatctgaggtgaggaaggaactaggaattgaggagaatgctaaggtgctcgtttttaattttgggggtcagtgcgtcatggttcccagccagcaggatggaaactgaagcaagaatgtctccctgatggttggatttgtttggtctgtggtgcctctgattctcaagatgttccaccgaacttcattaagcttgcgaaagatgcttacacacctgatgttatggcagcatctgactgtatgcttggaaaaattggatatggaactgcaagtgaggctttggcctgcaagctaccattagtgtttgttcgcagagattacttcaacgaagagccatttttgcgaaatttgcttgagcactaccaaaacagcattgagatggtcagaagtgatttccttgctggacactggaaaccgtacctacttcgtgctctcacacttcaaccatgctacaatggcccaataaatggtggtgaggtggtttcccagattctccaggacactgctattggaaacaaatgtatttctgataaagctagtggtgcaagaagattgcaagatgccatggtctcaggatatgtacttcaaagggttcctgggagagatgcaggcattcctgactggtactctgtgtccgaaaccaaaactggtggcggtccgacctcacaaaatgttgctacaaaggaaagtgcagcattatgtattgaagacattgagatactccatggggaccttcaaggattaacagatacagtggactttttgaagagcttatctgaacttaatggaaatgatttgaagagccctaagaagcaagacctagagagaactgctgcatctgttctttttgactgggagacagaaatatatgtagcaagggcacctggacgtttggacgtcatgggtggcattgctgattattcagggagtcttgttttgcagatgcctcttcgggaagcttgccatgttgctgttcagagaaaccatcccagcaagcagaagctttggaaacatacaaaagcaagacagcttgttaacggaggcttggtacctgtgatacaaattgtatcatttggttctgatttgagtaaccgtgcaccaacttttgatatggacctgtcagattttatggatgatggtaaaccaatatcctatgagaaagccagggagcttttctgtcaggatccatcccaaaaatgggctgcctatgttgctggaacaattctagttttgatgactgaacttggtgcccagttcactgacagcattagcattctggtttcatctgccgtgccagaaggaaaaggtgtttcatcttctgcatcagtggaggttgctacaatgtctgctatcgccgcagcctatggtttaaacatcataccaagggatcttgctttgctttgtcagaaggttgagaatcatgtagttggagctccttgtggagtaatggatcaaatggcatctgcgtgtggagaagctaacaaactccttgcgatggtttgccagcctgccgaagtgaaggaattggttagcatacctactcatatacggttctggggtctagattcagggatacggcatagtgttggcgggggagattatggatctgtgagggtaggcacttacatgggacgaaagatgatcaagtgtacagcatcagatttagtttcagaatccttgacttcagggtcccctgctcagtctgattgttataaagaaaatggtgtgggcgtactgaaatctgaagctgcactggagtatttgtgcaacctaccacctcacagatatgaagctgtttatgcaaaagacattccagaggtgattagtggagaagcattttcagagaaatatggagatcacgatgacacagtgacagttattgatcctaaaagatcttacagtgtgaaggctcctactagacatcccatatatgagaacttccgtgtcgaggccttcaaaacgttattagaggcaggtaatacagacgagcagctgtcagcccttggagaacttatgtaccagtgccacaacagctacagcgcatgtggcctcggttctgatgggactgacagactagtcaacctggtacgagaagtgcaacacaggaggacatccgaaggcggaagccctagtctgtttggcgcaaagatcaccggcggaggctccggcggcacagtatgtgttgttgggaagaactgcgccaggagcagtgaagagattgcagagattcagcacagatacaaggctgagaccgggtatctgcccattcttttcgacgggtcgtctccaggagctgggaagtttggttacctgaagatccgacgtcgttgtccctagtggctgattgggaaacgaagaacttcagttcgagctttgtcacatatcactcaattgttaagaacctcactccaactctccaagccattgtagaacatagaggcgtattgccacttgcgatgattcgtcgttcacacacaaaatattatcatgtgctacaccaattctggaagctactagaggaaaatgtgaggaatataaagaaactcttgttgagcagatgtagtctagtggtctccgtgtgcttgctgcagtgtaaccaaactccaagtagatgtgctctgggctctggcatgtggtatgtgatgaagtcgaggatggtttcttgccgtttgatgaccagtgtagtcgttggttaacttgtcagtcgtaaactgatgttgtcagttaggagcggataaagtttgtgtgtgttgtcagtgtatctgtgtgtaagtttattggacagaccgaaagatacaccacgaacccagatgaagtaggtaatagtcgtatgtgaagtttttatcattagggttgcaaatgcattaaatcacttataaatatatgatgattataaacttcctctgcatttatttcc

SEQ ID NO: 49027 - DNA, 3701 bp, Zea Mays
atttccacttggatcccaacttcccaagccacctctgcttctcctccgtctcgtcgtcggccatgacacccgccggtggcgccaaccactccccggcgccgcgtagcctggtattcgccttctacctcaccggccatggcttcggccacgccacccgcgccatcgaggtggtgcggcacctgatcgcggacgggcacgaggtgcacgtggcgacggccgtgccggagttcgtcttcaccgccgaggtgcggtccccgcgcctccgcatccgcagggttatcctcgactgcggcgccgtccaggcagatgccctcaccgtcgaccctctcgccacgctggataagtaccgtgaggcggcagtgttaccccgcgagttcatcctcagggccgaggctgagtggcttagctccatcaaggcagaccttgtggtctcggatgttgttcctattgtgtgcaaggtggcttcagatctgggtgtccgctctgtatgcattgggaattttagttgggacttcatatatgctgaatacatcatggaggctggatatcatcaccgatctattgtgtggcagatagcagaggattactcccattgtgacatattacttcgactacctggatatggcccaagtatactcaactatatttggttactcttttttccttaaaaattgtgttccctgtttctcagttatcatgaaaatagagtattatttcattccatagtgccggcttttcgcaacgtcattgatgtgcctcttgtggttagaggattacgcaaatctagatctgaggtgaggaaggaactaggaattgaggagaatgctaaggtgctcgtttttaattttgggggtcagccagcaggatggaaactgaagcaagaatgtctccctgatggttggatttgtttgctccctcttcatggaaggtctgtggtgcctctgattctcaagatgttccaccgaacttcattaagcttgcgaaagatgcttacacacctgatgttatggcagcatctgactgtatgcttggaaaaattggatatggaactgcaagtgaggctttggcctgcaagctaccattagtgtttgttcgcagagattacttcaacgaagagccatttttgcgaaatttgcttgagcactaccaaaacagcattgagatggtcagaagtgatttccttgctggacactggaaaccgtacctacttcgtgctctcacacttcaaccatgctacaatggcccaataaatggtggtgaggtggtttcccagattctccaggacactgctattggaaacaaatgtatttctgataaagctagtggtgcaagaagattgcaagatgccatggtctcaggatatgtacttcaaagggttcctgggagagatgcaggcattcctgactggtactctgtgtccgaaaccaaaactggtggcggtccgacctcacaaaatgttgctacaaaggaaagtgcagcattatgtattgaagacattgagatactccatggggaccttcaaggattaacagatacagtggactttttgaagagcttatctgaacttaatggaaatgatttgaagagccctaagaagcaagacctagagagaactgctgcatctgttctttttgactgggagacagaaatatatgtagcaagggcacctggacgtttggacgtcatgggtggcattgctgattattcagggagtcttgttttgcagatgcctcttcgggaagcttgccatgttgctgttcagagaaaccatcccagcaagcagaagctttggaaacatacaaaagcaagacagcttgttaacggaggcttggtacctgtgatacaaattgtatcatttggttctgatttgagtaaccgtgcaccaacttttgatatggacctgtcagattttatggatgatggtaaaccaatatcctatgagaaagccagggagcttttctgtcaggatccatcccaaaaatgggctgcctatgttgctggaacaattctagttttgatgactgaacttggtgcccagttcactgacagcattagcattctggtttcatctgccgtgccagaaggaaaaggtgtttcatcttctgcatcagtggaggttgctacaatgtctgctatcgccgcagcctatggtttaaacatcataccaagggatcttgctttgctttgtcagaaggttgagaatcatgtagttggagctccttgtggagtaatggatcaaatggcatctgcgtgtggagaagctaacaaactccttgcgatggtttgccagcctgccgaagtgaaggaattggttagcatacctactcatatacggttctggggtctagattcagggatacggcatagtgttggcgggggagattatggatctgtgagggtaggcacttacatgggacgaaagatgatcaagtgtacagcatcagatttagtttcagaatccttgacttcagggtcccctgctcagtctgattgttataaagaaaatggtgtgggcgtactgaaatctgaagctgcactggagtatttgtgcaacctaccacctcacagatatgaagctgtttatgcaaaagacattccagaggtgattagtggagaagcattttcagagaaatatggagatcacgatgacacagtgacagttattgatcctaaaagatcttacagtgtgaaggctcctactagacatcccatatatgagaacttccgtgtcgaggccttcaaaacgttattagaggcaggtaatacagacgagcagctgtcagcccttggagaacttatgtaccagtgccacaacagctacagcgcatgtggcctcggttctgatgggactgacagactagtcaacctggtacgagaagtgcaacacaggaggacatccgaaggcggaagccctagtctgtttggcgcaaagatcaccggcggaggctccggcggcacagtatgtgttgttgggaagaactgcgccaggagcagtgaagagattgcagagattcagcacagatacaaggctgagaccgggtatctgcccattcttttcgacgggtcgtctccaggagctgggaagtttggttacctgaagatccgacgtcgttgtccctagtggctgattgggaaacgaagaacttcagttcgagctttgtcacatatcactcaattgttaagaacctcactccaactctccaagccattgtagaacatagaggcgtattgccacttgcgatgattcgtcgttcacacacaaaatattatcatgtgctacaccaattctggaagctactagaggaaaatgtgaggaatataaagaaactcttgttgagcagatgtagtctagtggtctccgtgtgcttgctgcagtgtaaccaaactccaagtagatgtgctctgggctctggcatgtggtatgtgatgaagtcgaggatggtttcttgccgtttgatgaccagtgtagtcgttggttaacttgtcagtcgtaaactgatgttgtcagttaggagcggataaagtttgtgtgtgttgtcagtgtatctgtgtgtaagtttattggacagaccgaaagatacaccacgaacccagatgaagtaggtaatagtcgtatgtgaagtttttatcattagggttgcaaatgcattaaatcacttataaatatatgatgattataaacttcctctgcatttatttcc

SEQ ID NO: 49028 - DNA, 3698 bp, Zea Mays
atttccacttggatcccaacttcccaagccacctctgcttctcctccgtctcgtcgtcggccatgacacccgccggtggcgccaaccactccccggcgccgcgtagcctggtattcgccttctacctcaccggccatggcttcggccacgccacccgcgccatcgaggtggtgcggcacctgatcgcggacgggcacgaggtgcacgtggcgacggccgtgccggagttcgtcttcaccgccgaggtgcggtccccgcgcctccgcatccgcagggttatcctcgactgcggcgccgtccaggcagatgccctcaccgtcgaccctctcgccacgctggataagtaccgtgaggcggcagtgttaccccgcgagttcatcctcagggccgaggctgagtggcttagctccatcaaggcagaccttgtggtctcggatgttgttcctattgtgtgcaaggtggcttcagatctgggtgtccgctctgtatgcattgggaattttagttgggacttcatatatgctgaatacatcatggaggctggatatcatcaccgatctattgtgtggcagatagcagaggattactcccattgtgacatattacttcgactacctggatatggcccaagtatactcaactatatttggttactcttttttccttaaaaattgtgttccctgtttctcagttatcatgaaaatagagtattatttcattccatagtgccggcttttcgcaacgtcattgatgtgcctcttgtggttagaggattacgcaaatctagatctgagttgtgatctattaggtgaggaaggaactaggaattgaggagaatgctaaggtgctcgtttttaattttgggggtcagccagcaggatggaaactgaagcaagaatgtctccctgatggttggatttgtttggtctgtggtgcctctgattctcaagatgttccaccgaacttcattaagcttgcgaaagatgcttacacacctgatgttatggcagcatctgactgtatgcttggaaaaattggatatggaactgcaagtgaggctttggcctgcaagctaccattagtgtttgttcgcagagattacttcaacgaagagccatttttgcgaaatttgcttgagcactaccaaaacagcattgagatggtcagaagtgatttccttgctggacactggaaaccgtacctacttcgtgctctcacacttcaaccatgctacaatggcccaataaatggtggtgaggtggtttcccagattctccaggacactgctattggaaacaaatgtatttctgataaagctagtggtgcaagaagattgcaagatgccatggtctcaggatatgtacttcaaagggttcctgggagagatgcaggcattcctgactggtactctgtgtccgaaaccaaaactggtggcggtccgacctcacaaaatgttgctacaaaggaaagtgcagcattatgtattgaagacattgagatactccatggggaccttcaaggattaacagatacagtggactttttgaagagcttatctgaacttaatggaaatgatttgaagagccctaagaagcaagacctagagagaactgctgcatctgttctttttgactgggagacagaaatatatgtagcaagggcacctggacgtttggacgtcatgggtggcattgctgattattcagggagtcttgttttgcagatgcctcttcgggaagcttgccatgttgctgttcagagaaaccatcccagcaagcagaagctttggaaacatacaaaagcaagacagcttgttaacggaggcttggtacctgtgatacaaattgtatcatttggttctgatttgagtaaccgtgcaccaacttttgatatggacctgtcagattttatggatgatggtaaaccaatatcctatgagaaagccagggagcttttctgtcaggatccatcccaaaaatgggctgcctatgttgctggaacaattctagttttgatgactgaacttggtgcccagttcactgacagcattagcattctggtttcatctgccgtgccagaaggaaaaggtgtttcatcttctgcatcagtggaggttgctacaatgtctgctatcgccgcagcctatggtttaaacatcataccaagggatcttgctttgctttgtcagaaggttgagaatcatgtagttggagctccttgtggagtaatggatcaaatggcatctgcgtgtggagaagctaacaaactccttgcgatggtttgccagcctgccgaagtgaaggaattggttagcatacctactcatatacggttctggggtctagattcagggatacggcatagtgttggcgggggagattatggatctgtgagggtaggcacttacatgggacgaaagatgatcaagtgtacagcatcagatttagtttcagaatccttgacttcagggtcccctgctcagtctgattgttataaagaaaatggtgtgggcgtactgaaatctgaagctgcactggagtatttgtgcaacctaccacctcacagatatgaagctgtttatgcaaaagacattccagaggtgattagtggagaagcattttcagagaaatatggagatcacgatgacacagtgacagttattgatcctaaaagatcttacagtgtgaaggctcctactagacatcccatatatgagaacttccgtgtcgaggccttcaaaacgttattagaggcaggtaatacagacgagcagctgtcagcccttggagaacttatgtaccagtgccacaacagctacagcgcatgtggcctcggttctgatgggactgacagactagtcaacctggtacgagaagtgcaacacaggaggacatccgaaggcggaagccctagtctgtttggcgcaaagatcaccggcggaggctccggcggcacagtatgtgttgttgggaagaactgcgccaggagcagtgaagagattgcagagattcagcacagatacaaggctgagaccgggtatctgcccattcttttcgacgggtcgtctccaggagctgggaagtttggttacctgaagatccgacgtcgttgtccctagtggctgattgggaaacgaagaacttcagttcgagctttgtcacatatcactcaattgttaagaacctcactccaactctccaagccattgtagaacatagaggcgtattgccacttgcgatgattcgtcgttcacacacaaaatattatcatgtgctacaccaattctggaagctactagaggaaaatgtgaggaatataaagaaactcttgttgagcagatgtagtctagtggtctccgtgtgcttgctgcagtgtaaccaaactccaagtagatgtgctctgggctctggcatgtggtatgtgatgaagtcgaggatggtttcttgccgtttgatgaccagtgtagtcgttggttaacttgtcagtcgtaaactgatgttgtcagttaggagcggataaagtttgtgtgtgttgtcagtgtatctgtgtgtaagtttattggacagaccgaaagatacaccacgaacccagatgaagtaggtaatagtcgtatgtgaagtttttatcattagggttgcaaatgcattaaatcacttataaatatatgatgattataaacttcctctgcatttatttcc

SEQ ID NO: 49029 - DNA, 3318 bp, Zea Mays
cccaagccacctctgcttctcctccgtctcgtcgtcggccatgacacccgccggtggcgccaaccactccccggcgccgcgtagcctggtattcgccttctacctcaccggccatggcttcggccacgccacccgcgccatcgaggtggtgcggcacctgatcgcggacgggcacgaggtgcacgtggcgacggccgtgccggagttcgtcttcaccgccgaggtgcggtccccgcgcctccgcatccgcagggttatcctcgactgcggcgccgtccaggcagatgccctcaccgtcgaccctctcgccacgctggataagtaccgtgaggcggcagtgttaccccgcgagttcatcctcagggccgaggctgagtggcttagctccatcaaggcagaccttgtggtctcggatgttgttcctattgtgtgcaaggtggcttcagatctgggtgtccgctctgtatgcattgggaattttagttgggacttcatatatgctgaatacatcatggaggctggatatcatcaccgatctattgtgtggcagatagcagaggattactcccattgtgacatattacttcgactacctggatatggcccaatgccggcttttcgcaacgtcattgatgtgcctcttgtggttagaggattacgcaaatctagatctgaggtgaggaaggaactaggaattgaggagaatgctaaggtgctcgtttttaattttgggggtcagccagcaggatggaaactgaagcaagaatgtctccctgatggttggatttgtttggtctgtggtgcctctgattctcaagatgttccaccgaacttcattaagcttgcgaaagatgcttacacacctgatgttatggcagcatctgactgaaaaattggatatggaactgcaagtgaggctttggcctgcaagctaccattagtgtttgttcgcagagattacttcaacgaagagccatttttgcgaaatttgcttgagcactaccaaaacagcattgagatggtcagaagtgatttccttgctggacactggaaaccgtacctacttcgtgctctcacacttcaaccatgctacaatggcccaataaatggtggtgaggtggtttcccagattctccaggacactgctattggaaacaaatgtatttctgataaagctagtggtgcaagaagattgcaagatgccatggtctcaggatatgtacttcaaagggttcctgggagagatgcaggcattcctgactggtactctgtgtccgaaaccaaaactggtggcggtccgacctcacaaaatgttgctacaaaggaaagtgcagcattatgtattgaagacattgagatactccatggggaccttcaaggattaacagatacagtggactttttgaagagcttatctgaacttaatggaaatgatttgaagagccctaagaagcaagacctagagagaactgctgcatctgttctttttgactgggagacagaaatatatgtagcaagggcacctggacgtttggacgtcatgggtggcattgctgattattcagggagtcttgttttgcagatgcctcttcgggaagcttgccatgttgctgttcagagaaaccatcccagcaagcagaagctttggaaacatacaaaagcaagacagcttgttaacggaggcttggtacctgtgatacaaattattttatggatgatggtaaaccaatatcctatgagaaagccagggagcttttctgtcaggatccatcccaaaaatgggctgcctatgttgctggaacaattctagttttgatgactgaacttggtgcccagttcactgacagcattagcattctggtttcatctgccgtgccagaaggaaaaggtgtttcatcttctgcatcagtggaggttgctacaatgtctgctatcgccgcagcctatggtttaaacatcataccaagggatcttgctttgctttgtcagaaggttgagaatcatgtagttggagctccttgtggagtaatggatcaaatggcatctgcgtgtggagaagctaacaaactccttgcgatggtttgccagggtcccctgctcagtctgattgttataaagaaaatggtgtgggcgtactgaaatctgaagctgcactggagtatttgtgcaacctaccacctcacagatatgaagctgtttatgcaaaagacattccagaggtgattagtggagaagcattttcagagaaatatggagatcacgatgacacagtgacagttattgatcctaaaagatcttacagtgtgaaggctcctactagacatcccatatatgagaacttccgtgtcgaggccttcaaaacgttattagaggcaggtaatacagacgagcagctgtcagcccttggagaacttatgtaccagtgccacaacagctacagcgcatgtggcctcggttctgatgggactgacagactagtcaacctggtacgagaagtgcaacacaggaggacatccgaaggcggaagccctagtctgtttggcgcaaagatcaccggcggaggctccggcggcacagtatgtgttgttgggaagaactgcgccaggagcagtgaagagattgcagagattcagcacagatacaaggctgagaccgggtatctgcccattcttttcgacgggtcgtctccaggagctgggaagtttggttacctgaagatccgacgtcgttgtccctagtggctgattgggaaacgaagaacttcagttcgagctttgtcacatatcactcaattgttaagaacctcactccaactctccaagccattgtagaacatagaggcgtattgccacttgcgatgattcgtcgttcacacacaaaatattatcatgtgctacaccaattctggaagctactagaggaaaatgtgaggaatataaagaaactcttgttgagcagatgtagtctagtggtctccgtgtgcttgctgcagtgtaaccaaactccaagtagatgtgctctgggctctggcatgtggtatgtgatgaagtcgaggatggtttcttgccgtttgatgaccagtgtagtcgttggttaacttgtcagtcgtaaactgatgttgtcagttaggagcggataaagtttgtgtgtgttgtcagtgtatctgtgtgtaagtttattggacagaccgaaagatacaccacgaacccagatgaagtaggtaatagtcgtatgtgaagtttttatcattagggttgcaaatgcattaaatcacttataaatatatgatgattataaacttcctctgcatttatttcc

SEQ ID NO: 49030 - DNA, 4324 bp, Zea Mays
cccaagccacctctgcttctcctccgtctcgtcgtcggccatgacacccgccggtggcgccaaccactccccggcgccgcgtagcctggtattcgccttctacctcaccggccatggcttcggccacgccacccgcgccatcgaggtggtgcggcacctgatcgcggacgggcacgaggtgcacgtggcgacggccgtgccggagttcgtcttcaccgccgaggtgcggtccccgcgcctccgcatccgcagggttatcctcgactgcggcgccgtccaggcagatgccctcaccgtcgaccctctcgccacgctggataagtaccgtgaggcggcagtgttaccccgcgagttcatcctcagggccgaggctgagtggcttagctccatcaaggcagaccttgtggtctcggatgttgttcctattgtgtgcaaggtggcttcagatctgggtgtccgctctgtatgcattgggaattttagttgggacttcatatatgctgaatacatcatggaggctggatatcatcaccgatctattgtgtggcagatagcagaggattactcccattgtgacatattacttcgactacctggatatggcccaagtatactcaactatatttggttactcttttttccttaaaaattgtgttccctgtttctcagttatcatgaaaatagagtattatttcattccatagtgccggcttttcgcaacgtcattgatgtgcctcttgtggttagaggattacgcaaatctagatctgagttgtgatctattaggtgaggaaggaactaggaattgaggagaatgctaaggtgctcgtttttaattttgggggtcaggtgggtcacttgtcatataggtggtttggtaagcttatggaatatgtttctattttctcatgtggtaatgttatgtggctattttaatgtgcttacagccctatttggcacagcttatttcacagtttctttaagcagaagttgtattatacagtaaacttctgcagtagcttatcagttcagctacttctcaaaatgaactaaaaacagacaatacacaaaagttgcttttcgccagcttcccagataaactgcttttccaacaagcaacagctaccaaatagggcctatcgtttcttctgcaccgatatctgctgattctgattctttcagtaatcacagccttttttgtaacgaagtggtgcttattacctattatttaaatcaaaagtgatgccttttcaattacttggaagtattatggttagctattacccagatactgcattttgtaatgaagtccctgcaatacttgaataattatcattatacctcctagtttttagcagaacacatcatcattaaattttgtatgtatcatgcttccttcaaaagcttagcgatccattcttctatcctgtatgctctaaactttttgtgaactacacaaaacttatcaccaacataataaaataatcagtgcgtcatggttcccagccagcaggatggaaactgaagcaagaatgtctccctgatggttggatttgtttggtctgtggtgcctctgattctcaagatgttccaccgaacttcattaagcttgcgaaagatgcttacacacctgatgttatggcagcatctgactgaaaaattggatatggaactgcaagtgaggctttggcctgcaagctaccattagtgtttgttcgcagagattacttcaacgaagagccatttttgcgaaatttgcttgagcactaccaaaacagcattgagatggtcagaagtgatttccttgctggacactggaaaccgtacctacttcgtgctctcacacttcaaccatgctacaatggcccaataaatggtggtgaggtggtttcccagattctccaggacactgctattggaaacaaatgtatttctgataaagctagtggtgcaagaagattgcaagatgccatggtctcaggatatgtacttcaaagggttcctgggagagatgcaggcattcctgactggtactctgtgtccgaaaccaaaactggtggcggtccgacctcacaaaatgttgctacaaaggaaagtgcagcattatgtattgaagacattgagatactccatggggaccttcaaggattaacagatacagtggactttttgaagagcttatctgaacttaatggaaatgatttgaagagccctaagaagcaagacctagagagaactgctgcatctgttctttttgactgggagacagaaatatatgtagcaagggcacctggacgtttggacgtcatgggtggcattgctgattattcagggagtcttgttttgcagatgcctcttcgggaagcttgccatgttgctgttcagagaaaccatcccagcaagcagaagctttggaaacatacaaaagcaagacagcttgttaacggaggcttggtacctgtgatacaaattgtatcatttggttctgatttgagtaaccgtgcaccaacttttgatatggacctgtcagattttatggatgatggtaaaccaatatcctatgagaaagccagggagcttttctgtcaggatccatcccaaaaatgggctgcctatgttgctggaacaattctagttttgatgactgaacttggtgcccagttcactgacagcattagcattctggtttcatctgccgtgccagaaggaaaaggtgtttcatcttctgcatcagtggaggttgctacaatgtctgctatcgccgcagcctatggtttaaacatcataccaagggatcttgctttgctttgtcagaaggttgagaatcatgtagttggagctccttgtggagtaatggatcaaatggcatctgcgtgtggagaagctaacaaactccttgcgatggtttgccagcctgccgaagtgaaggaattggttagcatacctactcatatacggttctggggtctagattcagggatacggcatagtgttggcgggggagattatggatctgtgagggtaggcacttacatgggacgaaagatgatcaagtgtacagcatcagatttagtttcagaatccttgacttcagggtcccctgctcagtctgattgttataaagaaaatggtgtgggcgtactgaaatctgaagctgcactggagtatttgtgcaacctaccacctcacagatatgaagctgtttatgcaaaagacattccagaggtgattagtggagaagcattttcagagaaatatggagatcacgatgacacagtgacagttattgatcctaaaagatcttacagtgtgaaggctcctactagacatcccatatatgagaacttccgtgtcgaggccttcaaaacgttattagaggcaggtaatacagacgagcagctgtcagcccttggagaacttatgtaccagtgccacaacagctacagcgcatgtggcctcggttctgatgggactgacagactagtcaacctggtacgagaagtgcaacacaggaggacatccgaaggcggaagccctagtctgtttggcgcaaagatcaccggcggaggctccggcggcacagtatgtgttgttgggaagaactgcgccaggagcagtgaagagattgcagagattcagcacagatacaaggctgagaccgggtatctgcccattcttttcgacgggtcgtctccaggagctgggaagtttggttacctgaagatccgacgtcgttgtccctagtggctgattgggaaacgaagaacttcagttcgagctttgtcacatatcactcaattgttaagaacctcactccaactctccaagccattgtagaacatagaggcgtattgccacttgcgatgattcgtcgttcacacacaaaatattatcatgtgctacaccaattctggaagctactagaggaaaatgtgaggaatataaagaaactcttgttgagcagatgtagtctagtggtctccgtgtgcttgctgcagtgtaaccaaactccaagtagatgtgctctgggctctggcatgtggtatgtgatgaagtcgaggatggtttcttgccgtttgatgaccagtgtagtcgttggttaacttgtcagtcgtaaactgatgttgtcagttaggagcggataaagtttgtgtgtgttgtcagtgtatctgtgtgtaagtttattggacagaccgaaagatacaccacgaacccagatgaagtaggtaatagtcgtatgtgaagtttttatcattagggttgcaaatgcattaaatcacttataaatatatgatgattataaacttcctctgcatttatttcc

SEQ ID NO: 49031 - DNA, 3508 bp, Zea Mays
cccaagccacctctgcttctcctccgtctcgtcgtcggccatgacacccgccggtggcgccaaccactccccggcgccgcgtagcctggtattcgccttctacctcaccggccatggcttcggccacgccacccgcgccatcgaggtggtgcggcacctgatcgcggacgggcacgaggtgcacgtggcgacggccgtgccggagttcgtcttcaccgccgaggtgcggtccccgcgcctccgcatccgcagggttatcctcgactgcggcgccgtccaggcagatgccctcaccgtcgaccctctcgccacgctggataagtaccgtgaggcggcagtgttaccccgcgagttcatcctcagggccgaggctgagtggcttagctccatcaaggcagaccttgtggtctcggatgttgttcctattgtgtgcaaggtggcttcagatctgggtgtccgctctgtatgcattgggaattttagttgggacttcatatatgctgaatacatcatggaggctggatatcatcaccgatctattgtgtggcagatagcagaggattactcccattgtgacatattacttcgactacctggatatggcccaatgccggcttttcgcaacgtcattgatgtgcctcttgtggttagaggattacgcaaatctagatctgaggtgaggaaggaactaggaattgaggagaatgctaaggtgctcgtttttaattttgggggtcagccagcaggatggaaactgaagcaagaatgtctccctgatggttggatttgtttggtctgtggtgcctctgattctcaagatgttccaccgaacttcattaagcttgcgaaagatgcttacacacctgatgttatggcagcatctgactgtatgcttggaaaaattggatatggaactgcaagtgaggctttggcctgcaagctaccattagtgtttgttcgcagagattacttcaacgaagagccatttttgcgaaatttgcttgagcactaccaaaacagcattgagatggtcagaagtgatttccttgctggacactggaaaccgtacctacttcgtgctctcacacttcaaccatgctacaatggcccaataaatggtggtgaggtggtttcccagattctccaggacactgctattggaaacaaatgtatttctgataaagctagtggtgcaagaagattgcaagatgccatggtctcaggatatgtacttcaaagggttcctgggagagatgcaggcattcctgactggtactctgtgtccgaaaccaaaactggtggcggtccgacctcacaaaatgttgctacaaaggaaagtgcagcattatgtattgaagacattgagatactccatggggaccttcaaggattaacagatacagtggactttttgaagagcttatctgaacttaatggaaatgatttgaagagccctaagaagcaagacctagagagaactgctgcatctgttctttttgactgggagacagaaatatatgtagcaagggcacctggacgtttggacgtcatgggtggcattgctgattattcagggagtcttgttttgcagatgcctcttcgggaagcttgccatgttgctgttcagagaaaccatcccagcaagcagaagctttggaaacatacaaaagcaagacagcttgttaacggaggcttggtacctgtgatacaaattattttatggatgatggtaaaccaatatcctatgagaaagccagggagcttttctgtcaggatccatcccaaaaatgggctgcctatgttgctggaacaattctagttttgatgactgaacttggtgcccagttcactgacagcattagcattctggtttcatctgccgtgccagaaggaaaaggtgtttcatcttctgcatcagtggaggttgctacaatgtctgctatcgccgcagcctatggtttaaacatcataccaagggatcttgctttgctttgtcagaaggttgagaatcatgtagttggagctccttgtggagtaatggatcaaatggcatctgcgtgtggagaagctaacaaactccttgcgatggtttgccagcctgccgaagtgaaggaattggttagcatacctactcatatacggttctggggtctagattcagggatacggcatagtgttggcgggggagattatggatctgtgagggtaggcacttacatgggacgaaagatgatcaagtgtacagcatcagatttagtttcagaatccttgacttcagggtcccctgctcagtctgattgttataaagaaaatggtgtgggcgtactgaaatctgaagctgcactggagtatttgtgcaacctaccacctcacagatatgaagctgtttatgcaaaagacattccagaggtgattagtggagaagcattttcagagaaatatggagatcacgatgacacagtgacagttattgatcctaaaagatcttacagtgtgaaggctcctactagacatcccatatatgagaacttccgtgtcgaggccttcaaaacgttattagaggcaggtaatacagacgagcagctgtcagcccttggagaacttatgtaccagtgccacaacagctacagcgcatgtggcctcggttctgatgggactgacagactagtcaacctggtacgagaagtgcaacacaggaggacatccgaaggcggaagccctagtctgtttggcgcaaagatcaccggcggaggctccggcggcacagtatgtgttgttgggaagaactgcgccaggagcagtgaagagattgcagagattcagcacagatacaaggctgagaccgggtatctgcccattcttttcgacgggtcgtctccaggagctgggaagtttggttacctgaagatccgacgtcgttgtccctagtggctgattgggaaacgaagaacttcagttcgagctttgtcacatatcactcaattgttaagaacctcactccaactctccaagccattgtagaacatagaggcgtattgccacttgcgatgattcgtcgttcacacacaaaatattatcatgtgctacaccaattctggaagctactagaggaaaatgtgaggaatataaagaaactcttgttgagcagatgtagtctagtggtctccgtgtgcttgctgcagtgtaaccaaactccaagtagatgtgctctgggctctggcatgtggtatgtgatgaagtcgaggatggtttcttgccgtttgatgaccagtgtagtcgttggttaacttgtcagtcgtaaactgatgttgtcagttaggagcggataaagtttgtgtgtgttgtcagtgtatctgtgtgtaagtttattggacagaccgaaagatacaccacgaacccagatgaagtaggtaatagtcgtatgtgaagtttttatcattagggttgcaaatgcattaaatcacttataaatatatgatgattataaacttcctctgcatttatttcc

SEQ ID NO: 49032 - DNA, 4390 bp, Zea Mays
tcccgtcgaaatgctcctctaatcacccacccacctggtccttgtaggggctgggctctagggtgggagaaaacggaacaccccgggtggccccacacgcgcacatcgggagatgcccgcctgacctctacgcctccggccgtccccctctctctctcactttctcttctctctccccggccagacacaaaaacttttacttccccgaggcgaggcccgcagaagcagagcaacgcaccagcacgcacaggcacatctcccctacaacacgcatgcccacgctctagctagagaagccgccctgccctgctgtggtggtggtctagagacaaacaagcctttggtctccgtgcgtgtatcatcgtgttggtctgcctccctccctccctcggcccgcccccctgcctgccttctcgcgcccgcttccacccctgtccctcccgtgtcggaggggacacgcgcggccgcgtgggacgggcgcacgggcctgctcgcctgctccggcgccgcccatgcgcggggcccgctagctagccgacctctccctccccctctctctctctccatcgagcgcttggttggctagccgacggtccgggacgcggagggagatgatcaagcagcagcagcagcaggcgccgccggcgcctgctccggcggcagcgccgccgcccagcgcatgtgaaggggagaagaaggcgccgccgatcaactcggagctctggcacgcctgcgcggggcctctggtgtcgctgccgccggcgggcagcctcgtcgtctacttcccccaaggccacagcgagcagtttttggacatcaaactgaccgttaacggtgatcagtatggaaaggaggcgctgcaactatcggaactagcgctgaaacaaccaaggcctcaaacagagttcttctgtaagacactaactgcaagtgacacaagcactcatggaggcttctccgtgcctcgtcgagcagctgagaagatatttccaccccttgatttctccatgcaaccgcccgctcaagagatccaagccagagatttacatgataatgtgtggacattccgccacatatatcgaggtcagccaaaaagacatctgcttaccactggctggagtctttttgtgagcggaaagagattacttgctggtgattctgtcatttttgttagggatgaaaaacagcaacttctccttggaaccaggcgtgctaatagacagccaactaacatatcatcatctgtcctttcaagtgacagcatgcatataggaattcttgctgctgcagcccatgccgctgccaacaatagcccattcaccatattttataatcctagtcctacagagtttgttgtcccgtttgctaagtatcagaaggcactctatggtaatcaaatatctttaggaatgcgcttccgcatgatgtttgaaactgaagaattaggcacaagaaggtacatgggtacaataactggtataagtgatctagatccagtaagatggaaaaactcacaatggcgcaacatacaggtcggctgggatgagtctgcagcaggcgaaaggcggaacagggtttcaatctgggaaatcgaaccggttgctgctccttttttcatatgccctccaccattttttggttcaaaacgtcccagacaattagatgacgagtcctcagaaatggagaatcttttaaagagggcaatgccatggcttggtgaggagatatgcataaaggatccacagacgcagaacaccataatgcctggtctgagcttggttcagtggatgaacatgaatatgcagcagaactcatttgcaaactcggctatgcagtccgagtacctacgatcgctaagcaaccccaacatgcaaaatcttggcgtggctgatctctcaaggcagttaaaccttcagaaccagattctgcaacagaacagcattcagtttagttctcctaaactgcctcaacaaatgcagctggccaatgagttgtcaaaggcatctcttccactgaatcagattggtgtgggcaccaaacctcaagaacagactcaagacccaaacaatctgcagaggcaacaacagtccatgaaccaactacttccattgagccaatctcaaaccaatcttgtccaggctcaggtccttatccagaatcaaatgcagcagcaaaagcaaccaacatccatggctcaaaatcagcagccagctgccagccagtcactgatcctgccccagcagcagcaacaacagcaacaacatcaacaacaaaagttggtacatcaacagcagcagattttactgcagcagcaacaattgcagcaacagcaacaattgcagcaacagcaacaaaatcagcaacagctaaataagatggctgcacaaatgccaaatctggcatcacatcagccgcaactgtctgatcagcagcttcaactgcaactgttacaaaaactgcaacagcagcagcagtcgttgctatcacaaccagctgttactcttgcacaattacccctaatccaagagcagcaaaagttgattattgatatgcagcagcagttgtcaaattctcaaccactttcccagcaacaaacaatgccccaacaaagtattcaagttccatcacgggcaacaccaccaccaacaacaaccgtgcaacaagagtcacagcaaaagcttccacaaaagcatgttgggttcactgacacatcacataccaccattcctccgactacatcagtcaacaccatttcagttgtaggaagtcctctgatggcaactggtgccacacattctgtagttactgatgaaattccttcctgctcaacatcaccttcaacagctaatggcaaccatattgtgcaaccagtcctcggaaggaaccaactatgcagcatgatcaactatgagaaggtgcctcagtctactcctatgtcgatcccaagctccctggaagctgtcacagcaacgccaagatcaatcaaggaattgcctaagttgaattctaatgtcaagcaaagtgtaatggcttcaaagctaccaaatgcagggcatgtagctcaaaatttgactaacaatgcacccccgacggactatccggaaacagcttcatcagcaacttcagtgtggctttcccaagcggacgggcttctacatcatagtttccccatgtctaactttaatcagcagcagcagatgttcaaagctgcggctcctgagactgatattcagggtgcagatcccagtaataacacactctttggaataaacggtgatggtcagctgggctttcccatgggagcagatgatttcttatcaaatggaattgatgcttccaagtatcagggtcatatttcaacagatattgatggtaactacaggatctcaaaggatggccagcaagaaatatcgtcatccatggtttcacagtcgtttggtgcatcagatatggcattcaattcaattgactctggtatgaatgatggtggtttcgtgaacagaacctcttggcctcctgctcctcccttaaagaggatgaggacatttaccaaggtgtacaaacgtggagctgtaggtcggtccattgacattagtcagttcagtggatacgatgagttgaagcatgctctggctcgcatgtttagtatggaggggcaacttgaggaacgacagagaattggctggaaacttgtctacaaggatcatgaggatgacatcctacttcttggtgatgacccttgggaggaatttgtcaactgtgtgaagtgcattaggatcctgtcgcctcaggaagtgcagcagattagcttggatggggatctggggaacaacattctccccaaccaggcctgcagcagctccgacggcggcaatgcctggagagctcgctgcgatcagaactccggtaacccatctactggttcatatgaccagtttgaatgacctaacttgccggtccatacatgccggatcacaagtaggcgtctcgtgaggggatggcaggtgcagaatgtttgtagatgtgtcgccagatttacgtccgggagagcgaatcgctcgatggattggtagtgtttttgttcatatgtgtaggttttctcacatggaaggaatgtagtatagaggatgggagatgaagattaccgtaggtgaaagatgatgttgtaccatgaggggggaaaacatgcttgtagtagtaaagactgctgcttcagtccacgtatctaaaaagttcttctctgaccatgtgctgtttccaagtgttaatgttcatgcgtccttcaggaattgaaggcaataattcttgtgttgatgctcacaggaacacatatttagcgctgaggaagtttactcgacaagttcgttttcctgctgctactatggtaggc

SEQ ID NO: 49033 - DNA, 4396 bp, Zea Mays
tcccgtcgaaatgctcctctaatcacccacccacctggtccttgtaggggctgggctctagggtgggagaaaacggaacaccccgggtggccccacacgcgcacatcgggagatgcccgcctgacctctacgcctccggccgtccccctctctctctcactttctcttctctctccccggccagacacaaaaacttttacttccccgaggcgaggcccgcagaagcagagcaacgcaccagcacgcacaggcacatctcccctacaacacgcatgcccacgctctagctagagaagccgccctgccctgctgtggtggtggtctagagacaaacaagcctttggtctccgtgcgtgtatcatcgtgttggtctgcctccctccctccctcggcccgcccccctgcctgccttctcgcgcccgcttccacccctgtccctcccgtgtcggaggggacacgcgcggccgcgtgggacgggcgcacgggcctgctcgcctgctccggcgccgcccatgcgcggggcccgctagctagccgacctctccctccccctctctctctctccatcgagcgcttggttggctagccgacggtccgggacgcggagggagatgatcaagcagcagcagcagcaggcgccgccggcgcctgctccggcggcagcgccgccgcccagcgcatgtgaaggggagaagaaggcgccgccgatcaactcggagctctggcacgcctgcgcggggcctctggtgtcgctgccgccggcgggcagcctcgtcgtctacttcccccaaggccacagcgagcagtttttggacatcaaactgaccgttaacggtgatcagtatggaaaggaggcgctgcaactatcggaactagcgctgaaacaaccaaggcctcaaacagagttcttctgtaagacactaactgcaagtgacacaagcactcatggaggcttctccgtgcctcgtcgagcagctgagaagatatttccaccccttgatttctccatgcaaccgcccgctcaagagatccaagccagagatttacatgataatgtgtggacattccgccacatatatcgaggtcagccaaaaagacatctgcttaccactggctggagtctttttgtgagcggaaagagattacttgctggtgattctgtcatttttgttagggatgaaaaacagcaacttctccttggaaccaggcgtgctaatagacagccaactaacatatcatcatctgtcctttcaagtgacagcatgcatataggaattcttgctgctgcagcccatgccgctgccaacaatagcccattcaccatattttataatcctagggccagtcctacagagtttgttgtcccgtttgctaagtatcagaaggcactctatggtaatcaaatatctttaggaatgcgcttccgcatgatgtttgaaactgaagaattaggcacaagaaggtacatgggtacaataactggtataagtgatctagatccagtaagatggaaaaactcacaatggcgcaacatacaggtcggctgggatgagtctgcagcaggcgaaaggcggaacagggtttcaatctgggaaatcgaaccggttgctgctccttttttcatatgccctccaccattttttggttcaaaacgtcccagacaattagatgacgagtcctcagaaatggagaatcttttaaagagggcaatgccatggcttggtgaggagatatgcataaaggatccacagacgcagaacaccataatgcctggtctgagcttggttcagtggatgaacatgaatatgcagcagaactcatttgcaaactcggctatgcagtccgagtacctacgatcgctaagcaaccccaacatgcaaaatcttggcgtggctgatctctcaaggcagttaaaccttcagaaccagattctgcaacagaacagcattcagtttagttctcctaaactgcctcaacaaatgcagctggccaatgagttgtcaaaggcatctcttccactgaatcagattggtgtgggcaccaaacctcaagaacagactcaagacccaaacaatctgcagaggcaacaacagtccatgaaccaactacttccattgagccaatctcaaaccaatcttgtccaggctcaggtccttatccagaatcaaatgcagcagcaaaagcaaccaacatccatggctcaaaatcagcagccagctgccagccagtcactgatcctgccccagcagcagcaacaacagcaacaacatcaacaacaaaagttggtacatcaacagcagcagattttactgcagcagcaacaattgcagcaacagcaacaattgcagcaacagcaacaaaatcagcaacagctaaataagatggctgcacaaatgccaaatctggcatcacatcagccgcaactgtctgatcagcagcttcaactgcaactgttacaaaaactgcaacagcagcagcagtcgttgctatcacaaccagctgttactcttgcacaattacccctaatccaagagcagcaaaagttgattattgatatgcagcagcagttgtcaaattctcaaccactttcccagcaacaaacaatgccccaacaaagtattcaagttccatcacgggcaacaccaccaccaacaacaaccgtgcaacaagagtcacagcaaaagcttccacaaaagcatgttgggttcactgacacatcacataccaccattcctccgactacatcagtcaacaccatttcagttgtaggaagtcctctgatggcaactggtgccacacattctgtagttactgatgaaattccttcctgctcaacatcaccttcaacagctaatggcaaccatattgtgcaaccagtcctcggaaggaaccaactatgcagcatgatcaactatgagaaggtgcctcagtctactcctatgtcgatcccaagctccctggaagctgtcacagcaacgccaagatcaatcaaggaattgcctaagttgaattctaatgtcaagcaaagtgtaatggcttcaaagctaccaaatgcagggcatgtagctcaaaatttgactaacaatgcacccccgacggactatccggaaacagcttcatcagcaacttcagtgtggctttcccaagcggacgggcttctacatcatagtttccccatgtctaactttaatcagcagcagcagatgttcaaagctgcggctcctgagactgatattcagggtgcagatcccagtaataacacactctttggaataaacggtgatggtcagctgggctttcccatgggagcagatgatttcttatcaaatggaattgatgcttccaagtatcagggtcatatttcaacagatattgatggtaactacaggatctcaaaggatggccagcaagaaatatcgtcatccatggtttcacagtcgtttggtgcatcagatatggcattcaattcaattgactctggtatgaatgatggtggtttcgtgaacagaacctcttggcctcctgctcctcccttaaagaggatgaggacatttaccaaggtgtacaaacgtggagctgtaggtcggtccattgacattagtcagttcagtggatacgatgagttgaagcatgctctggctcgcatgtttagtatggaggggcaacttgaggaacgacagagaattggctggaaacttgtctacaaggatcatgaggatgacatcctacttcttggtgatgacccttgggaggaatttgtcaactgtgtgaagtgcattaggatcctgtcgcctcaggaagtgcagcagattagcttggatggggatctggggaacaacattctccccaaccaggcctgcagcagctccgacggcggcaatgcctggagagctcgctgcgatcagaactccggtaacccatctactggttcatatgaccagtttgaatgacctaacttgccggtccatacatgccggatcacaagtaggcgtctcgtgaggggatggcaggtgcagaatgtttgtagatgtgtcgccagatttacgtccgggagagcgaatcgctcgatggattggtagtgtttttgttcatatgtgtaggttttctcacatggaaggaatgtagtatagaggatgggagatgaagattaccgtaggtgaaagatgatgttgtaccatgaggggggaaaacatgcttgtagtagtaaagactgctgcttcagtccacgtatctaaaaagttcttctctgaccatgtgctgtttccaagtgttaatgttcatgcgtccttcaggaattgaaggcaataattcttgtgttgatgctcacaggaacacatatttagcgctgaggaagtttactcgacaagttcgttttcctgctgctactatggtaggc

SEQ ID NO: 49034 - DNA, 4516 bp, Zea Mays
tcccgtcgaaatgctcctctaatcacccacccacctggtccttgtaggggctgggctctagggtgggagaaaacggaacaccccgggtggccccacacgcgcacatcgggagatgcccgcctgacctctacgcctccggccgtccccctctctctctcactttctcttctctctccccggccagacacaaaaacttttacttccccgaggcgaggcccgcagaagcagagcaacgcaccagcacgcacaggcacatctcccctacaacacgcatgcccacgctctagctagagaagccgccctgccctgctgtggtggtggtctagagacaaacaagcctttggtctccgtgcgtgtatcatcgtgttggtctgcctccctccctccctcggcccgcccccctgcctgccttctcgcgcccgcttccacccctgtccctcccgtgtcggaggggacacgcgcggccgcgtgggacgggcgcacgggcctgctcgcctgctccggcgccgcccatgcgcggggcccgctagctagccgacctctccctccccctctctctctctccatcgagcgcttggttggctagccgacggtccgggacgcggagggagatgatcaagcagcagcagcagcaggcgccgccggcgcctgctccggcggcagcgccgccgcccagcgcatgtgaaggggagaagaaggcgccgccgatcaactcggagctctggcacgcctgcgcggggcctctggtgtcgctgccgccggcgggcagcctcgtcgtctacttcccccaaggccacagcgagcaggttgcagcttctatgcaaaaggatgttgacggacatgttccaagctacccaaatcttccgtcgaagttgatttgccttctgcacaatgtcactttacatgcggatccagaaacagatgaagtgtatgcacaaatgactcttttgccagttacttcatatggaaaggaggcgctgcaactatcggaactagcgctgaaacaaccaaggcctcaaacagagttcttctgtaagacactaactgcaagtgacacaagcactcatggaggcttctccgtgcctcgtcgagcagctgagaagatatttccaccccttgatttctccatgcaaccgcccgctcaagagatccaagccagagatttacatgataatgtgtggacattccgccacatatatcgaggtcagccaaaaagacatctgcttaccactggctggagtctttttgtgagcggaaagagattacttgctggtgattctgtcatttttgttagggatgaaaaacagcaacttctccttggaaccaggcgtgctaatagacagccaactaacatatcatcatctgtcctttcaagtgacagcatgcatataggaattcttgctgctgcagcccatgccgctgccaacaatagcccattcaccatattttataatcctagggccagtcctacagagtttgttgtcccgtttgctaagtatcagaaggcactctatggtaatcaaatatctttaggaatgcgcttccgcatgatgtttgaaactgaagaattaggcacaagaaggtacatgggtacaataactggtataagtgatctagatccagtaagatggaaaaactcacaatggcgcaacatacaggtcggctgggatgagtctgcagcaggcgaaaggcggaacagggtttcaatctgggaaatcgaaccggttgctgctccttttttcatatgccctccaccattttttggttcaaaacgtcccagacaattagatgacgagtcctcagaaatggagaatcttttaaagagggcaatgccatggcttggtgaggagatatgcataaaggatccacagacgcagaacaccataatgcctggtctgagcttggttcagtggatgaacatgaatatgcagcagaactcatttgcaaactcggctatgcagtccgagtacctacgatcgctaagcaaccccaacatgcaaaatcttggcgtggctgatctctcaaggcagttaaaccttcagaaccagattctgcaacagaacagcattcagtttagttctcctaaactgcctcaacaaatgcagctggccaatgagttgtcaaaggcatctcttccactgaatcagattggtgtgggcaccaaacctcaagaacagactcaagacccaaacaatctgcagaggcaacaacagtccatgaaccaactacttccattgagccaatctcaaaccaatcttgtccaggctcaggtccttatccagaatcaaatgcagcagcaaaagcaaccaacatccatggctcaaaatcagcagccagctgccagccagtcactgatcctgccccagcagcagcaacaacagcaacaacatcaacaacaaaagttggtacatcaacagcagcagattttactgcagcagcaacaattgcagcaacagcaacaattgcagcaacagcaacaaaatcagcaacagctaaataagatggctgcacaaatgccaaatctggcatcacatcagccgcaactgtctgatcagcagcttcaactgcaactgttacaaaaactgcaacagcagcagcagtcgttgctatcacaaccagctgttactcttgcacaattacccctaatccaagagcagcaaaagttgattattgatatgcagcagcagttgtcaaattctcaaccactttcccagcaacaaacaatgccccaacaaagtattcaagttccatcacgggcaacaccaccaccaacaacaaccgtgcaacaagagtcacagcaaaagcttccacaaaagcatgttgggttcactgacacatcacataccaccattcctccgactacatcagtcaacaccatttcagttgtaggaagtcctctgatggcaactggtgccacacattctgtagttactgatgaaattccttcctgctcaacatcaccttcaacagctaatggcaaccatattgtgcaaccagtcctcggaaggaaccaactatgcagcatgatcaactatgagaaggtgcctcagtctactcctatgtcgatcccaagctccctggaagctgtcacagcaacgccaagatcaatcaaggaattgcctaagttgaattctaatgtcaagcaaagtgtaatggcttcaaagctaccaaatgcagggcatgtagctcaaaatttgactaacaatgcacccccgacggactatccggaaacagcttcatcagcaacttcagtgtggctttcccaagcggacgggcttctacatcatagtttccccatgtctaactttaatcagcagcagcagatgttcaaagctgcggctcctgagactgatattcagggtgcagatcccagtaataacacactctttggaataaacggtgatggtcagctgggctttcccatgggagcagatgatttcttatcaaatggaattgatgcttccaagtatcagggtcatatttcaacagatattgatggtaactacaggatctcaaaggatggccagcaagaaatatcgtcatccatggtttcacagtcgtttggtgcatcagatatggcattcaattcaattgactctggtatgaatgatggtggtttcgtgaacagaacctcttggcctcctgctcctcccttaaagaggatgaggacatttaccaaggtgtacaaacgtggagctgtaggtcggtccattgacattagtcagttcagtggatacgatgagttgaagcatgctctggctcgcatgtttagtatggaggggcaacttgaggaacgacagagaattggctggaaacttgtctacaaggatcatgaggatgacatcctacttcttggtgatgacccttgggaggaatttgtcaactgtgtgaagtgcattaggatcctgtcgcctcaggaagtgcagcagattagcttggatggggatctggggaacaacattctccccaaccaggcctgcagcagctccgacggcggcaatgcctggagagctcgctgcgatcagaactccggtaacccatctactggttcatatgaccagtttgaatgacctaacttgccggtccatacatgccggatcacaagtaggcgtctcgtgaggggatggcaggtgcagaatgtttgtagatgtgtcgccagatttacgtccgggagagcgaatcgctcgatggattggtagtgtttttgttcatatgtgtaggttttctcacatggaaggaatgtagtatagaggatgggagatgaagattaccgtaggtgaaagatgatgttgtaccatgaggggggaaaacatgcttgtagtagtaaagactgctgcttcagtccacgtatctaaaaagttcttctctgaccatgtgctgtttccaagtgttaatgttcatgcgtccttcaggaattgaaggcaataattcttgtgttgatgctcacaggaacacatatttagcgctgaggaagtttactcgacaagttcgttttcctgctgctactatggtaggc

SEQ ID NO: 49035 - DNA, 4033 bp, Zea Mays
cgttcttcttcggcttctgtgatttctggagatttgcggtgggttttttcttctgttcacaaaggagagagaaaaaaagacgccgctgacctcgccgtcgcggtcgtcgccggccactggcgcggagaagtgcatgattattctgcatttatgctcctccgtgttcccccccacgagctcccgtctggcggttcttgagtagcagggagaagaaggcgccgccgatcaactcggagctctggcacgcctgcgcggggcctctggtgtcgctgccgccggcgggcagcctcgtcgtctacttcccccaaggccacagcgagcaggttgcagcttctatgcaaaaggatgttgacggacatgttccaagctacccaaatcttccgtcgaagttgatttgccttctgcacaatgtcactttacatgcggatccagaaacagatgaagtgtatgcacaaatgactcttttgccagttacttcatatggaaaggaggcgctgcaactatcggaactagcgctgaaacaaccaaggcctcaaacagagttcttctgtaagacactaactgcaagtgacacaagcactcatggaggcttctccgtgcctcgtcgagcagctgagaagatatttccaccccttgatttctccatgcaaccgcccgctcaagagatccaagccagagatttacatgataatgtgtggacattccgccacatatatcgaggtcagccaaaaagacatctgcttaccactggctggagtctttttgtgagcggaaagagattacttgctggtgattctgtcatttttgttagggatgaaaaacagcaacttctccttggaaccaggcgtgctaatagacagccaactaacatatcatcatctgtcctttcaagtgacagcatgcatataggaattcttgctgctgcagcccatgccgctgccaacaatagcccattcaccatattttataatcctagggccagtcctacagagtttgttgtcccgtttgctaagtatcagaaggcactctatggtaatcaaatatctttaggaatgcgcttccgcatgatgtttgaaactgaagaattaggcacaagaaggtacatgggtacaataactggtataagtgatctagatccagtaagatggaaaaactcacaatggcgcaacatacaggtcggctgggatgagtctgcagcaggcgaaaggcggaacagggtttcaatctgggaaatcgaaccggttgctgctccttttttcatatgccctccaccattttttggttcaaaacgtcccagacaattagatgacgagtcctcagaaatggagaatcttttaaagagggcaatgccatggcttggtgaggagatatgcataaaggatccacagacgcagaacaccataatgcctggtctgagcttggttcagtggatgaacatgaatatgcagcagaactcatttgcaaactcggctatgcagtccgagtacctacgatcgctaagcaaccccaacatgcaaaatcttggcgtggctgatctctcaaggcagttaaaccttcagaaccagattctgcaacagaacagcattcagtttagttctcctaaactgcctcaacaaatgcagctggccaatgagttgtcaaaggcatctcttccactgaatcagattggtgtgggcaccaaacctcaagaacagactcaagacccaaacaatctgcagaggcaacaacagtccatgaaccaactacttccattgagccaatctcaaaccaatcttgtccaggctcaggtccttatccagaatcaaatgcagcagcaaaagcaaccaacatccatggctcaaaatcagcagccagctgccagccagtcactgatcctgccccagcagcagcaacaacagcaacaacatcaacaacaaaagttggtacatcaacagcagcagattttactgcagcagcaacaattgcagcaacagcaacaattgcagcaacagcaacaaaatcagcaacagctaaataagatggctgcacaaatgccaaatctggcatcacatcagccgcaactgtctgatcagcagcttcaactgcaactgttacaaaaactgcaacagcagcagcagtcgttgctatcacaaccagctgttactcttgcacaattacccctaatccaagagcagcaaaagttgattattgatatgcagcagcagttgtcaaattctcaaccactttcccagcaacaaacaatgccccaacaaagtattcaagttccatcacgggcaacaccaccaccaacaacaaccgtgcaacaagagtcacagcaaaagcttccacaaaagcatgttgggttcactgacacatcacataccaccattcctccgactacatcagtcaacaccatttcagttgtaggaagtcctctgatggcaactggtgccacacattctgtagttactgatgaaattccttcctgctcaacatcaccttcaacagctaatggcaaccatattgtgcaaccagtcctcggaaggaaccaactatgcagcatgatcaactatgagaaggtgcctcagtctactcctatgtcgatcccaagctccctggaagctgtcacagcaacgccaagatcaatcaaggaattgcctaagttgaattctaatgtcaagcaaagtgtaatggcttcaaagctaccaaatgcagggcatgtagctcaaaatttgactaacaatgcacccccgacggactatccggaaacagcttcatcagcaacttcagtgtggctttcccaagcggacgggcttctacatcatagtttccccatgtctaactttaatcagcagcagcagatgttcaaagctgcggctcctgagactgatattcagggtgcagatcccagtaataacacactctttggaataaacggtgatggtcagctgggctttcccatgggagcagatgatttcttatcaaatggaattgatgcttccaagtatcagggtcatatttcaacagatattgatggtaactacaggatctcaaaggatggccagcaagaaatatcgtcatccatggtttcacagtcgtttggtgcatcagatatggcattcaattcaattgactctggtatgaatgatggtggtttcgtgaacagaacctcttggcctcctgctcctcccttaaagaggatgaggacatttaccaaggtgtacaaacgtggagctgtaggtcggtccattgacattagtcagttcagtggatacgatgagttgaagcatgctctggctcgcatgtttagtatggaggggcaacttgaggaacgacagagaattggctggaaacttgtctacaaggatcatgaggatgacatcctacttcttggtgatgacccttgggaggaatttgtcaactgtgtgaagtgcattaggatcctgtcgcctcaggaagtgcagcagattagcttggatggggatctggggaacaacattctccccaaccaggcctgcagcagctccgacggcggcaatgcctggagagctcgctgcgatcagaactccggtaacccatctactggttcatatgaccagtttgaatgacctaacttgccggtccatacatgccggatcacaagtaggcgtctcgtgaggggatggcaggtgcagaatgtttgtagatgtgtcgccagatttacgtccgggagagcgaatcgctcgatggattggtagtgtttttgttcatatgtgtaggttttctcacatggaaggaatgtagtatagaggatgggagatgaagattaccgtaggtgaaagatgatgttgtaccatgaggggggaaaacatgcttgtagtagtaaagactgctgcttcagtccacgtatctaaaaagttcttctctgaccatgtgctgtttccaagtgttaatgttcatgcgtccttcaggaattgaaggcaataattcttgtgttgatgctcacaggaacacatatttagcgctgaggaagtttactcgacaagttcgttttcctgctgctactatggtaggc

SEQ ID NO: 49036 - DNA, 3819 bp, Zea Mays
ccgtcgcggtcgtcgccggccactggcgcggagaagtgcatgattattctgcatttatgctcctccgtgttcccccccacgagctcccgtctggcggttcttgagtagcagggagaagaaggcgccgccgatcaactcggagctctggcacgcctgcgcggggcctctggtgtcgctgccgccggcgggcagcctcgtcgtctacttcccccaaggccacagcgagcagtttttggacatcaaactgaccgttaacggtgatcagtatggaaaggaggcgctgcaactatcggaactagcgctgaaacaaccaaggcctcaaacagagttcttctgtaagacactaactgcaagtgacacaagcactcatggaggcttctccgtgcctcgtcgagcagctgagaagatatttccaccccttgatttctccatgcaaccgcccgctcaagagatccaagccagagatttacatgataatgtgtggacattccgccacatatatcgaggtcagccaaaaagacatctgcttaccactggctggagtctttttgtgagcggaaagagattacttgctggtgattctgtcatttttgttagggatgaaaaacagcaacttctccttggaaccaggcgtgctaatagacagccaactaacatatcatcatctgtcctttcaagtgacagcatgcatataggaattcttgctgctgcagcccatgccgctgccaacaatagcccattcaccatattttataatcctagggccagtcctacagagtttgttgtcccgtttgctaagtatcagaaggcactctatggtaatcaaatatctttaggaatgcgcttccgcatgatgtttgaaactgaagaattaggcacaagaaggtacatgggtacaataactggtataagtgatctagatccagtaagatggaaaaactcacaatggcgcaacatacaggtcggctgggatgagtctgcagcaggcgaaaggcggaacagggtttcaatctgggaaatcgaaccggttgctgctccttttttcatatgccctccaccattttttggttcaaaacgtcccagacaattagatgacgagtcctcagaaatggagaatcttttaaagagggcaatgccatggcttggtgaggagatatgcataaaggatccacagacgcagaacaccataatgcctggtctgagcttggttcagtggatgaacatgaatatgcagcagaactcatttgcaaactcggctatgcagtccgagtacctacgatcgctaagcaaccccaacatgcaaaatcttggcgtggctgatctctcaaggcagttaaaccttcagaaccagattctgcaacagaacagcattcagtttagttctcctaaactgcctcaacaaatgcagctggccaatgagttgtcaaaggcatctcttccactgaatcagattggtgtgggcaccaaacctcaagaacagactcaagacccaaacaatctgcagaggcaacaacagtccatgaaccaactacttccattgagccaatctcaaaccaatcttgtccaggctcaggtccttatccagaatcaaatgcagcagcaaaagcaaccaacatccatggctcaaaatcagcagccagctgccagccagtcactgatcctgccccagcagcagcaacaacagcaacaacatcaacaacaaaagttggtacatcaacagcagcagattttactgcagcagcaacaattgcagcaacagcaacaattgcagcaacagcaacaaaatcagcaacagctaaataagatggctgcacaaatgccaaatctggcatcacatcagccgcaactgtctgatcagcagcttcaactgcaactgttacaaaaactgcaacagcagcagcagtcgttgctatcacaaccagctgttactcttgcacaattacccctaatccaagagcagcaaaagttgattattgatatgcagcagcagttgtcaaattctcaaccactttcccagcaacaaacaatgccccaacaaagtattcaagttccatcacgggcaacaccaccaccaacaacaaccgtgcaacaagagtcacagcaaaagcttccacaaaagcatgttgggttcactgacacatcacataccaccattcctccgactacatcagtcaacaccatttcagttgtaggaagtcctctgatggcaactggtgccacacattctgtagttactgatgaaattccttcctgctcaacatcaccttcaacagctaatggcaaccatattgtgcaaccagtcctcggaaggaaccaactatgcagcatgatcaactatgagaaggtgcctcagtctactcctatgtcgatcccaagctccctggaagctgtcacagcaacgccaagatcaatcaaggaattgcctaagttgaattctaatgtcaagcaaagtgtaatggcttcaaagctaccaaatgcagggcatgtagctcaaaatttgactaacaatgcacccccgacggactatccggaaacagcttcatcagcaacttcagtgtggctttcccaagcggacgggcttctacatcatagtttccccatgtctaactttaatcagcagcagcagatgttcaaagctgcggctcctgagactgatattcagggtgcagatcccagtaataacacactctttggaataaacggtgatggtcagctgggctttcccatgggagcagatgatttcttatcaaatggaattgatgcttccaagtatcagggtcatatttcaacagatattgatggtaactacaggatctcaaaggatggccagcaagaaatatcgtcatccatggtttcacagtcgtttggtgcatcagatatggcattcaattcaattgactctggtatgaatgatggtggtttcgtgaacagaacctcttggcctcctgctcctcccttaaagaggatgaggacatttaccaaggtgtacaaacgtggagctgtaggtcggtccattgacattagtcagttcagtggatacgatgagttgaagcatgctctggctcgcatgtttagtatggaggggcaacttgaggaacgacagagaattggctggaaacttgtctacaaggatcatgaggatgacatcctacttcttggtgatgacccttgggaggaatttgtcaactgtgtgaagtgcattaggatcctgtcgcctcaggaagtgcagcagattagcttggatggggatctggggaacaacattctccccaaccaggcctgcagcagctccgacggcggcaatgcctggagagctcgctgcgatcagaactccggtaacccatctactggttcatatgaccagtttgaatgacctaacttgccggtccatacatgccggatcacaagtaggcgtctcgtgaggggatggcaggtgcagaatgtttgtagatgtgtcgccagatttacgtccgggagagcgaatcgctcgatggattggtagtgtttttgttcatatgtgtaggttttctcacatggaaggaatgtagtatagaggatgggagatgaagattaccgtaggtgaaagatgatgttgtaccatgaggggggaaaacatgcttgtagtagtaaagactgctgcttcagtccacgtatctaaaaagttcttctctgaccatgtgctgtttccaagtgttaatgttcatgcgtccttcaggaattgaaggcaataattcttgtgttgatgctcacaggaacacatatttagcgctgaggaagtttactcgacaagttcgttttcctgctgctactatggtaggc

SEQ ID NO: 49037 - DNA, 1961 bp, Zea Mays
atattttctatgttttgttagcgattgatcttttttacatggtcaagttaagatgacattcatcagcgaattttcccaccgctcagcagtgacctcgttcccgtcctcctcgcatccctctcgtccgccgccgcctggctcgcgccgccgacagtttctcggcccagatcgagacacgcccgccatcctacaccaggtgccgaggccttcgccgatcaaagagatcccagacagcagatccgtccgtgccctgctcctcgaaccatggggacctctgcccaggaatcgcctctctggaagcgtatcgacgatgccgagtactatctagtcagtggatcatttgaccaggcggtgttgactgctttatccgtcgccgatgaaatacacatggcttctttggagagcgctagcgaccaggatgagctcctggagatgcttgaatcggctgggatggtgcttgtgcaggcactaaaagaactcaggagggcctctgagatgtttgctcagcttaagatgatgtttggttcagtgccatcagtgcctgctagagttttccttacaggaaggatctatatctgacctcagaccaatctttgaggagtaccttgccaattggagatatacggatgatgaggtttatgtttttgatggaggaaatgacagcacttcaaatggttttgtcgttaaatctattatgtcaactggccagtattttgaggtggcagaattgtatacagtaacattcctctgtattgtctctcaagatagtgaaactgctatctcatgggcagaaaaggctcatctaactgagcaaagccggcaggttttttttttttgtaaacgctacttaataattctactacagcataagaatctgagtgttccattatgctaacataggtcttccagcgtgggatcttataggtccagataattttcatgctaaagtaggattcttatgttcccaaaactatttcttgtatgaattaattcccactacagtatgcttctcatttccgaataacttctatagttccatgctaaactagggctcttcatatttccaaagcaatttgttttgaattcccgtcattctttattttctttagaggttttactgttgcattcttttttcatcaagacattttttttctttctttctacaggacctactaaaaaagcttcatgcagtgcaattagctgcaaataaaaaactgtccactgttgaaggggtaaaacaaacagcagagaggaacctttctacttctacaaatgactcaacaccatcgccacatgaggatcctccaaagatagttcctgcgtgcgatgggctcaaaaaggtcctgctgaagtctgctcaacaagctcagcatgttgcaaatcattttgatccgtttttctggtggtttcattcaattcgcctgaagtttgggaaaatacatattgttctacccagtggtaagttagtgtttctgttctctctgctgttctcagccatgtacgtgctgcgaaggaaaactgctggcttgaagagggctgtgttccagcaagctgcttccctgcgacgagcattttttgatgcacttcagcttgcgttctctgtccagatgaaccctctagctgctgttcaacaagtgccacaagcccctcgaggaagctggtgattggtgatgttctttatgccttgatctatgtaacattataactcaactgaaattcaacaggcaaccagatttcatgtcgcggaaaatgtggctgtgtaaatactagtgtgcttaatgcagcatgaatgtgatgatgacctgggtttttttgtgtccattctcacctgaagcatattggactggggattatttacaagagctatggcttttgaattggggaaacggattaagtgcaaccaaaccaattagtgtaaccgatgaaaccaagacataaggatggatattttttaaaaaggt

SEQ ID NO: 49038 - DNA, 1878 bp, Zea Mays
atattttctatgttttgttagcgattgatcttttttacatggtcaagttaagatgacattcatcagcgaattttcccaccgctcagcagtgacctcgttcccgtcctcctcgcatccctctcgtccgccgccgcctggctcgcgccgccgacagtttctcggcccagatcgagacacgcccgccatcctacaccaggtgccgaggccttcgccgatcaaagagatcccagacagcagctatctagtcagtggatcatttgaccaggcggtgttgactgctttatccgtcgccgatgaaatacacatggcttctttggagagcgctagcgaccaggatgagctcctggagatgcttgaatcggctgggatggtgcttgtgcaggcactaaaagaactcaggagggcctctgagatgtttgctcagcttaagatgatgtttggttcagtgccatcagtgcctgctagagttttccttacaggaaggatctatatctgacctcagaccaatctttgaggagtaccttgccaattggagatatacggatgatgaggtttatgtttttgatggaggaaatgacagcacttcaaatggttttgtcgttaaatctattatgtcaactggccagtattttgaggtggcagaattgtatacagtaacattcctctgtattgtctctcaagatagtgaaactgctatctcatgggcagaaaaggctcatctaactgagcaaagccggcaggttttttttttttgtaaacgctacttaataattctactacagcataagaatctgagtgttccattatgctaacataggtcttccagcgtgggatcttataggtccagataattttcatgctaaagtaggattcttatgttcccaaaactatttcttgtatgaattaattcccactacagtatgcttctcatttccgaataacttctatagttccatgctaaactagggctcttcatatttccaaagcaatttgttttgaattcccgtcattctttattttctttagaggttttactgttgcattcttttttcatcaagacattttttttctttctttctacaggacctactaaaaaagcttcatgcagtgcaattagctgcaaataaaaaactgtccactgttgaaggggtaaaacaaacagcagagaggaacctttctacttctacaaatgactcaacaccatcgccacatgaggatcctccaaagatagttcctgcgtgcgatgggctcaaaaaggtcctgctgaagtctgctcaacaagctcagcatgttgcaaatcattttgatccgtttttctggtggtttcattcaattcgcctgaagtttgggaaaatacatattgttctacccagtggtaagttagtgtttctgttctctctgctgttctcagccatgtacgtgctgcgaaggaaaactgctggcttgaagagggctgtgttccagcaagctgcttccctgcgacgagcattttttgatgcacttcagcttgcgttctctgtccagatgaaccctctagctgctgttcaacaagtgccacaagcccctcgaggaagctggtgattggtgatgttctttatgccttgatctatgtaacattataactcaactgaaattcaacaggcaaccagatttcatgtcgcggaaaatgtggctgtgtaaatactagtgtgcttaatgcagcatgaatgtgatgatgacctgggtttttttgtgtccattctcacctgaagcatattggactggggattatttacaagagctatggcttttgaattggggaaacggattaagtgcaaccaaaccaattagtgtaaccgatgaaaccaagacataaggatggatattttttaaaaaggt

SEQ ID NO: 49039 - DNA, 1981 bp, Zea Mays
atattttctatgttttgttagcgattgatcttttttacatggtcaagttaagatgacattcatcagcgaattttcccaccgctcagcagtgacctcgttcccgtcctcctcgcatccctctcgtccgccgccgcctggctcgcgccgccgacagtttctcggcccagatcgagacacgcccgccatcctacaccaggtgccgaggccttcgccgatcaaagagatcccagacagcagatccgtccgtgccctgctcctcgaaccatggggacctctgcccaggaatcgcctctctggaagcgtatcgacgatgccgagtactatctagtcagtggatcatttgaccaggcggtgttgactgctttatccgtcgccgatgaaatacacatggcttctttggagagcgctagcgaccaggatgagctcctggagatgcttgaatcggctgggatggtgcttgtgcaggcactaaaagaactcaggagggcctctgagatgtttgctcagcttaagatgatgtttggttcagtgccatcagtgcctgctagagttttccttacaggagctaccattcaaatggcagaaggatctatatctgacctcagaccaatctttgaggagtaccttgccaattggagatatacggatgatgaggtttatgtttttgatggaggaaatgacagcacttcaaatggttttgtcgttaaatctattatgtcaactggccagtattttgaggtggcagaattgtatacagtaacattcctctgtattgtctctcaagatagtgaaactgctatctcatgggcagaaaaggctcatctaactgagcaaagccggcaggttttttttttttgtaaacgctacttaataattctactacagcataagaatctgagtgttccattatgctaacataggtcttccagcgtgggatcttataggtccagataattttcatgctaaagtaggattcttatgttcccaaaactatttcttgtatgaattaattcccactacagtatgcttctcatttccgaataacttctatagttccatgctaaactagggctcttcatatttccaaagcaatttgttttgaattcccgtcattctttattttctttagaggttttactgttgcattcttttttcatcaagacattttttttctttctttctacaggacctactaaaaaagcttcatgcagtgcaattagctgcaaataaaaaactgtccactgttgaaggggtaaaacaaacagcagagaggaacctttctacttctacaaatgactcaacaccatcgccacatgaggatcctccaaagatagttcctgcgtgcgatgggctcaaaaaggtcctgctgaagtctgctcaacaagctcagcatgttgcaaatcattttgatccgtttttctggtggtttcattcaattcgcctgaagtttgggaaaatacatattgttctacccagtggtaagttagtgtttctgttctctctgctgttctcagccatgtacgtgctgcgaaggaaaactgctggcttgaagagggctgtgttccagcaagctgcttccctgcgacgagcattttttgatgcacttcagcttgcgttctctgtccagatgaaccctctagctgctgttcaacaagtgccacaagcccctcgaggaagctggtgattggtgatgttctttatgccttgatctatgtaacattataactcaactgaaattcaacaggcaaccagatttcatgtcgcggaaaatgtggctgtgtaaatactagtgtgcttaatgcagcatgaatgtgatgatgacctgggtttttttgtgtccattctcacctgaagcatattggactggggattatttacaagagctatggcttttgaattggggaaacggattaagtgcaaccaaaccaattagtgtaaccgatgaaaccaagacataaggatggatattttttaaaaaggt

SEQ ID NO: 49040 - DNA, 1535 bp, Zea Mays
atattttctatgttttgttagcgattgatcttttttacatggtcaagttaagatgacattcatcagcgaattttcccaccgctcagcagtgacctcgttcccgtcctcctcgcatccctctcgtccgccgccgcctggctcgcgccgccgacagtttctcggcccagatcgagacacgcccgccatcctacaccaggtgccgaggccttcgccgatcaaagagatcccagacagcagctatctagtcagtggatcatttgaccaggcggtgttgactgctttatccgtcgccgatgaaatacacatggcttctttggagagcgctagcgaccaggatgagctcctggagatgcttgaatcggctgggatggtgcttgtgcaggcactaaaagaactcaggagggcctctgagatgtttgctcagcttaagatgatgtttggttcagtgccatcagtgcctgctagagttttccttacaggaaggatctatatctgacctcagaccaatctttgaggagtaccttgccaattggagatatacggatgatgaggtttatgtttttgatggaggaaatgacagcacttcaaatggttttgtcgttaaatctattatgtcaactggccagtattttgaggtggcagaattgtatacagtaacattcctctgtattgtctctcaagatagtgaaactgctatctcatgggcagaaaaggctcatctaactgagcaaagccggcaggacctactaaaaaagcttcatgcagtgcaattagctgcaaataaaaaactgtccactgttgaaggggtaaaacaaacagcagagaggaacctttctacttctacaaatgactcaacaccatcgccacatgaggatcctccaaagatagttcctgcgtgcgatgggctcaaaaaggtcctgctgaagtctgctcaacaagctcagcatgttgcaaatcattttgatccgtttttctggtggtttcattcaattcgcctgaagtttgggaaaatacatattgttctacccagtggtaagttagtgtttctgttctctctgctgttctcagccatgtacgtgctgcgaaggaaaactgctggcttgaagagggctgtgttccagcaagctgcttccctgcgacgagcattttttgatgcacttcagcttgcgttctctgtccagatgaaccctctagctgctgttcaacaagtgccacaagcccctcgaggaagctggtgattggtgatgttctttatgccttgatctatgtaacattataactcaactgaaattcaacaggcaaccagatttcatgtcgcggaaaatgtggctgtgtaaatactagtgtgcttaatgcagcatgaatgtgatgatgacctgggtttttttgtgtccattctcacctgaagcatattggactggggattatttacaagagctatggcttttgaattggggaaacggattaagtgcaaccaaaccaattagtgtaaccgatgaaaccaagacataaggatggatattttttaaaaaggt

SEQ ID NO: 49041 - DNA, 1449 bp, Zea Mays
atattttctatgttttgttagcgattgatcttttttacatggtcaagttaagatgacattcatcagcgaattttcccaccgctcagcagtgacctcgttcccgtcctcctcgcatccctctcgtccgccgccgcctggctcgcgccgccgacagtttctcggcccagatcgagacacgcccgccatcctacaccaggtgccgaggccttcgccgatcaaagagatcccagacagcagatccgtccgtgccctgctcctcgaaccatggggacctctgcccaggaatcgcctctctggaagcgtatcgacgatgccgagtactatctagtcagtggatcatttgaccaggcggtgttgactgctttatccgtcgccgatgaaatacacatggcttctttggagagcgctagcgaccaggatgagctcctggagatgcttgaatcggctgggatggtgcttgtgcaggcactaaaagaactcaggagggcctctgagatgtttgctcagcttaagatgatgtttggttcagtgccatcagtgcctgctagagttttccttacaggagctaccattcaaatggcagaaggatctatatctgacctcagaccaatctttgaggagtaccttgccaattggagatatacggatgatgaggacctactaaaaaagcttcatgcagtgcaattagctgcaaataaaaaactgtccactgttgaaggggtaaaacaaacagcagagaggaacctttctacttctacaaatgactcaacaccatcgccacatgaggatcctccaaagatagttcctgcgtgcgatgggctcaaaaaggtcctgctgaagtctgctcaacaagctcagcatgttgcaaatcattttgatccgtttttctggtggtttcattcaattcgcctgaagtttgggaaaatacatattgttctacccagtggtaagttagtgtttctgttctctctgctgttctcagccatgtacgtgctgcgaaggaaaactgctggcttgaagagggctgtgttccagcaagctgcttccctgcgacgagcattttttgatgcacttcagcttgcgttctctgtccagatgaaccctctagctgctgttcaacaagtgccacaagcccctcgaggaagctggtgattggtgatgttctttatgccttgatctatgtaacattataactcaactgaaattcaacaggcaaccagatttcatgtcgcggaaaatgtggctgtgtaaatactagtgtgcttaatgcagcatgaatgtgatgatgacctgggtttttttgtgtccattctcacctgaagcatattggactggggattatttacaagagctatggcttttgaattggggaaacggattaagtgcaaccaaaccaattagtgtaaccgatgaaaccaagacataaggatggatattttttaaaaaggt

SEQ ID NO: 49042 - DNA, 1197 bp, Zea Mays
atattttctatgttttgttagcgattgatcttttttacatggtcaagttaagatgacattcatcagcgaattttcccaccgctcagcagtgacctcgttcccgtcctcctcgcatccctctcgtccgccgccgcctggctcgcgccgccgacagtttctcggcccagatcgagacacgcccgccatcctacaccaggtgccgaggccttcgccgatcaaagagatcccagacagcagctatctagtcagtggatcatttgaccaggcggtgttgactgctttatccgtcgccgatgaaatacacatggcttctttggagagcgctagcgaccaggatgagctcctggagatgcttgaatcggctgggatggtgcttgtgcaggcactaaaagaactcaggaggacctactaaaaaagcttcatgcagtgcaattagctgcaaataaaaaactgtccactgttgaaggggtaaaacaaacagcagagaggaacctttctacttctacaaatgactcaacaccatcgccacatgaggatcctccaaagatagttcctgcgtgcgatgggctcaaaaaggtcctgctgaagtctgctcaacaagctcagcatgttgcaaatcattttgatccgtttttctggtggtttcattcaattcgcctgaagtttgggaaaatacatattgttctacccagtggtaagttagtgtttctgttctctctgctgttctcagccatgtacgtgctgcgaaggaaaactgctggcttgaagagggctgtgttccagcaagctgcttccctgcgacgagcattttttgatgcacttcagcttgcgttctctgtccagatgaaccctctagctgctgttcaacaagtgccacaagcccctcgaggaagctggtgattggtgatgttctttatgccttgatctatgtaacattataactcaactgaaattcaacaggcaaccagatttcatgtcgcggaaaatgtggctgtgtaaatactagtgtgcttaatgcagcatgaatgtgatgatgacctgggtttttttgtgtccattctcacctgaagcatattggactggggattatttacaagagctatggcttttgaattggggaaacggattaagtgcaaccaaaccaattagtgtaaccgatgaaaccaagacataaggatggatattttttaaaaaggt

SEQ ID NO: 49043 - DNA, 1429 bp, Zea Mays
atattttctatgttttgttagcgattgatcttttttacatggtcaagttaagatgacattcatcagcgaattttcccaccgctcagcagtgacctcgttcccgtcctcctcgcatccctctcgtccgccgccgcctggctcgcgccgccgacagtttctcggcccagatcgagacacgcccgccatcctacaccaggtgccgaggccttcgccgatcaaagagatcccagacagcagatccgtccgtgccctgctcctcgaaccatggggacctctgcccaggaatcgcctctctggaagcgtatcgacgatgccgagtactatctagtcagtggatcatttgaccaggcggtgttgactgctttatccgtcgccgatgaaatacacatggcttctttggagagcgctagcgaccaggatgagctcctggagatgcttgaatcggctgggatggtgcttgtgcaggcactaaaagaactcaggagggcctctgagatgtttgctcagcttaagatgatgtttggttcagtgccatcagtgcctgctagagttttccttacaggaaggatctatatctgacctcagaccaatctttgaggagtaccttgccaattggagatatacggatgatgaggacctactaaaaaagcttcatgcagtgcaattagctgcaaataaaaaactgtccactgttgaaggggtaaaacaaacagcagagaggaacctttctacttctacaaatgactcaacaccatcgccacatgaggatcctccaaagatagttcctgcgtgcgatgggctcaaaaaggtcctgctgaagtctgctcaacaagctcagcatgttgcaaatcattttgatccgtttttctggtggtttcattcaattcgcctgaagtttgggaaaatacatattgttctacccagtggtaagttagtgtttctgttctctctgctgttctcagccatgtacgtgctgcgaaggaaaactgctggcttgaagagggctgtgttccagcaagctgcttccctgcgacgagcattttttgatgcacttcagcttgcgttctctgtccagatgaaccctctagctgctgttcaacaagtgccacaagcccctcgaggaagctggtgattggtgatgttctttatgccttgatctatgtaacattataactcaactgaaattcaacaggcaaccagatttcatgtcgcggaaaatgtggctgtgtaaatactagtgtgcttaatgcagcatgaatgtgatgatgacctgggtttttttgtgtccattctcacctgaagcatattggactggggattatttacaagagctatggcttttgaattggggaaacggattaagtgcaaccaaaccaattagtgtaaccgatgaaaccaagacataaggatggatattttttaaaaaggt

SEQ ID NO: 49044 - DNA, 1898 bp, Zea Mays
atattttctatgttttgttagcgattgatcttttttacatggtcaagttaagatgacattcatcagcgaattttcccaccgctcagcagtgacctcgttcccgtcctcctcgcatccctctcgtccgccgccgcctggctcgcgccgccgacagtttctcggcccagatcgagacacgcccgccatcctacaccaggtgccgaggccttcgccgatcaaagagatcccagacagcagctatctagtcagtggatcatttgaccaggcggtgttgactgctttatccgtcgccgatgaaatacacatggcttctttggagagcgctagcgaccaggatgagctcctggagatgcttgaatcggctgggatggtgcttgtgcaggcactaaaagaactcaggagggcctctgagatgtttgctcagcttaagatgatgtttggttcagtgccatcagtgcctgctagagttttccttacaggagctaccattcaaatggcagaaggatctatatctgacctcagaccaatctttgaggagtaccttgccaattggagatatacggatgatgaggtttatgtttttgatggaggaaatgacagcacttcaaatggttttgtcgttaaatctattatgtcaactggccagtattttgaggtggcagaattgtatacagtaacattcctctgtattgtctctcaagatagtgaaactgctatctcatgggcagaaaaggctcatctaactgagcaaagccggcaggttttttttttttgtaaacgctacttaataattctactacagcataagaatctgagtgttccattatgctaacataggtcttccagcgtgggatcttataggtccagataattttcatgctaaagtaggattcttatgttcccaaaactatttcttgtatgaattaattcccactacagtatgcttctcatttccgaataacttctatagttccatgctaaactagggctcttcatatttccaaagcaatttgttttgaattcccgtcattctttattttctttagaggttttactgttgcattcttttttcatcaagacattttttttctttctttctacaggacctactaaaaaagcttcatgcagtgcaattagctgcaaataaaaaactgtccactgttgaaggggtaaaacaaacagcagagaggaacctttctacttctacaaatgactcaacaccatcgccacatgaggatcctccaaagatagttcctgcgtgcgatgggctcaaaaaggtcctgctgaagtctgctcaacaagctcagcatgttgcaaatcattttgatccgtttttctggtggtttcattcaattcgcctgaagtttgggaaaatacatattgttctacccagtggtaagttagtgtttctgttctctctgctgttctcagccatgtacgtgctgcgaaggaaaactgctggcttgaagagggctgtgttccagcaagctgcttccctgcgacgagcattttttgatgcacttcagcttgcgttctctgtccagatgaaccctctagctgctgttcaacaagtgccacaagcccctcgaggaagctggtgattggtgatgttctttatgccttgatctatgtaacattataactcaactgaaattcaacaggcaaccagatttcatgtcgcggaaaatgtggctgtgtaaatactagtgtgcttaatgcagcatgaatgtgatgatgacctgggtttttttgtgtccattctcacctgaagcatattggactggggattatttacaagagctatggcttttgaattggggaaacggattaagtgcaaccaaaccaattagtgtaaccgatgaaaccaagacataaggatggatattttttaaaaaggt

SEQ ID NO: 49045 - DNA, 1280 bp, Zea Mays
atattttctatgttttgttagcgattgatcttttttacatggtcaagttaagatgacattcatcagcgaattttcccaccgctcagcagtgacctcgttcccgtcctcctcgcatccctctcgtccgccgccgcctggctcgcgccgccgacagtttctcggcccagatcgagacacgcccgccatcctacaccaggtgccgaggccttcgccgatcaaagagatcccagacagcagatccgtccgtgccctgctcctcgaaccatggggacctctgcccaggaatcgcctctctggaagcgtatcgacgatgccgagtactatctagtcagtggatcatttgaccaggcggtgttgactgctttatccgtcgccgatgaaatacacatggcttctttggagagcgctagcgaccaggatgagctcctggagatgcttgaatcggctgggatggtgcttgtgcaggcactaaaagaactcaggaggacctactaaaaaagcttcatgcagtgcaattagctgcaaataaaaaactgtccactgttgaaggggtaaaacaaacagcagagaggaacctttctacttctacaaatgactcaacaccatcgccacatgaggatcctccaaagatagttcctgcgtgcgatgggctcaaaaaggtcctgctgaagtctgctcaacaagctcagcatgttgcaaatcattttgatccgtttttctggtggtttcattcaattcgcctgaagtttgggaaaatacatattgttctacccagtggtaagttagtgtttctgttctctctgctgttctcagccatgtacgtgctgcgaaggaaaactgctggcttgaagagggctgtgttccagcaagctgcttccctgcgacgagcattttttgatgcacttcagcttgcgttctctgtccagatgaaccctctagctgctgttcaacaagtgccacaagcccctcgaggaagctggtgattggtgatgttctttatgccttgatctatgtaacattataactcaactgaaattcaacaggcaaccagatttcatgtcgcggaaaatgtggctgtgtaaatactagtgtgcttaatgcagcatgaatgtgatgatgacctgggtttttttgtgtccattctcacctgaagcatattggactggggattatttacaagagctatggcttttgaattggggaaacggattaagtgcaaccaaaccaattagtgtaaccgatgaaaccaagacataaggatggatattttttaaaaaggt

SEQ ID NO: 49046 - DNA, 195 bp, Zea Mays
atgctttgcttgattttctacctaggttctccagattccacagtgccactcccaagtgccgacagctgctcgctcggctctctctccgtgctccaggaatccagggtgatctttgcagctgctgtttggagtgatcatcggtgtcatggccaatgtataaaagggcctgctattggtggtggtggtggtgggtag

SEQ ID NO: 49047 - DNA, 1507 bp, Zea Mays
cgacgtgatacgccgctctctcgcgatatgccgccgcatattccgttctcccggcggcgcgcggcgagtgattatcgagccagtaagccatttgcaagcactgaactgaaccctcagagcgttgttgcgatggaccaaatcgctacccccgacgaaacagcacatgcctctgcaccttcagttcataagctgtttgatgctaaattaggccaccatagcgtgatggatggcaccttggcatccacgagtcagtcatcaaacatcaagacccagctgatccggtcatcaagcttgtcaaggagcatatcagttaaccttgagaagaggagccctgaatctgatcctgaaagcccacagtctcacgtctcgcatcctaaatttgcagaacccatgttctcgaattcttcgacgttctgcacaagcttgttttcgtcatcttcgacaacagagccatgccgtcaaatgggcactttacctttcctgcctcacccccctaagtgtgagcagcaggtttcagctggtcactcatcgagctcctctctgcttttaagtggtgataccggtttagatgtggctgaacagtcagatgatctgaacgacttgctcaatctttcgggagatgcttctgatggcagcttccatggagaaaacaatgccttagcttttgacgaacagatggaatttcagttcctgtctgagcagctagaaattgccatcactgacaatgagaagaatcctcatttagatgacatatacggcacaccaccacagctgtcatcacttccagtatcatcttgctccaatcagaatctagggtcaccagttaaagtccagcttagctcatctcagtcatcttctagctctgcaacagctaacaagtcaagattgaggtggacacttgagcttcatgagcgttttgtggaggccgtgaaaaagcttgaaggtcctgaaaaagcaactcccaaaggtgtgctgaaactaatgaaggtagaaggtctaacaatttatcatgtgaagagccatctgcagaagtatcggcttgcaaaatatattcctgagcctaaagacgataagaaggcttcctcggaggataaaaaagcacaattaggaaagggcagcattgattcaagcaaaaacaagaatttacaagtggcagaagctctaaggatgcaaatagaggttcagaaacagcttcatgaacaattagaggtgcaaaggcagttgcagctacggatagaggaacatgcaagatacttgcagaaaatactagaagagcagcagaaggccggcaatgtgccactaaaagctccaaccaaagcacaagcaacaaagtcgtcacctgaatcgacgtcagacgagagaactgaatccgaggtagacaccatttctccgcggccacccaagaacaggaacccgggtgtagacgcagaatgcaaatcgccgggaaggatcaagcgaacgaaggttcaggctgatcttgaaaacgagggcctgtgttcatagcgag

SEQ ID NO: 49048 - DNA, 1912 bp, Zea Mays
catagtaaaaaaaagcaaaataaaaaattcggctggtggagagagagagaggtggagagagaggagaggagatgcggacagatctcgagaaataaccaaatcagaaaacggaaccggaaatgcagcgagggagggagggagggaggctgcccattattaactctccctccccccacgcagaagacgacgaccggaagcaaaacagccagccaaccaaccaaccagaccagggatggatggtgcgcaccaagaaagggggcaccgcaccgagccaatgatctgcaagaagagaggtaggatttaggcacggcacctatagcccctgacgagagagagagggagagagatttggtcttggataagagtggagagactggagacgggtgggtggagtgagagaagtcactcggggagcctccagattctgaatctcccgcaacccgtctcatcgccggagtggagttccaggcgagtgattatcgagccagtaagccatttgcaagcactgaactgaaccctcagagcgttgttgcgatggaccaaatcgctacccccgacgaaacagcacatgcctctgcaccttcagttcataagctgtttgatgctaaattaggccaccatagcgtgatggatggcaccttggcatccacgagtcagtcatcaaacatcaagacccagctgatccggtcatcaagcttgtcaaggagcatatcagttaaccttgagaagaggagccctgaatctgatcctgaaagcccacagtctcacgtctcgcatcctaaatttgcagaacccatgttctcgaattcttcgacgttctgcacaagcttgttttcgtcatcttcgacaacagagccatgccgtcaaatgggcactttacctttcctgcctcacccccctaagtgtgagcagcaggtttcagctggtcactcatcgagctcctctctgcttttaagtggtgataccggtttagatgtggctgaacagtcagatgatctgaacgacttgctcaatctttcgggagatgcttctgatggcagcttccatggagaaaacaatgccttagcttttgacgaacagatggaatttcagttcctgtctgagcagctagaaattgccatcactgacaatgagaagaatcctcatttagatgacatatacggcacaccaccacagctgtcatcacttccagtatcatcttgctccaatcagaatctagggtcaccagttaaagtccagcttagctcatctcagtcatcttctagctctgcaacagctaacaagtcaagattgaggtggacacttgagcttcatgagcgttttgtggaggccgtgaaaaagcttgaaggtcctgaaaaagcaactcccaaaggtgtgctgaaactaatgaaggtagaaggtctaacaatttatcatgtgaagagccatctgcagaagtatcggcttgcaaaatatattcctgagcctaaagacgataagaaggcttcctcggaggataaaaaagcacaattaggaaagggcagcattgattcaagcaaaaacaagaatttacaagtggcagaagctctaaggatgcaaatagaggttcagaaacagcttcatgaacaattagaggtgcaaaggcagttgcagctacggatagaggaacatgcaagatacttgcagaaaatactagaagagcagcagaaggccggcaatgtgccactaaaagctccaaccaaagcacaagcaacaaagtcgtcacctgaatcgacgtcagacgagagaactgaatccgaggtagacaccatttctccgcggccacccaagaacaggaacccgggtgtagacgcagaatgcaaatcgccgggaaggatcaagcgaacgaaggttcaggctgatcttgaaaacgagggcctgtgttcatagcgag

SEQ ID NO: 49049 - DNA, 1798 bp, Zea Mays
gagagaggtggagagagaggagaggagatgcggacagatctcgagaaataaccaaatcagaaaacggaaccggaaatgcagcgagggagggagggagggaggctgcccattattaactctccctccccccacgcagaagacgacgaccggaagcaaaacagccagccaaccaaccaaccagaccagggatggatggtgcgcaccaagaaagggggcaccgcaccgagccaatgatctgcaagaagagaggtaggatttaggcacggcacctatagcccctgacgagagagagagggagagagatttggtcttggataagagtggagagactggagacgggtgggtggagtgagagaagtcactcggggagcctccagattctgaatctcccgcaacccgtctcatcgccggagtggagttccaggcgagtgattatcgagccagtaagccatttgcaagcactgaactgaaccctcagagcgttgttgcgatggaccaaatcgctacccccgacgaaacagcacatgcctctgcaccttcagttcataagctgtttgatgctaaattaggccaccatagcgtgatggatggcaccttggcatccacgagtcagtcatcaaacatcaagacccagctgatccggtcatcaagcttgtcaaggagcatatcagttaaccttgagaagaggagccctgaatctgatcctgaaagcccacagtctcacgtctcgcatcctaaatttgcagaacccatgttctcgaattcttcgacgttctgcacaagcttgttttcgtcatcttcgacaacagagccatgccgtcaaatgggcactttacctttcctgcctcacccccctaagtgtgagcagcaggtttcagctggtcactcatcgagctcctctctgcttttaagtggtgataccggtttagatgtggctgaacagtcagatgatctgaacgacttgctcaatctttcgggagatgcttctgatggcagcttccatggagaaaacaatgccttagcttttgacgaacagatggaatttcagttcctgtctgagcagctagaaattgccatcactgacaatgagaagaatcctcatttagatgacatatacggcacaccaccacagctgtcatcacttccagtatcatcttgctccaatcagaatctagggtcaccagttaaagtccagcttagctcatctcagtcatcttctagctctgcaacagctaacaagtcaagattgaggtggacacttgagcttcatgagcgttttgtggaggccgtgaaaaagcttgaaggtcctgaaaaagcaactcccaaaggtgtgctgaaactaatgaaggtagaaggtctaacaatttatcatgtgaagagccatctgcagaagtatcggcttgcaaaatatattcctgagcctaaagacgataagaaggcttcctcggaggataaaaaagcacaattaggaaagggcagcattgattcaagcaaaaacaagtgcaaaggcagttgcagctacggatagaggaacatgcaagatacttgcagaaaatactagaagagcagcagaaggccggcaatgtgccactaaaagctccaaccaaagcacaagcaacaaagtcgtcacctgaatcgacgtcagacgagagaactgaatccgaggtagacaccatttctccgcggccacccaagaacaggaacccgggtgtagacgcagaatgcaaatcgccgggaaggatcaagcgaacgaaggttcaggctgatcttgaaaacgagggcctgtgttcatagcgag

SEQ ID NO: 49050 - DNA, 1754 bp, Zea Mays
ctcgagaaataaccaaatcagaaaacggaaccggaaatgcagcgagggagggagggagggaggctgcccattattaactctccctccccccacgcagaagacgacgaccggaagcaaaacagccagccaaccaaccaaccagaccagggatggatggtgcgcaccaagaaagggggcaccgcaccgagccaatgatctgcaagaagagaggtaggatttaggcacggcacctatagcccctgacgagagagagagggagagagatttggtcttggataagagtggagagactggagacgggtgggtggagtgagagaagtcactcggggagcctccagattctgaatctcccgcaacccgtctcatcgccggagtggagttccaggcgagtgattatcgagccagtaagccatttgcaagcactgaactgaaccctcagagcgttgttgcgatggaccaaatcgctacccccgacgaaacagcacatgcctctgcaccttcagttcataagctgtttgatgctaaattaggccaccatagcgtgatggatggcaccttggcatccacgagtcagtcatcaaacatcaagacccagctgatccggtcatcaagcttgtcaaggagcatatcagttaaccttgagaagaggagccctgaatctgatcctgaaagcccacagtctcacgtctcgcatcctaaatttgcagaacccatgttctcgaattcttcgacgttctgcacaagcttgttttcgtcatcttcgacaacagagccatgccgtcaaatgggcactttacctttcctgcctcacccccctaagtgtgagcagcaggtttcagctggtcactcatcgagctcctctctgcttttaagtggtgataccggtttagatgtggctgaacagtcagatgatctgaacgacttgctcaatctttcgggagatgcttctgatggcagcttccatggagaaaacaatgccttagcttttgacgaacagatggaatttcagttcctgtctgagcagctagaaattgccatcactgacaatgagaagaatcctcatttagatgacatatacggcacaccaccacagctgtcatcacttccagtatcatcttgctccaatcagaatctagggtcaccagttaaagtccagcttagctcatctcagtcatcttctagctctgcaacagctaacaagtcaagattgaggtggacacttgagcttcatgagcgttttgtggaggccgtgaaaaagcttgaaggtcctgaaaaagcaactcccaaaggtgtgctgaaactaatgaaggtagaaggtctaacaatttatcatgtgaagagccatctgcagaagtatcggcttgcaaaatatattcctgagcctaaagacgaaggcttcctcggaggataaaaaagcacaattaggaaagggcagcattgattcaagcaaaaacaagtgcaaaggcagttgcagctacggatagaggaacatgcaagatacttgcagaaaatactagaagagcagcagaaggccggcaatgtgccactaaaagctccaaccaaagcacaagcaacaaagtcgtcacctgaatcgacgtcagacgagagaactgaatccgaggtagacaccatttctccgcggccacccaagaacaggaacccgggtgtagacgcagaatgcaaatcgccgggaaggatcaagcgaacgaaggttcaggctgatcttgaaaacgagggcctgtgttcatagcgag

SEQ ID NO: 49051 - DNA, 1784 bp, Zea Mays
agcgagggagggagggagggaggctgcccattattaactctccctccccccacgcagaagacgacgaccggaagcaaaacagccagccaaccaaccaaccagaccagggatggatggtgcgcaccaagaaagggggcaccgcaccgagccaatgatctgcaagaagagaggtaggatttaggcacggcacctatagcccctgacgagagagagagggagagagatttggtcttggataagagtggagagactggagacgggtgggtggagtgagagaagtcactcggggagcctccagattctgaatctcccgcaacccgtctcatcgccggagtggagttccaggcgagtgattatcgagccagtaagccatttgcaagcactgaactgaaccctcagagcgttgttgcgatggaccaaatcgctacccccgacgaaacagcacatgcctctgcaccttcagttcataagctgtttgatgctaaattaggccaccatagcgtgatggatggcaccttggcatccacgagtcagtcatcaaacatcaagacccagctgatccggtcatcaagcttgtcaaggagcatatcagttaaccttgagaagaggagccctgaatctgatcctgaaagcccacagtctcacgtctcgcatcctaaatttgcagaacccatgttctcgaattcttcgacgttctgcacaagcttgttttcgtcatcttcgacaacagagccatgccgtcaaatgggcactttacctttcctgcctcacccccctaagtgtgagcagcaggtttcagctggtcactcatcgagctcctctctgcttttaagtggtgataccggtttagatgtggctgaacagtcagatgatctgaacgacttgctcaatctttcgggagatgcttctgatggcagcttccatggagaaaacaatgccttagcttttgacgaacagatggaatttcagttcctgtctgagcagctagaaattgccatcactgacaatgagaagaatcctcatttagatgacatatacggcacaccaccacagctgtcatcacttccagtatcatcttgctccaatcagaatctagggtcaccagttaaagtccagcttagctcatctcagtcatcttctagctctgcaacagctaacaagtcaagattgaggtggacacttgagcttcatgagcgttttgtggaggccgtgaaaaagcttgaaggtcctgaaaaagcaactcccaaaggtgtgctgaaactaatgaaggtagaaggtctaacaatttatcatgtgaagagccatctgcagaagtatcggcttgcaaaatatattcctgagcctaaagacgaaggcttcctcggaggataaaaaagcacaattaggaaagggcagcattgattcaagcaaaaacaagaatttacaagtggcagaagctctaaggatgcaaatagaggttcagaaacagcttcatgaacaattagaggtgcaaaggcagttgcagctacggatagaggaacatgcaagatacttgcagaaaatactagaagagcagcagaaggccggcaatgtgccactaaaagctccaaccaaagcacaagcaacaaagtcgtcacctgaatcgacgtcagacgagagaactgaatccgaggtagacaccatttctccgcggccacccaagaacaggaacccgggtgtagacgcagaatgcaaatcgccgggaaggatcaagcgaacgaaggttcaggctgatcttgaaaacgagggcctgtgttcatagcgag

SEQ ID NO: 49052 - DNA, 1513 bp, Zea Mays
gagggaggctgcccattattaactctccctccccccacgcagaagacgacgaccggaagcaaaacagccagccaaccaaccaaccagaccagggatggatggtgcgcaccaagaaagggggcaccgcaccgagccaatgatctgcaagaagagaggtaggatttaggcacggcacctatagcccctgacgagagagagagggagagagatttggtcttggataagagtggagagactggagacgggtgggtggagtgagagaagtcactcggggagcctccagattctgaatctcccgcaacccgtctcatcgccggagtggagttccaggcgagtgattatcgagccagtaagccatttgcaagcactgaactgaaccctcagagcgttgttgcgatggaccaaatcgctacccccgacgaaacagcacatgcctctgcaccttcagttcataagctgtttgatgctaaattaggccaccatagcgtgatggatggcaccttggcatccacgagtcagtcatcaaacatcaagacccagctgatccggtcatcaagcttgtcaaggagcatatcagttaaccttgagaagaggagccctgaatctgatcctgaaagcccacagtctcacgtctcgcatcctaaatttgcagaacccatgttctcgaattcttcgacgttctgcacaagcttgttttcgtcatcttcgacaacagagccatgccgtcaaatgggcactttacctttcctgcctcacccccctaagtgtgagcagcaggtttcagctggtcactcatcgagctcctctctgcttttaagtggtgataccggtttagatgtggctgaacagtcagatgatctgaacgacttgctcaatctttcgggagatgcttctgatggcagcttccatggagaaaacaatgccttagcttttgacgaacagatggaatttcagttcctgtctgagcagctagaaattgccatcactgacaatgagaagaatcctcatttagatgacatatacggcacaccaccacagctgtcatcacttccagtatcatcttgctccaatcagaatctagggtcaccagttaaagtccagcttagctcatctcagtcatcttctagctctgcaacagctaacaagtcaagattgaggtggacacttgagcttcatgagcgttttgtggaggccgtgaaaaagcttgaaggtcctgaaaaagcaactcccaaaggtgtgctgaaactaatgaaggtagaaggtctaacaatttatcatgtgaagagccatctgcagaagtatcggcttgcaaaatatattcctgagcctaaagacgataagaaggcttcctcggaggataaaaaagcacaattaggaaagggcagcattgattcaagcaaaaacaagaatttacaagtggcagaagctctaaggatgcaaatagaggttcagaaacagcttcatgaacaattagagatgttttcagcactgatgatttcaattccaccaccag

SEQ ID NO: 49053 - DNA, 1018 bp, Zea Mays
gggaggctgcccattattaactctccctccccccacgcagaagacgacgaccggaagcaaaacagccagccaaccaaccaaccagaccagggatggatggtgcgcaccaagaaagggggcaccgcaccgagccaatgatctgcaagaagagaggtaggatttaggcacggcacctatagcccctgacgagagagagagggagagagatttggtcttggataagagtggagagactggagacgggtgggtggagtgagagaagtcactcggggagcctccagattctgaatctcccgcaacccgtctcatcgccggagtggagttccaggacatatacggcacaccaccacagctgtcatcacttccagtatcatcttgctccaatcagaatctagggtcaccagttaaagtccagcttagctcatctcagtcatcttctagctctgcaacagctaacaagtcaagattgaggtggacacttgagcttcatgagcgttttgtggaggccgtgaaaaagcttgaaggtcctgaaaaagcaactcccaaaggtgtgctgaaactaatgaaggtagaaggtctaacaatttatcatgtgaagagccatctgcagaagtatcggcttgcaaaatatattcctgagcctaaagacgataagaaggcttcctcggaggataaaaaagcacaattaggaaagggcagcattgattcaagcaaaaacaagtgcaaaggcagttgcagctacggatagaggaacatgcaagatacttgcagaaaatactagaagagcagcagaaggccggcaatgtgccactaaaagctccaaccaaagcacaagcaacaaagtcgtcacctgaatcgacgtcagacgagagaactgaatccgaggtagacaccatttctccgcggccacccaagaacaggaacccgggtgtagacgcagaatgcaaatcgccgggaaggatcaagcgaacgaaggttcaggctgatcttgaaaacgagggcctgtgttcatagcgag

SEQ ID NO: 49054 - DNA, 1742 bp, Zea Mays
ctgcccattattaactctccctccccccacgcagaagacgacgaccggaagcaaaacagccagccaaccaaccaaccagaccagggatggatggtgcgcaccaagaaagggggcaccgcaccgagccaatgatctgcaagaagagaggtaggatttaggcacggcacctatagcccctgacgagagagagagggagagagatttggtcttggataagagtggagagactggagacgggtgggtggagtgagagaagtcactcggggagcctccagattctgaatctcccgcaacccgtctcatcgccggagtggagttccaggcgagtgattatcgagccagtaagccatttgcaagcactgaactgaaccctcagagcgttgttgcgatggaccaaatcgctacccccgacgaaacagcacatgcctctgcaccttcagttcataagctgtttgatgctaaattaggccaccatagcgtgatggatggcaccttggcatccacgagtcagtcatcaaacatcaagacccagctgatccggtcatcaagcttgtcaaggagcatatcagttaaccttgagaagaggagccctgaatctgatcctgaaagcccacagtctcacgtctcgcatcctaaatttgcagaacccatgttctcgaattcttcgacgttctgcacaagcttgttttcgtcatcttcgacaacagagccatgccgtcaaatgggcactttacctttcctgcctcacccccctaagtgtgagcagcaggtttcagctggtcactcatcgagctcctctctgcttttaagtggtgataccggtttagatgtggctgaacagtcagatgatctgaacgacttgctcaatctttcgggagatgcttctgatggcagcttccatggagaaaacaatgccttagcttttgacgaacagatggaatttcagttcctgtctgagcagctagaaattgccatcactgacaatgagaagaatcctcatttagatctgtcatcacttccagtatcatcttgctccaatcagaatctagggtcaccagttaaagtccagcttagctcatctcagtcatcttctagctctgcaacagctaacaagtcaagattgaggtggacacttgagcttcatgagcgttttgtggaggccgtgaaaaagcttgaaggtcctgaaaaagcaactcccaaaggtgtgctgaaactaatgaaggtagaaggtctaacaatttatcatgtgaagagccatctgcagaagtatcggcttgcaaaatatattcctgagcctaaagacgataagaaggcttcctcggaggataaaaaagcacaattaggaaagggcagcattgattcaagcaaaaacaagaatttacaagtggcagaagctctaaggatgcaaatagaggttcagaaacagcttcatgaacaattagaggtgcaaaggcagttgcagctacggatagaggaacatgcaagatacttgcagaaaatactagaagagcagcagaaggccggcaatgtgccactaaaagctccaaccaaagcacaagcaacaaagtcgtcacctgaatcgacgtcagacgagagaactgaatccgaggtagacaccatttctccgcggccacccaagaacaggaacccgggtgtagacgcagaatgcaaatcgccgggaaggatcaagcgaacgaaggttcaggctgatcttgaaaacgagggcctgtgttcatagcgag

SEQ ID NO: 49055 - DNA, 1583 bp, Zea Mays
cccattattaactctccctccccccacgcagaagacgacgaccggaagcaaaacagccagccaaccaaccaaccagaccagggatggatggtgcgcaccaagaaagggggcaccgcaccgagccaatgatctgcaagaagagaggtaggatttaggcacggcacctatagcccctgacgagagagagagggagagagatttggtcttggataagagtggagagactggagacgggtgggtggagtgagagaagtcactcggggagcctccagattctgaatctcccgcaacccgtctcatcgccggagtggagttccaggcgagtgattatcgagccagtaagccatttgcaagcactgaactgaaccctcagagcgttgttgcgatggaccaaatcgctacccccgacgaaacagcacatgcctctgcaccttcagttcataagctgtttgatgctaaattaggccaccatagcgtgatggatggcaccttggcatccacgagtcagtcatcaaacatcaagacccagctgatccggtcatcaagcttgtcaaggagcatatcagttaaccttgagaagaggagccctgaatctgatcctgaaagcccacagtctcacgtctcgcatcctaaatttgcagaacccatgttctcgaattcttcgacgttctgcacaagcttgttttcgtcatcttcgacaacagagccatgccgtcaaatgggcactttacctttcctgcctcacccccctaagtgtgagcagcaggtttcagctggtcactcatcgagctcctctctgcttttaagtggtgataccggtttagatgtggctgaacagtcagatgatctgaacgacttgctcaatctttcgggagatgcttctgatggcagcttccatggagaaaacaatgccttagcttttgacgaacagatggaatttcagttcctgtctgagcagctagaaattgccatcactgacaatgagaagaatcctcatttagatgacatatacggcacaccaccacagctgtcatcacttccagtatcatcttgctccaatcagaatctagggtcaccagttaaagtccagcttagctcatctcagtcatcttctagctctgcaacagctaacaagtcaagattgaggtggacacttgagcttcatgagcgttttgtggaggccgtgaaaaagcttgaaggtcctgaaaaagcaactcccaaaggtgtgctgaaactaatgaaggtagaaggtctaacaatttatcatgtgaagagccatctgcaggtgcaaaggcagttgcagctacggatagaggaacatgcaagatacttgcagaaaatactagaagagcagcagaaggccggcaatgtgccactaaaagctccaaccaaagcacaagcaacaaagtcgtcacctgaatcgacgtcagacgagagaactgaatccgaggtagacaccatttctccgcggccacccaagaacaggaacccgggtgtagacgcagaatgcaaatcgccgggaaggatcaagcgaacgaaggttcaggctgatcttgaaaacgagggcctgtgttcatagcgag

SEQ ID NO: 49056 - DNA, 1717 bp, Zea Mays
attaactctccctccccccacgcagaagacgacgaccggaagcaaaacagccagccaaccaaccaaccagaccagggatggatggtgcgcaccaagaaagggggcaccgcaccgagccaatgatctgcaagaagagaggtaggatttaggcacggcacctatagcccctgacgagagagagagggagagagatttggtcttggataagagtggagagactggagacgggtgggtggagtgagagaagtcactcggggagcctccagattctgaatctcccgcaacccgtctcatcgccggagtggagttccaggcgagtgattatcgagccagtaagccatttgcaagcactgaactgaaccctcagagcgttgttgcgatggaccaaatcgctacccccgacgaaacagcacatgcctctgcaccttcagttcataagctgtttgatgctaaattaggccaccatagcgtgatggatggcaccttggcatccacgagtcagtcatcaaacatcaagacccagctgatccggtcatcaagcttgtcaaggagcatatcagttaaccttgagaagaggagccctgaatctgatcctgaaagcccacagtctcacgtctcgcatcctaaatttgcagaacccatgttctcgaattcttcgacgttctgcacaagcttgttttcgtcatcttcgacaacagagccatgccgtcaaatgggcactttacctttcctgcctcacccccctaagtgtgagcagcaggtttcagctggtcactcatcgagctcctctctgcttttaagtggtgataccggtttagatgtggctgaacagtcagatgatctgaacgacttgctcaatctttcgggagatgcttctgatggcagcttccatggagaaaacaatgccttagcttttgacgaacagatggaatttcagttcctgtctgagcagctagaaattgccatcactgacaatgagaagaatcctcatttagatgacatatacggcacaccaccacagctgtcatcacttccagtatcatcttgctccaatcagaatctagggtcaccagttaaagtccagcttagctcatctcagtcatcttctagctctgcaacagctaacaagtcaagattgaggtggacacttgagcttcatgagcgttttgtggaggccgtgaaaaagcttgaaggtcctgaaaaagcaactcccaaaggtgtgctgaaactaatgaaggtagaaggtctaacaatttatcatgtgaagagccatctgcagataagaaggcttcctcggaggataaaaaagcacaattaggaaagggcagcattgattcaagcaaaaacaagaatttacaagtggcagaagctctaaggatgcaaatagaggttcagaaacagcttcatgaacaattagaggtgcaaaggcagttgcagctacggatagaggaacatgcaagatacttgcagaaaatactagaagagcagcagaaggccggcaatgtgccactaaaagctccaaccaaagcacaagcaacaaagtcgtcacctgaatcgacgtcagacgagagaactgaatccgaggtagacaccatttctccgcggccacccaagaacaggaacccgggtgtagacgcagaatgcaaatcgccgggaaggatcaagcgaacgaaggttcaggctgatcttgaaaacgagggcctgtgttcatagcgag

SEQ ID NO: 49057 - DNA, 932 bp, Zea Mays
cagaagacgacgaccggaagcaaaacagccagccaaccaaccaaccagaccagggatggatggtgcgcaccaagaaagggggcaccgcaccgagccaatgatctgcaagaagagaggtaggatttaggcacggcacctatagcccctgacgagagagagagggagagagatttggtcttggataagagtggagagactggagacgggtgggtggagtgagagaagtcactcggggagcctccagattctgaatctcccgcaacccgtctcatcgccggagtggagttccagctaacaagtcaagattgaggtggacacttgagcttcatgagcgttttgtggaggccgtgaaaaagcttgaaggtcctgaaaaagcaactcccaaaggtgtgctgaaactaatgaaggtagaaggtctaacaatttatcatgtgaagagccatctgcagaagtatcggcttgcaaaatatattcctgagcctaaagacgataagaaggcttcctcggaggataaaaaagcacaattaggaaagggcagcattgattcaagcaaaaacaagaatttacaagtggcagaagctctaaggatgcaaatagaggttcagaaacagcttcatgaacaattagaggtgggtccgtagtaggtgctatgttatcacatctcgcaagtactaccgttggctcatatgcttgagacatatagtaggaattagtctggcgtttggtttcggttctatatggccacttgttttctgttcatcagccatcgttatccttgaactggcaacttatatacatcgatgagtacctaaaagaattaatcgtatactatgaatatctacacccattgtcatgtgagtaagaaaacatgtagtaacaggcactcattgatcagatgttttcagcactgatgatttcaattccaccaccag

SEQ ID NO: 49058 - DNA, 1550 bp, Zea Mays
gtttcctccttcagcaacaacagttttctctggatttttagagttcttcgtcctttacttttttttgcccccttctatcatccagcaaccgtatccaatctttactgcgagtgattatcgagccagtaagccatttgcaagcactgaactgaaccctcagagcgttgttgcgatggaccaaatcgctacccccgacgaaacagcacatgcctctgcaccttcagttcataagctgtttgatgctaaattaggccaccatagcgtgatggatggcaccttggcatccacgagtcagtcatcaaacatcaagacccagctgatccggtcatcaagcttgtcaaggagcatatcagttaaccttgagaagaggagccctgaatctgatcctgaaagcccacagtctcacgtctcgcatcctaaatttgcagaacccatgttctcgaattcttcgacgttctgcacaagcttgttttcgtcatcttcgacaacagagccatgccgtcaaatgggcactttacctttcctgcctcacccccctaagtgtgagcagcaggtttcagctggtcactcatcgagctcctctctgcttttaagtggtgataccggtttagatgtggctgaacagtcagatgatctgaacgacttgctcaatctttcgggagatgcttctgatggcagcttccatggagaaaacaatgccttagcttttgacgaacagatggaatttcagttcctgtctgagcagctagaaattgccatcactgacaatgagaagaatcctcatttagatgacatatacggcacaccaccacagctgtcatcacttccagtatcatcttgctccaatcagaatctagggtcaccagttaaagtccagcttagctcatctcagtcatcttctagctctgcaacagctaacaagtcaagattgaggtggacacttgagcttcatgagcgttttgtggaggccgtgaaaaagcttgaaggtcctgaaaaagcaactcccaaaggtgtgctgaaactaatgaaggtagaaggtctaacaatttatcatgtgaagagccatctgcagaagtatcggcttgcaaaatatattcctgagcctaaagacgataagaaggcttcctcggaggataaaaaagcacaattaggaaagggcagcattgattcaagcaaaaacaagaatttacaagtggcagaagctctaaggatgcaaatagaggttcagaaacagcttcatgaacaattagaggtgcaaaggcagttgcagctacggatagaggaacatgcaagatacttgcagaaaatactagaagagcagcagaaggccggcaatgtgccactaaaagctccaaccaaagcacaagcaacaaagtcgtcacctgaatcgacgtcagacgagagaactgaatccgaggtagacaccatttctccgcggccacccaagaacaggaacccgggtgtagacgcagaatgcaaatcgccgggaaggatcaagcgaacgaaggttcaggctgatcttgaaaacgagggcctgtgttcatagcgag

SEQ ID NO: 49059 - DNA, 1509 bp, Zea Mays
cagcaaccgtatccaatctttactgcgagtgattatcgagccagtaagccatttgcaagcactgaactgaaccctcagagcgttgttgcgatggaccaaatcgctacccccgacgaaacagcacatgcctctgcaccttcagttcataagctgtttgatgctaaattaggccaccatagcgtgatggatggcaccttggcatccacgagtcagtcatcaaacatcaagacccagctgatccggtcatcaagcttgtcaaggagcatatcagttaaccttgagaagaggagccctgaatctgatcctgaaagcccacagtctcacgtctcgcatcctaaatttgcagaacccatgttctcgaattcttcgacgttctgcacaagcttgttttcgtcatcttcgacaacagagccatgccgtcaaatgggcactttacctttcctgcctcacccccctaagtgtgagcagcaggtttcagctggtcactcatcgagctcctctctgcttttaagtggtgataccggtttagatgtggctgaacagtcagatgatctgaacgacttgctcaatctttcgggagatgcttctgatggcagcttccatggagaaaacaatgccttagcttttgacgaacagatggaatttcagttcctgtctgagcagctagaaattgccatcactgacaatgagaagaatcctcatttagatgacatatacggcacaccaccacagctgtcatcacttccagtatcatcttgctccaatcagaatctagggtcaccagttaaagtccagcttagctcatctcagtcatcttctagctctgcaacagctaacaagtcaagattgaggtggacacttgagcttcatgagcgttttgtggaggccgtgaaaaagcttgaaggtcctgaaagtaagttggtcattctgctttatctctcacatgttttcaggttatcttaataaatagtttgttcatatatttacagaagcaactcccaaaggtgtgctgaaactaatgaaggtagaaggtctaacaatttatcatgtgaagagccatctgcagataagaaggcttcctcggaggataaaaaagcacaattaggaaagggcagcattgattcaagcaaaaacaagaatttacaagtggcagaagctctaaggatgcaaatagaggttcagaaacagcttcatgaacaattagaggtgggtccgtagtaggtgctatgttatcacatctcgcaagtactaccgttggctcatatgcttgagacatatagtaggaattagtctggcgtttggtttcggttctatatggccacttgttttctgttcatcagccatcgttatccttgaactggcaacttatatacatcgatgagtacctaaaagaattaatcgtatactatgaatatctacacccattgtcatgtgagtaagaaaacatgtagtaacaggcactcattgatcagatgttttcagcactgatgatttcaattccaccaccag

SEQ ID NO: 49060 - DNA, 2602 bp, Zea Mays
cgacggacagcgacggtggctagcgatgccatcgtgaggaacagatgcgccggccgaggtcgccgaggagcaggagcccagccaggtgtgtggtgtggaaagtgcaagtgtggaccgagctttggttgggtctactacctcgagtagcgagttcggccacccactccaccacgctaccgtgacacggccacgtagcccccgcgccgccccgcccgccggccgggccaatgagcgaccgagcgtttcaaaatttgaagaccctgttagaccaggcagtcaaaccaaacccaagatctcccgtgtcccgccctcctcgccagtcgcctccctgctcctgctgccggcagtggcggtggtgtcgcctctcctcagtcctcactcctcctcaccccagcggaagcgcgggcccgactccgtccgacctcgccgtctcggccccgagggcggggagaagccggcagggtgagcccgacgctacgccacgccgcgccaccatgccgctgccgctggccaaggcgaggagggggtcctccccgcagccgtcaccgcagcccgcgcggtcctcctgcaggtcgcagctggagcaggacgtgaagaggctgcgcaaggcgctgcaggacgagacggcgctgcacgccgtgctcgagggcgccctgggccgcgccgccgtcacgctcgccgacatggcctacctccccaccaacgcgcaggagctgctctcgaccatctgcatcctcgagacggcggtcacgaagctggaggaggagatggtctccctgcatttccagctcacccaggagaggaacgagagacggctcgtcgagtaccgcctcaagcacctgcccccgccgccgtccgcttgctcctgccactccgggaaactcggaccagacgaccccacaggcgaaaaatgcagtagccaaacggaggaggtttaccctcgcgccgtcttgcatgaacaggctgtgaaactgcagaggcagatctctgtcaagagcttcgtcgatcctaaccagctttccgaggacatcgtccgctgcatgaggaacatctttatttcgctgtcagattcctgcagggactcctcaaggaactcgaacatggagaatcagcagtccattccatctcccaccgggaactattcgatttctgccttctggactctgtcggaaccgtcgtccatttcttcttgggtacagagccctcaagtggatttgaactacaacaacaatgtattagcttcggagactgtttttgacccttacaaagctcgcgagaagcttagctgggctgacataggcagctacggtgcggcggccgaagtttcgtggatgtcagttgggaaaaagcaacttgagtatgctgcggagtcacttcgtaagttcagattgttcattgagcagctggcagaaataaaccctattcacctcagtgatgatgcaaggttggcattttggatcaacttatacaatgcgttgatgatgcacgcttaccttgcttatggtgttccacggagtgacatgaaactgttttcactgatgcaaaaggctgcatacaccattgggggccactcattcagcgctgcgtttattgaatacgtaattctgaagatgaaaccaccaagccataggccacagatggctctgcttcttgccctccagaagattaaggtacccgaggagcagaaaaagttctgcattgcggcacctgagccacttctgacgtttgctctcagctgtggaatgtattcttctcccggggtgaagatttacacggctaacaacgtgagggaagaacttcaagacgcacagcgtgatttcattagagcatcggtaggagtgagtcggaaagggaagcttctggcccctaagatactgcactgctttgcccgtggctttgtcgacgacaacagcttcccaatctggatctcgcatttcctaccccagcagcaagctacgtttgtcgatcactgcgtgtctcaacggcggcaaagtctcctgggcacccgtactttcggcgtcgttccatttgattctcggtttcgctacctcttcctgccagatgcgggatcgttaaattaactgctatccgagattcagatgcttccctgcctagacaacctgaatgcctaactgccatctgccaacagaagtgatgaagtccaaagccctgatagaccgctcaacagtgtaagagctgtctctcgagttaccatcatgtctggaaaagtaagtttatatccagcgaccatgagagtatcaagatttgagatagcagtcactggattgacccgtgtcattggaagtcagatgcatatctttggaattccttaatcggttcgtccgtctcgacatcttgtcgagtttcattaaaagaaaaactgtacataactcctactcccagataaaaacttaagttcatcatggtgctatttatgcattgtatctgttcatcatggtcctgacgttcatcgcattaacggttatcaagaccactacgcatcactcttaacagcttttctcggattttgttgctagcaaatgtctctggatcctatatgttactgactggtttactgtaccttattacccttgtcgcctct

SEQ ID NO: 49061 - DNA, 2553 bp, Zea Mays
aacagatgcgccggccgaggtcgccgaggagcaggagcccagccaggtgtgtggtgtggaaagtgcaagtgtggaccgagctttggttgggtctactacctcgagtagcgagttcggccacccactccaccacgctaccgtgacacggccacgtagcccccgcgccgccccgcccgccggccgggccaatgagcgaccgagcgtttcaaaatttgaagaccctgttagaccaggcagtcaaaccaaacccaagatctcccgtgtcccgccctcctcgccagtcgcctccctgctcctgctgccggcagtggcggtggtgtcgcctctcctcagtcctcactcctcctcaccccagcggaagcgcgggcccgactccgtccgacctcgccgtctcggccccgagggcggggagaagccggcagggtgagcccgacgctacgccacgccgcgccaccatgccgctgccgctggccaaggcgaggagggggtcctccccgcagccgtcaccgcagcccgcgcggtcctcctgcaggtcgcagctggagcaggacgtgaagaggctgcgcaaggcgctgcaggacgagacggcgctgcacgccgtgctcgagggcgccctgggccgcgccgccgtcacgctcgccgacatggcctacctccccaccaacgcgcaggagctgctctcgaccatctgcatcctcgagacggcggtcacgaagctggaggaggagatggtctccctgcatttccagctcacccaggagaggaacgagagacggctcgtcgagtaccgcctcaagcacctgcccccgccgccgtccgcttgctcctgccactccgggaaactcggaccagacgaccccacaggcgaaaaatgcagtagccaaacggaggaggtttaccctcgcgccgtcttgcatgaacaggctgtgaaactgcagaggcagatctctgtcaagagcttcgtcgatcctaaccagctttccgaggacatcgtccgctgcatgaggaacatctttatttcgctgtcagattcctgcagggactcctcaaggaactcgaacatggagaatcagcagtccattccatctcccaccgggaactattcgatttctgccttctggactctgtcggaaccgtcgtccatttcttcttgggtacagagccctcaagtggatttgaactacaacaacaatgtattagcttcggagactgtttttgacccttacaaagctcgcgagaagcttagctgggctgacataggcagctacggtgcggcggccgaagtttcgtggatgtcagttgggaaaaagcaacttgagtatgctgcggagtcacttcgtaagttcagattgttcattgagcagctggcagaaataaaccctattcacctcagtgatgatgcaaggttggcattttggatcaacttatacaatgcgttgatgatgcacgcttaccttgcttatggtgttccacggagtgacatgaaactgttttcactgatgcaaaaggctgcatacaccattgggggccactcattcagcgctgcgtttattgaatacgtaattctgaagatgaaaccaccaagccataggccacagatggtgaagatttacacggctaacaacgtgagggaagaacttcaagacgcacagcgtgatttcattagagcatcggtaggagtgagtcggaaagggaagcttctggcccctaagatactgcactgctttgcccgtggctttgtcgacgacaacagcttcccaatctggatctcgcatttcctaccccagcagcaagctacgtttgtcgatcactgcgtgtctcaacggcggcaaagtctcctgggcacccgtactttcggcgtcgttccatttgattctcggtttcgctacctcttcctgccagatgcgggatcgttaaattaactgctatccgagattcagatgcttccctgcctagacaacctgaatggtaaactgcactagcctttagtgtgtttatctcctgttatatatgaattcagtcacaacaaaaggtttatgtgattgccctctgctgatatattacatgctttcagacagcctaactgccatctgccaacagaagtgatgaagtccaaagccctgatagaccgctcaacagtgtaagagctgtctctcgagttaccatcatgtctggaaaagtaagtttatatccagcgaccatgagagtatcaagatttgagatagcagtcactggattgacccgtgtcattggaagtcagatgcatatctttggaattccttaatcggttcgtccgtctcgacatcttgtcgagtttcattaaaagaaaaactgtacataactcctactcccagataaaaacttaagttcatcatggtgctatttatgcattgtatctgttcatcatggtcctgacgttcatcgcattaacggttatcaagaccactacgcatcactcttaacagcttttctcggattttgttgctagcaaatgtctctggatcctatatgttactgactggtttactgtaccttattacccttgtcgcctct

SEQ ID NO: 49062 - DNA, 1902 bp, Zea Mays
aggccggatctttatcgggcctgcggcacctagcccagcgcttgcacctcacccaggacgaggcccagggaggatcctcccgactccgacgctgcgtaggactccccgactccgacggcgtccgcccgcgtcgcgtgccacgcccacgccacgccggccgccgcgaggaaagaacaccgggtacttccccttcccttacgctccagtttcacaagtcgcgagccgtgcgtcgcgtcgacgcgagttccgcgtgagggagcaggcagttgcagttggaggcggtgacgaaaccctaggacttgagctccagcgcacggctcgggtcctcctcaccgttcccggcgatggaccggcggcaggagctctgcaggaacttccagcgcggcagctgcaagtacggatcgcactgcaggtttgtgcacgcctcctctcagcagcagcagcaggcgaagcccaacccgtttgggttcggcttagggagtaggcagcagcaacagcagcagtcttcgtttcgtgcgcagttccagcagcagcagcagcagaagcccaacccgtttggatttggagtgcaaggcagtgcggctgcacagtccagaaacgctcctggccaggcaaagccatttcaaaataaatgggtaagggacccctcagccccaacgaagcaacaggaagcggcacagccaccagcagcagcccacacctcctgtacagatcctgagtcctgcaggcaacagattgccgaggattttaagaatgaaactccactctggaagcttacgtgctatgctcacctcaggagcggtccttgtgacatcacgggagatattagctttgaagagctgagagctaacgcgtatgagcaaggcaggcaagggcatcctctgcagtcaatagtagagggtgaaaaaaatttgaaaaatgcaaagctgacggactttaataattttctgaacacgccacgtctatcggtatcacaaactccaagctttccaactgtggcttccttccctgaagtgaaaaataactcagcatttggggtttctcaaaataatggaccaccagtgtttagtagtttcagtcaaattggagtaacaactaatatgggacctgggtccagaactacaccaggagtcccaaccaatactctttttggtcaatctacccaaccaagccatccaacatttcctgcacctacttttggtcgttctgatatgaaatttggagtttcagggacaataaaaatgaaaatcaggatgatagtatctggttgaaggaaaaatggtcaattggagagattccgctgggtgaaccgccacagaggcacgttagtcacgtgttttagcaacattcttgtatttctgtgtcgtggaaccactgtcaagtcagcttcactgtctccttccatattgtcgggacaccatcttacaatttctcctccaggttcataaccataacacgtcaaattgggggcataaaatgcacctgaaatgctgattgggcagcgtagaaacttcttgtatcctgcatcacatactctgtctctattgttttcttgttagctccatgtacttcgtcacattcagggctcgtaatatcccgatttcttgttttagggtttgttgagtttagctgtgggttttaaaaagccgttgcagctgtttttttttttgcggaaattgtaccatacatggaagcagtagtttttgaagaagcggaatttggttctatctgtgtgtttttttttgaaaagggggaggggggcttggcgatttgtttgtttctcttttttgtagaagagacggtttctaaaagttaaactgtacgtccactaggtcaatcttgcagggtttgtgattctagggtcctttgcgcatgcaagacgattttgtttctagaagttgg

SEQ ID NO: 49063 - DNA, 1296 bp, Zea Mays
caaaatgtacctgcttgagcaacaagacctgtatttatcagaactcaattggagctgcgccttttgtagcaacacaacagtagagggtgaaaaaaatttgaaaaatgcaaagctgacggactttaataattttctgaacacgccacgtctatcggtatcacaaactccaagctttccaactgtggcttccttccctgaagtgaaaaataactcagcatttggggtttctcaaaataatggaccaccagtgtttagtagtttcagtcaaattggagtaacaactaatatgggacctgggtccagaactacaccaggagtcccaaccaatactctttttggtcaatctacccaaccaagccatccaacatttcctgcacctacttttggtcgttctgatatgaaatttggagtttcaggtccatttggaagccagatatcacaacaatcatctgggacttttcaaggctcaaacatgtccagttttggcaatttctcaaagcctcatgccagctaccagcagtccccttcctcctctagccatcacagagacattgataggcagtcacaagatttacttagtggaattgtggttcctacaagtgccacaaatgaagctcctgttgaggacaataaaaatgaaaatcaggatgatagtatctggttgaaggaaaaatggtcaattggagagattccgctgggtgaaccgccacagaggcacgttagtcacgtgttttagcaacattcttgtatttctgtgtcgtggaaccactgtcaagtcagcttcactgtctccttccatattgtcgggacaccatcttacaatttctcctccaggttcataaccataacacgtcaaattgggggcataaaatgcacctgaaatgctgattgggcagcgtagaaacttcttgtatcctgcatcacatactctgtctctattgttttcttgttagctccatgtacttcgtcacattcagggctcgtaatatcccgatttcttgttttagggtttgttgagtttagctgtgggttttaaaaagccgttgcagctgtttttttttttgcggaaattgtaccatacatggaagcagtagtttttgaagaagcggaatttggttctatctgtgtgtttttttttgaaaagggggaggggggcttggcgatttgtttgtttctcttttttgtagaagagacggtttctaaaagttaaactgtacgtccactaggtcaatcttgcagggtttgtgattctagggtcctttgcgcatgcaagacgattttgtttctagaagttgg

SEQ ID NO: 49064 - DNA, 3431 bp, Zea Mays
cttccctccaccggtcgctcctagcccggactaggcggcctcccagtctccaccgggccggggctgcccacccccaagtccccaactgcatccgcgccgccgccatccgtcgcagtcgcagtcgcactgctggctgcccgccgtaccgtaccaacaagcttcttctacttctcttcctcgcccagtctcccctccttccctaccatccccgcatttcgaaaggagctagctaagctagcgcaccggcctgcttcccttccctcccgccgtccgcgcttcttccatttcccttcgcaacggcctctcggtcacacccgagcccgtagctgcgccgtactccgtccgtccgtccgtgccacaccgccacccaccaggccagagccaaccgggagtggccacgcagagtggttttggcggcttgctggctagctctgcctctgcccgccacctcggaccagccagtgtccatgccgcggatggccaagctgctgctccagctgaaggcggcggcggacaggaggcacggccccggccccggccggcgccacccgctcgcgccccgccacgcggccgcgtccgccaccagattcgtgcccgcctgcctcgccctcgccgccgccgccaccacgctcgtcgcgctggcgctcacgctgcagaatcgcggcctcggccccgccgacccctctccctcctccgtctcgccacgcggcggcggcttcgcggtggttgtcaacacgtggaggcggcccgcgctgctgcggaggtccgtggcgcactacgcggcctgcgggggcgtggacgccgtccacgtggtgtggagcgagccgcggccgccgccggaacccctgcgccggggcgtcctcgggctcggcggcgcccggcggcgcgtgcggttcgagatcaacgcgggcgacagcctcaacaacaggttcaggcccatccgggcgctcgagtcggacgccgtcttctccgtcgacgacgacctcatcgtcccctgctccgcgctgcgcttcgccttctccgtctggcggaccgcgccctccgccatggtcggcttcgtgccgcggatgcactggcctaccgacccggtatgatgtgttgagtccatcagtcgctataattcttccaaagcgagtgccgcatattgggatctctgttccaacacgaggatcggaatctggaatggaagtatctgctcgtagttgtagctcttatgttcagatttgaattgttggtttggcacaaattaaacaaagaataagtttgaacatgttgaaggatatatgtaaaaaaaaacaaatcttaaccggagttgttgtttcttctgcagagaagcactgaagatgcataccgatacggaagctggtggtcagtttggtggacagggacatacagcatggttctttccaaagcggggttcttccacaagaagtacctggaaatgtacaccaaccagatgccaccgtccattcgcagatatgtggatgagaacaggaactgtgaggacatcgccatggcttttcttgttgcaaatgctactggagccccgcctatatgggtgcaaggaaggatatttgagattggatcgagcggcatcagcagcctgaaaggccatggcttgcagagatcaaggtgcctcaacgcgttcgccgccatgtacggccacatgccgctcgtagccaccacagtcaaggccgtggacagccgcgggagctggttctggtgataaagatatgtgcctcttttttctgtacatcctagccttgcctctagtctacattgtttatatagcagagtttgaaaccagagataagaatgagtaggctagtgtgtctgtgcataattcatccgcaccttagaacacaggctatatagattttacagatggaactgagacgcagtgattatatccatattgctgttggagccttagtccaacatcaggatcagctaaggccctgtttggttcctttagttagtaggtaactatgtgcaaggagattgtttatgtatgtgagacagtaattattaattcaatgaatgaaatttatggtggtggtctgtctctctcctctattttgtgtggaggatcgactattttgtgtgcgcctggctgcctgccaagatcctgatgctgtccagttcagtgatcagtgggctaacttttatgtggctgtgacggccgaaacaggatagtgaggataaggggggcactctttcgttgggccagcgctgcatgcttccttgcttgcttttttgtcgcgcctgcttctcccccctctgcctcttggtgctgcttcctggtgggggaagggaaggagaaggctgtgtgcgtcctgcgccgataacgcgatggtgtccattgtcactgaggtatgggcgctcgctggatgcggcccggcgtccaaggcggcggcggtagcggtagcggcgcaggagttgccggcgcagcatccttctcctgccgcagcgggaggagggaaggccaagaagagagccgtgccagtgtcgttcagaggcgtcagcagcggcggtggtcaggaccaccagcgtgaggccgccgccgtcgtcgtcgggcggcggcgcggcctcgcgtcgtgcgcgctcgccgccgtcgccgcctcgttctccgcccgcgctgaccgccccgcgcgggcgcttgtcctcgaggaagacgacgacatcgagctgctggagcgcgtgaaggaggacaggaagaagcggctgcagaagcagggcatcatcagctcctccggcgccgagaccggacctcatctacaggctcagcaaagtcgggcaggccattgacaacgacgacctcccagccgcgagcagcgtgctgggaccaagctcagacgcccagtgggtgcagaacatcaatgcagctttctccaagctcagctcaagcccggagcagaggaacgtggtcgacagcttcaacagctcgctggccacactgtttacatcagtgagcaagctcgaccctgaatcctccaagtcggcgttcgtgtcgtccgcgacggcgttggagaaatggatcgcgttagctggactgggcggccagctcaagggctactgatgcgtgcgaggggaagagaagcactgggttgttctatgtttgggtccggcatttgtgaatctcctgaagagggtaccgtgaccgagaactgagttcagataggcatgctatgctcatcaagaaactgtgactgtttttgagactctgctgttacttacaagtggtaggaaacgaagttgtcttgtatcttgttgtccagtttaactttcgaaattccaaagcagctggcgtttattttttttaaatccaaaaattgttgcatgccatgtgggactgaggcaggctcgtgttggtatggtattgacaggatacacgatagttggaagcagcatacacaatagcacaaaccgat

SEQ ID NO: 49065 - DNA, 3200 bp, Zea Mays
cttccctccaccggtcgctcctagcccggactaggcggcctcccagtctccaccgggccggggctgcccacccccaagtccccaactgcatccgcgccgccgccatccgtcgcagtcgcagtcgcactgctggctgcccgccgtaccgtaccaacaagcttcttctacttctcttcctcgcccagtctcccctccttccctaccatccccgcatttcgaaaggagctagctaagctagcgcaccggcctgcttcccttccctcccgccgtccgcgcttcttccatttcccttcgcaacggcctctcggtcacacccgagcccgtagctgcgccgtactccgtccgtccgtccgtgccacaccgccacccaccaggccagagccaaccgggagtggccacgcagagtggttttggcggcttgctggctagctctgcctctgcccgccacctcggaccagccagtgtccatgccgcggatggccaagctgctgctccagctgaaggcggcggcggacaggaggcacggccccggccccggccggcgccacccgctcgcgccccgccacgcggccgcgtccgccaccagattcgtgcccgcctgcctcgccctcgccgccgccgccaccacgctcgtcgcgctggcgctcacgctgcagaatcgcggcctcggccccgccgacccctctccctcctccgtctcgccacgcggcggcggcttcgcggtggttgtcaacacgtggaggcggcccgcgctgctgcggaggtccgtggcgcactacgcggcctgcgggggcgtggacgccgtccacgtggtgtggagcgagccgcggccgccgccggaacccctgcgccggggcgtcctcgggctcggcggcgcccggcggcgcgtgcggttcgagatcaacgcgggcgacagcctcaacaacaggttcaggcccatccgggcgctcgagtcggacgccgtcttctccgtcgacgacgacctcatcgtcccctgctccgcgctgcgcttcgccttctccgtctggcggaccgcgccctccgccatggtcggcttcgtgccgcggatgcactggcctaccgacccgagaagcactgaagatgcataccgatacggaagctggtggtcagtttggtggacagggacatacagcatggttctttccaaagcggggttcttccacaagaagtacctggaaatgtacaccaaccagatgccaccgtccattcgcagatatgtggatgagaacaggaactgtgaggacatcgccatggcttttcttgttgcaaatgctactggagccccgcctatatgggtgcaaggaaggatatttgagattggatcgagcggcatcagcagcctgaaaggccatggcttgcagagatcaaggtgcctcaacgcgttcgccgccatgtacggccacatgccgctcgtagccaccacagtcaaggccgtggacagccgcgggagctggttctggtgataaagatatgtgcctcttttttctgtacatcctagccttgcctctagtctacattgtttatatagcagagtttgaaaccagagataagaatgagtaggctagtgtgtctgtgcataattcatccgcaccttagaacacaggctatatagattttacagatggaactgagacgcagtgattatatccatattgctgttggagccttagtccaacatcaggatcagctaaggccctgtttggttcctttagttagtaggtaactatgtgcaaggagattgtttatgtatgtgagacagtaattattaattcaatgaatgaaatttatggtggtggtctgtctctctcctctattttgtgtggaggatcgactattttgtgtgcgcctggctgcctgccaagatcctgatgctgtccagttcagtgatcagtgggctaacttttatgtggctgtgacggccgaaacaggatagtgaggataaggggggcactctttcgttgggccagcgctgcatgcttccttgcttgcttttttgtcgcgcctgcttctcccccctctgcctcttggtgctgcttcctggtgggggaagggaaggagaaggctgtgtgcgtcctgcgccgataacgcgatggtgtccattgtcactgaggtatgggcgctcgctggatgcggcccggcgtccaaggcggcggcggtagcggtagcggcgcaggagttgccggcgcagcatccttctcctgccgcagcgggaggagggaaggccaagaagagagccgtgccagtgtcgttcagaggcgtcagcagcggcggtggtcaggaccaccagcgtgaggccgccgccgtcgtcgtcgggcggcggcgcggcctcgcgtcgtgcgcgctcgccgccgtcgccgcctcgttctccgcccgcgctgaccgccccgcgcgggcgcttgtcctcgaggaagacgacgacatcgagctgctggagcgcgtgaaggaggacaggaagaagcggctgcagaagcagggcatcatcagctcctccggcgccgagaccgggtatttgcaggacctcatctacaggctcagcaaagtcgggcaggccattgacaacgacgacctcccagccgcgagcagcgtgctgggaccaagctcagacgcccagtgggtgcagaacatcaatgcagctttctccaagctcagctcaagcccggagcagaggaacgtggtcgacagcttcaacagctcgctggccacactgtttacatcagtgagcaagctcgaccctgaatcctccaagtcggcgttcgtgtcgtccgcgacggcgttggagaaatggatcgcgttagctggactgggcggccagctcaagggctactgatgcgtgcgaggggaagagaagcactgggttgttctatgtttgggtccggcatttgtgaatctcctgaagagggtaccgtgaccgagaactgagttcagataggcatgctatgctcatcaagaaactgtgactgtttttgagactctgctgttacttacaagtggtaggaaacgaagttgtcttgtatcttgttgtccagtttaactttcgaaattccaaagcagctggcgtttattttttttaaatccaaaaattgttgcatgccatgtgggactgaggcaggctcgtgttggtatggtattgacaggatacacgatagttggaagcagcatacacaatagcacaaaccgat

SEQ ID NO: 49066 - DNA, 692 bp, Zea Mays
tgagttgcagccgctcgctctcggtatttgcaggacctcatctacaggctcagcaaagtcgggcaggccattgacaacgacgacctcccagccgcgagcagcgtgctgggaccaagctcagacgcccagtgggtgcagaacatcaatgcagctttctccaagctcaagcccggagcagaggaacgtggtcgacagcttcaacagctcgctggccacactgtttacatcagtgagcaagctcgaccctgaatcctccaagtcggcgttcgtgtcgtccgcgacggcgttggagaaatggatcgcgttagctggactgggcggccagctcaagggctactgatgcgtgcgaggggaagagaagcactgggttgttctatgtttgggtccggcatttgtgaatctcctgaagagggtaccgtgaccgagaactgagttcagataggcatgctatgctcatcaagaaactgtgactgtttttgagactctgctgttacttacaagtggtaggaaacgaagttgtcttgtatcttgttgtccagtttaactttcgaaattccaaagcagctggcgtttattttttttaaatccaaaaattgttgcatgccatgtgggactgaggcaggctcgtgttggtatggtattgacaggatacacgatagttggaagcagcatacacaatagcacaaaccgat

SEQ ID NO: 49067 - DNA, 361 bp, Zea Mays
aaatgaaccaaattaagtgttttggctgcacccatgaacctgtgtggcactgtgattgtatgccacgtgtggagtccatgcagcgctagcaccatatagaccactctccactgcctgcgtggtgtgctcatggctgtttgctccctcgttcagccaccttagggtttggttttgtgaattttttcccctactcttgagctccaaatttgtggtcatcgtgtgagtgatgtggcagtgttcaggcctaggctttctcgtggagtttttcacccgtgtggtgaatgttccgtgctctgcaaagtgagttcacgcccatgcccgggtccgccatggttcggaggtcgcggggatgctgttgtcg

SEQ ID NO: 49068 - DNA, 1012 bp, Zea Mays
aaatgaaccaaattaagtgttttggctgcacccatgaacctgtgtggcactgtgattgtatgccacgtgtggagtccatgcagcgctagcaccatatagaccactctccactgcctgcgtggtgtgctcatggctgtttgctccctcgttcagccaccttagggtttggttttgtgaattttttcccctactcttgagctccaaatttgtggtcatcgtgtgagtgatgtggcagtgttcaggcctaggctttctcgtggagtttttcacccgtgtggtgaatgttccgtgctctgcaaagaacacctagaagaagtggtgtctgcagaaggagttcacttcagtgcctgctgatccagtggtggagtttcatctaacttcttaccagagtagaaggattttagatcttctcctgcaataaggccagcccccggtgcattttccacctttcttgtattataaaattttatcacttatatgctgcattaggtgataggagttgaatgattaaacacttgatgcattaccatccttgcaagattgattatcataccttgttacctgttttataaaaactagtaatgcttagtcatgcttatagattaagaaaaatatttttgatctatgactcatgatttttaaaaaagaaaacgggcttgggatgatggaggcatcctcccgcggggatgaattcatcattcaagcagggtacctctgccaggtatcaaactttgagaatttgtttaaaatgagaccagacgttgagctcgacaggtcgcccgtctgtgtcgatcaaggactgtaccgattgtaggcctgttgatctaggatcttttaactggccacatacctcgtcatgggtaagcctgaacccgactactccatatgtgaaaagacaatcgcccactgggagtggagagatggcgggagtggcgtgtacccacctggcacgtggctggatggtggagtaccgtactctcgggtggcgcggaccggttcacgtagtggagga

SEQ ID NO: 49069 - DNA, 2466 bp, Zea Mays
cttttctctacaaattagaagaaagccgtccatccaatcccaactggtataacaagatcccgctcattcccatcacgcccatcattttccgttcttcaatccgtcaatccagtccccatccccacggcgccgacgactcgggggcttccccccttggacttggcccgggtgggagtagcacgtcggggaagggaagcaagcgtccgcgagtaaggacagaaaaccgaagggaggagtggagaggaggagcttgcttggagcgggtggacgtgtggtgtgtatatagttaagcgggcgggcgggcgggcagccaatgccgtcgggcgcgcagggctaggagcatgggcggagggggcgcgatcgtgcacggcttccgccgctggttccaccgccggagcgaaggctccacctccaactccaaccagtcgtccctcgccggcgagggggaagcggacgacggctcatccgatctcgaggtcatcgaggacccggatctcctcggcctccgcgccatccgcgtgcccaagcgcaagatgccgctgcccgtcgagagccacaggaagaactcagtagaaatggagttcttcacagagtacggagaggcaagccagtaccagatccaagaagtcattggtaaagggagctacggagtagttgctgcagctgtggacacccgcaccggtgagcgggttgctatcaagaagatcaatgatgtgtttgagcacgtctcggatgccacacgcatactgcgggagatcaagctcctccggttgcttcgtcacccagacatagtcgagattaagcacatcatgctccctccttctcggagggagttccaagacatctatgttgtttttgagctcatggagtcggatctccatcaagtgatcagggcgaatgatgacctcacccctgaacatcaccagtttttcctgtaccaacttcttcgagctctcaagtacatacatgccgctaatgtattccatcgtgatctaaagcccaagaatatactggctaactcggactgcaaactgaaaatatgtgactttggacttgcccgtgcatcattcaatgatgccccttcagctatattttggacagactatgtggcaacaaggtggtaccgggcacctgaactatgtggttcctttttctccaaatacactcctgcaattgatatttggagcattgggtgcatatttgctgaacttctcactggaaggccactatttcctgggaagaatgttgtacaccaattagatattataacagatcttcttgggactccatcatctgagaccttatcccggattcgaaatgagaaggccaggagatatttgagctgcatgcggaaaaaatatcccgtgccctttactcataaatttcgacatgctgatcctttggctcttcgtcttctagagcgtttgcttgcatttgatcctaaagaccggcctagtgcagaagaggctctagctgatccatactttgcatcccttgctaatgtggaacgtgagccatcaagacacccgatttctaaacttgagtttgaatttgaaagaaagaagctggccaaagatgatgttagagaactgatctatcgagagattttggagtatcatccacagatgctggaggagtacatgaaaggcggagaacagattagcttcctctatccaagcggagtcgaccgcttcaaactgcagttcgctcatcttgaggagcattacagcaaaggagaaagaggttccccactgcaaagaaagcatgcttccttaccaagggaaagagtggttgtatccaaggatggcaatactgaacaacaaattaatgaccaggagagaagcgcagattctgttgcccgcactaccgtgagccctccaaggtcagaggatgctgacatggatgatgtgaaacccacaagcttaagctctcggagctacctgaagagtgcaagcataagcgcttccaagtgcgtcgttgtcagaaataaacacccagagccagaggatgatggaatacctgaggagatggaaggcaccgtcgatggattgtctgaaaaggtctccaggatgcactcctaaggcaggactgtccatggcgacagcaatctcgacacaagatttctgtctggtgcactgtaatgccgacgacacactgtttggatcttgtgtacacccacagctagttcaactaagatgtagcactagttcgtccatggaggaagcagaatggacgatgaagtgtggtcagcctgtcgaccatgaggtgttttcttccaatggagtctagggtatgtttgagttctacaacggcttgtgccgtacgaagtgtcagcagtgtacgaggaggaggatatcgttgtcagtacacattttgcctgtctagaaaattatgagtactttctccgatcacaagtacatgtacatccatgtttgtcttaagataaaaaaagaaaattcacaaata

SEQ ID NO: 49070 - DNA, 2376 bp, Zea Mays
ctcattcccatcacgcccatcattttccgttcttcaatccgtcaatccagtccccatccccacggcgccgacgactcgggggcttccccccttggacttggcccgggtgggagtagcacgtcggggaagggaagcaagcgtccgcgagtaaggacagaaaaccgaagggaggagtggagaggaggagcttgcttggagcgggtggacgtgtggtgtgtatatagttaagcgggcgggcgggcgggcagccaatgccgtcgggcgcgcagggctaggagcatgggcggagggggcgcgatcgtgcacggcttccgccgctggttccaccgccggagcgaaggctccacctccaactccaaccagtcgtccctcgccggcgagggggaagcggacgacggctcatccgatctcgaggtcatcgaggacccggatctcctcggcctccgcgccatccgcgtgcccaagcgcaagatgccgctgcccgtcgagagccacaggaagagtacggagaggcaagccagtaccagatccaagaagtcattggtaaagggagctacggagtagttgctgcagctgtggacacccgcaccggtgagcgggttgctatcaagaagatcaatgatgtgtttgagcacgtctcggatgccacacgcatactgcgggagatcaagctcctccggttgcttcgtcacccagacatagtcgagattaagcacatcatgctccctccttctcggagggagttccaagacatctatgttgtttttgagctcatggagtcggatctccatcaagtgatcagggcgaatgatgacctcacccctgaacatcaccagtttttcctgtaccaacttcttcgagctctcaagtacatacatgccgctaatgtattccatcgtgatctaaagcccaagaatatactggctaactcggactgcaaactgaaaatatgtgactttggacttgcccgtgcatcattcaatgatgccccttcagctatattttggacagactatgtggcaacaaggtggtaccgggcacctgaactatgtggttcctttttctccaaatacactcctgcaattgatatttggagcattgggtgcatatttgctgaacttctcactggaaggccactatttcctgggaagaatgttgtacaccaattagatattataacagatcttcttgggactccatcatctgagaccttatcccggattcgaaatgagaaggccaggagatatttgagctgcatgcggaaaaaatatcccgtgccctttactcataaatttcgacatgctgatcctttggctcttcgtcttctagagcgtttgcttgcatttgatcctaaagaccggcctagtgcagaagaggctctagctgatccatactttgcatcccttgctaatgtggaacgtgagccatcaagacacccgatttctaaacttgagtttgaatttgaaagaaagaagctggccaaagatgatgttagagaactgatctatcgagagattttggagtatcatccacagatgctggaggagtacatgaaaggcggagaacagattagcttcctctatccaagcggagtcgaccgcttcaaactgcagttcgctcatcttgaggagcattacagcaaaggagaaagaggttccccactgcaaagaaagcatgcttccttaccaagggaaagagtggttgtatccaaggatggcaatactgaacaacaaattaatgaccaggagagaagcgcagattctgttgcccgcactaccgtgagccctccaaggtcagaggatgctgacatggatgatgtgaaacccacaagcttaagctctcggagctacctgaagagtgcaagcataagcgcttccaagtgcgtcgttgtcagaaataaacacccagagccagaggatgatggaatacctgaggagatggaaggcaccgtcgatggattgtctgaaaaggtctccaggatgcactcctaaggcaggactgtccatggcgacagcaatctcgacacaagatttctgtctggtgcactgtaatgccgacgacacactgtttggatcttgtgtacacccacagctagttcaactaagatgtagcactagttcgtccatggaggaagcagaatggacgatgaagtgtggtcagcctgtcgaccatgaggtgttttcttccaatggagtctagggtatgtttgagttctacaacggcttgtgccgtacgaagtgtcagcagtgtacgaggaggaggatatcgttgtcagtacacattttgcctgtctagaaaattatgagtactttctccgatcacaagtacatgtacatccatgtttgtcttaagataaaaaaagaaaattcacaaata

SEQ ID NO: 49071 - DNA, 1981 bp, Zea Mays
tgggtgggggcgggcggacgactctgccttcctcctgctgctccttgacccgcgggtcacgggaaatctcttgccaagaactcagtagaaatggagttcttcacagagtacggagaggcaagccagtaccagatccaagaagtcattggtaaagggagctacggagtagttgctgcagctgtggacacccgcaccggtgagcgggttgctatcaagaagatcaatgatgtgtttgagcacgtctcggatgccacacgcatactgcgggagatcaagctcctccggttgcttcgtcacccagacatagtcgagattaagcacatcatgctccctccttctcggagggagttccaagacatctatgttgtttttgagctcatggagtcggatctccatcaagtgatcagggcgaatgatgacctcacccctgaacatcaccagtttttcctgtaccaacttcttcgagctctcaagtacatacatgccgctaatgtattccatcgtgatctaaagcccaagaatatactggctaactcggactgcaaactgaaaatatgtgactttggacttgcccgtgcatcattcaatgatgccccttcagctatattttggacagactatgtggcaacaaggtggtaccgggcacctgaactatgtggttcctttttctccaaatacactcctgcaattgatatttggagcattgggtgcatatttgctgaacttctcactggaaggccactatttcctgggaagaatgttgtacaccaattagatattataacagatcttcttgggactccatcatctgagaccttatcccggattcgaaatgagaaggccaggagatatttgagctgcatgcggaaaaaatatcccgtgccctttactcataaatttcgacatgctgatcctttggctcttcgtcttctagagcgtttgcttgcatttgatcctaaagaccggcctagtgcagaagaggctctagctgatccatactttgcatcccttgctaatgtggaacgtgagccatcaagacacccgatttctaaacttgagtttgaatttgaaagaaagaagctggccaaagatgatgttagagaactgatctatcgagagattttggagtatcatccacagatgctggaggagtacatgaaaggcggagaacagattagcttcctctatccaagcggagtcgaccgcttcaaactgcagttcgctcatcttgaggagcattacagcaaaggagaaagaggttccccactgcaaagaaagcatgcttccttaccaagggaaagagtggttgtatccaaggatggcaatactgaacaacaaattaatgaccaggagagaagcgcagattctgttgcccgcactaccgtgagccctccaaggtcagaggatgctgacatggatgatgtgaaacccacaagcttaagctctcggagctacctgaagagtgcaagcataagcgcttccaagtgcgtcgttgtcagaaataaacacccagagccagaggatgatggaatacctgaggagatggaaggcaccgtcgatggattgtctgaaaaggtctccaggatgcactcctaaggcaggactgtccatggcgacagcaatctcgacacaagatttctgtctggtgcactgtaatgccgacgacacactgtttggatcttgtgtacacccacagctagttcaactaagatgtagcactagttcgtccatggaggaagcagaatggacgatgaagtgtggtcagcctgtcgaccatgaggtgttttcttccaatggagtctagggtatgtttgagttctacaacggcttgtgccgtacgaagtgtcagcagtgtacgaggaggaggatatcgttgtcagtacacattttgcctgtctagaaaattatgagtactttctccgatcacaagtacatgtacatccatgtttgtcttaagataaaaaaagaaaattcacaaata

SEQ ID NO: 49072 - DNA, 2224 bp, Zea Mays
gagtgactgcctcgtttccttccgcgtatgcattggggagctgtgcgggtgatgcttttctattttcgatctgatcggtgctgcctttactccgatttcccagcttatgaaataatcgtatatatatgctcctacttactgtaatagtagtatggtgctctcgtcttgcgccgtcaaacttcagttattagctctatatctcggcaattgctggcatcgtccgcgttatactgatcctgtggggaaatcttctctaagttgcccacttgtgtttttgataatctgatcagctgaccagggcaccggctcggcttcaatgagaactcagtagaaatggagttcttcacagagtacggagaggcaagccagtaccagatccaagaagtcattggtaaagggagctacggagtagttgctgcagctgtggacacccgcaccggtgagcgggttgctatcaagaagatcaatgatgtgtttgagcacgtctcggatgccacacgcatactgcgggagatcaagctcctccggttgcttcgtcacccagacatagtcgagattaagcacatcatgctccctccttctcggagggagttccaagacatctatgttgtttttgagctcatggagtcggatctccatcaagtgatcagggcgaatgatgacctcacccctgaacatcaccagtttttcctgtaccaacttcttcgagctctcaagtacatacatgccgctaatgtattccatcgtgatctaaagcccaagaatatactggctaactcggactgcaaactgaaaatatgtgactttggacttgcccgtgcatcattcaatgatgccccttcagctatattttggacagactatgtggcaacaaggtggtaccgggcacctgaactatgtggttcctttttctccaaatacactcctgcaattgatatttggagcattgggtgcatatttgctgaacttctcactggaaggccactatttcctgggaagaatgttgtacaccaattagatattataacagatcttcttgggactccatcatctgagaccttatcccggattcgaaatgagaaggccaggagatatttgagctgcatgcggaaaaaatatcccgtgccctttactcataaatttcgacatgctgatcctttggctcttcgtcttctagagcgtttgcttgcatttgatcctaaagaccggcctagtgcagaagaggctctagctgatccatactttgcatcccttgctaatgtggaacgtgagccatcaagacacccgatttctaaacttgagtttgaatttgaaagaaagaagctggccaaagatgatgttagagaactgatctatcgagagattttggagtatcatccacagatgctggaggagtacatgaaaggcggagaacagattagcttcctctatccaagcggagtcgaccgcttcaaactgcagttcgctcatcttgaggagcattacagcaaaggagaaagaggttccccactgcaaagaaagcatgcttccttaccaagggaaagagtggttgtatccaaggatggcaatactgaacaacaaattaatgaccaggagagaagcgcagattctgttgcccgcactaccgtgagccctccaaggtcagaggatgctgacatggatgatgtgaaacccacaagcttaagctctcggagctacctgaagagtgcaagcataagcgcttccaagtgcgtcgttgtcagaaataaacacccagagccagaggatgatggaatacctgaggagatggaaggcaccgtcgatggattgtctgaaaaggtctccaggatgcactcctaaggcaggactgtccatggcgacagcaatctcgacacaagatttctgtctggtgcactgtaatgccgacgacacactgtttggatcttgtgtacacccacagctagttcaactaagatgtagcactagttcgtccatggaggaagcagaatggacgatgaagtgtggtcagcctgtcgaccatgaggtgttttcttccaatggagtctagggtatgtttgagttctacaacggcttgtgccgtacgaagtgtcagcagtgtacgaggaggaggatatcgttgtcagtacacattttgcctgtctagaaaattatgagtactttctccgatcacaagtacatgtacatccatgtttgtcttaagataaaaaaagaaaattcacaaata

SEQ ID NO: 49073 - DNA, 491 bp, Zea Mays
aggacatctaagattgatctgttgcatgcaagatgatggaatacctgaggagatggaaggcaccgtcgatggattgtctgaaaaggtctccaggatgcactcctaaggcaggactgtccatggcgacagcaatctcgacacaagatttctgtctggtgcactgtaatgccgacgacacactgtttggatcttgtgtacacccacagctagttcaactaagatgtagcactagttcgtccatggaggaagcagaatggacgatgaagtgtggtcagcctgtcgaccatgaggtgttttcttccaatggagtctagggtatgtttgagttctacaacggcttgtgccgtacgaagtgtcagcagtgtacgaggaggaggatatcgttgtcagtacacattttgcctgtctagaaaattatgagtactttctccgatcacaagtacatgtacatccatgtttgtcttaagataaaaaaagaaaattcacaaata

SEQ ID NO: 49074 - DNA, 2015 bp, Zea Mays
aacgactcttgggctacacatacctctcagttggattggagcacaagatccacggtccacctgccgagctcgccaattatactgggccgaccttccatgcattgggcttttctgtcagcccatctaccgcaattcgttcagacgttcacggcccatcctggtgtccgtcctcttccagggggagaaattccggggagacgggagcggcgaggttggcgcgcgccgatacggcggcggaattccggcgaccggctcaacgatccatagctttctttttgtaatctgctccgccagccgaagcaccgggcgttgtcgctcaacctaaccatggcgtcaacctcctctccccaccggaagttgctccactccctggtgtactgggcggtgcagcgctgccggatgtcggagttgccgtgccggctcacggtctccctcaagcgccccgccgaacccgccagctccccgccgctgcgcgtctccgtttcggacacgggggtggggagcaaactggaggagttcctggagctcgacgccctggcgcgtgagattcccgtagagagatgggatggcacactcttagtcacaactactggaatcaatgatgaagccatttatcgttatcaaattaatcttcaagaagagacatcaagtgcaagatttagcaagttggctaccgcatacaaaaatcatgcacgattcagtggaactgaagtctgcctttgtctctcaaatgatgctgatgttgatgattttgtattatggttggtttgtttcttcaaaaagatacaagtgctaagagcagcaaatttagcatgtgagctctttgttgagcaaacaggcaacactggttccagaaatgtctgtctaccacaagattctgatgatgtgcatcattctgttacggcatcaagtattgaccagctagtttctggtcttaaagactactcactctcccatgtaaattcttgcgacaagtgtggcatgtgcttatttgatagagatcttctaaagattggaactggagcagcaaaccatgtagaaagaagaaaagctaaccgactacatgttgaagtagtcatagtgattgcacatattgcatctgattcagattgttgtatggcaaattgctcgtccacgcaggttttgtactttgaagattttgtaccttgtcagatattgcagtcctcttttgatgtgttgatgagcacagactggcaaagctatggtttcaagttaaaaggaggtttgatgggtgatgacggaaacgctgttctcgagtgggataacatggcatttgctcgtattgatatttccattcatacttaccacgaatgtgctatgcaagaacggcagggatctccacaggatagataccttttgaggaaggcactcaaatctgctctaactcacttgaaagcagatcatgcaggagattttcttagttgccatggccagagggttcgtgaatacgttcctgaccttgcggaatcaatcgctgggctgatcttgtcatccaccgatgaagagttccaaggcgaatgctttgcgcttcttgggctaggctccgaacaagacgtctctggaggagctgttcagtcgtcgatctgcgagaagatgatccgcatcatagagataaatgacaccaaggataattcagaggacaacgtgccttatctgttcgaatgcgagaagctggatgaagatagcgagctggacgaaggaggtggagatgaagacatggcttccgatttctagcgttgttttcacccgtctaccgtctcgtagagttgtagtgtagttagagatggcaatgggtgtcgaaaacccgaatacttatgtaggtggatatgagatgatttttatattggtggatatgttaatgaacaacaatccctgcccgttggataaacggtacgatacacgcaccgtatatccgtgagtaaaatatatctgtaccatacaactattattatctaataaaattaaaataaaaccctttttcgactatcgtttat

SEQ ID NO: 49075 - DNA, 3010 bp, Zea Mays
cgtcctcttccagggggagaaattccggggagacgggagcggcgaggttggcgcgcgccgatacggcggcggaattccggcgaccggctcaacgatccatagctttctttttgtaatctgctccgccagccgaagcaccgggcgttgtcgctcaacctaaccatggcgtcaacctcctctccccaccggaagttgctccactccctggtgtactgggcggtgcagcgctgccggatgtcggagttgccgtgccggctcacggtctccctcaagcgccccgccgaacccgccagctccccgccgctgcgcgtctccgtttcggacacgggggtggggagcaaactggaggagttcctggagctcgacgccctggcgcgtgagattcccgtagagagatgggatggcacactcttagtcacaactactggaatcaatgatgaagccatttatcgttatcaaattaatcttcaagaagagacatcaagtgcaagatttagcaagttggctaccgcatacaaaaatcatgcacgattcagtggaactgaagtctgcctttgtctctcaaatgatgctgatgttgatgattttgtattatggttggtttgtttcttcaaaaagatacaagtgctaagagcagcagtaagtatatctgaactgttatctttcctcaagttggaagtgtagtatttcacactttcattttcaatgctcctttgcagcttaaatggcttatttctactcttatgcaatctcagatttacttatccttaatttcttcagtttgattaacaaagctgtttgatgtgtattatcttatgtttttctttctaattcaaagggttaagttagtttagttgccttttagcatattcatcttaatttgcctttgtattgtttaatcaaacaatagtaaatttaatgccatccagatcttaaaaatttcaaacacaccggttgcattatacctattcacttcatgaggcttagttttattgtagttctttacatgtttgtacttttaggtatgattcattcttttttggtaataagtaggatatgaagcatacgttttaatatatttgtgtgggtatggctttgtttgactgaaacaaactgatgtccaaatttgcttatgtcaatgtttattataaaaactcgacctgcggagggtaagactgccccacggcattacaattaagaagacttcatgcagatcgagaaaaccccaaacctccgtcccaccatatacaacggtaccgtagcccatgtgagaacggtcgcggccagggctagaccttagacttgtgcgttggcgtgggacagacgagaggattttttaatcctagcttgaaattcgcttagtcgaactcatgacctgaagagtgctactcataccacctaaccaattcagctagaggccctttcgcgtcaatgtttattatgatggattggaaaaaaacaacaacatgattctagaagttgaaacctcctagataagaacatgaatacatttagaatgcaacatatatttgatattgtcaatggctggagatagttgattagaagtgcattggctacggatatattggtaacaagtatcttggaaaaaaggttatcaataaactaaataggtgtatatatgtccttgagctgattaactgaaacaaaaaaacataacaggtctaaaagtgattaccatttttcagctgtcggtcacttgtggtgtgaccgtccgagtgtgacatttaacttgaattggttgtggaatattttcagtttcgattgttgagtatcaaggacgcatgtaccttgagaatctctgttttgcctctttttccttaagctgacaacttaagttcctgtttggctgtttattttgtacttagaatttagcatgtgagctctttgttgagcaaacaggcaacactggttccagaaatgtctgtctaccacaagattctgatgatgtgcatcattctgttacggcatcaagtattgaccagctagtttctggtcttaaagactactcactctcccatgtaaattcttgcgacaagtgtggcatgtgcttatttgatagagatcttctaaagattggaactggagcagcaaaccatgtagaaagaagaaaagctaaccgactacatgttgaagtagtcatagtgattgcacatattgcatctgattcagattgttgtatggcaaattgctcgtccacgcaggttttgtactttgaagattttgtaccttgtcagatattgcagtcctcttttgatgtgttgatgagcacagactggcaaagctatggtttcaagttaaaaggagccactgctatgcaagaacggcagggatctccacaggatagataccttttgaggaaggcactcaaatctgctctaactcacttgaaagcagatcatgcaggagattttcttagttgccatggccagagggttcgtgaatacgttcctgaccttgcggaatcaatcgctgggctgatcttgtcatccaccgatgaagagttccaaggcgaatgctttgcgcttcttgggctaggctccgaacaagacgtctctggaggagctgttcagtcgtcgatctgcgagaagatgatccgcatcatagagataaatgacaccaaggataattcagaggacaacgtgccttatctgttcgaatgcgagaagctggatgaagatagcgagctggacgaaggaggtggagatgaagacatggcttccgatttctagcgttgttttcacccgtctaccgtctcgtagagttgtagtgtagttagagatggcaatgggtgtcgaaaacccgaatacttatgtaggtggatatgagatgatttttatattggtggatatgttaatgaacaacaatccctgcccgttggataaacggtacgatacacgcaccgtatatccgtgagtaaaatatatctgtaccatacaactattattatctaataaaattaaaataaaaccctttttcgactatcgtttat

SEQ ID NO: 49076 - DNA, 2828 bp, Zea Mays
ggagcggcgaggttggcgcgcgccgatacggcggcggaattccggcgaccggctcaacgatccatagctttctttttgtaatctgctccgccagccgaagcaccgggcgttgtcgctcaacctaaccatggcgtcaacctcctctccccaccggaagttgctccactccctggtgtactgggcggtgcagcgctgccggatgtcggagttgccgtgccggctcacggtctccctcaagcgccccgccgaacccgccagctccccgccgctgcgcgtctccgtttcggacacgggggtggggagcaaactggaggagttcctggagctcgacgccctggcgcgtgagattcccgtagagagatgggatggcacactcttagtcacaactactggaatcaatgatgaagccatttatcgttatcaaattaatcttcaagaagagacatcaagtgcaagatttagcaagttggctaccgcatacaaaaatcatgcacgattcagtggaactgaagtctgcctttgtctctcaaatgatgctgatgttgatgattttgtattatggttggtttgtttcttcaaaaagatacaagtgctaagagcagcaaatttagcatgtgagctctttgttgagcaaacaggcaacactggttccagaaatgtctgtctaccacaagattctgatgatgtgcatcattctgttacggcatcaagtattgaccagctagtttctggtcttaaagactactcactctcccatgtaaattcttgcgacaagtgtggcatgtgcttatttgataggtaaaaaaacctttccatcatgactgtcttacatatttttctcatactactatgctgctaagataattttactgaatttgctaatatatgctccaaaattttcatgctgaagtcacccttattcttacctgggggcatctaggtaggggttgtgctttttgatttgcttgtgtcccttttctgagcttaccaatattctgtttataattacttctagtctttactcaaaatgagatgttttaaaaaccaaatcatatttttctgctatctgtctttatttgaatctttcatcagtagtttatcatctgtattcatttctagcttttttcctgaactcacaatttagaaagctaaatgatatttctggaatctcttttccgtgttctttggagtttgctgttgataaatcttgttaagcagatcgctttttccattattctttgaattcaattgtatatttttttcctttttttcaggtccattgacatcatgttttttgttttaggtatagccctatgtgagaaagctaaccaagaatcactgctatgtgctatgtttgcattcgttgatttttttaagaaatttgcattcatttgtgtttaagacatattttcacacttgttagcatgatttgtgtttaagatatattttcacacttgttagcattagatcttttgtatcttctttcctatatttaaccatgagaaaattgttgatggcagcccacatgcaacagcatcccatgcttcactgtgtatttgcccatttcttaatcgcccaagcccaagcccaagcccaagcccattctctcggcctttctggcatgcatgtgctaagctcctatgtccaaacctttatgtagtctggtctgttgtctattcactcattggcatgctaatgaacacttgcatatcatctgagtgtggtgttatgcatcctcacgggtcaggacagattggtgtgcttccataacatgattagtaagttttagtttttcttccttcttacttcagagatcttctaaagattggaactggagcagcaaaccatgtagaaagaagaaaagctaaccgactacatgttgaagtagtcatagtgattgcacatattgcatctgattcagattgttgtatggcaaattgctcgtccacgcaggttttgtactttgaagattttgtaccttgtcagatattgcagtcctcttttgatgtgttgatgagcacagactggcaaagctatggtttcaagttaaaaggaggtttgatgggtgatgacggaaacgctgttctcgagtgggataacatggcatttgctcgtattgatatttccattcatacttaccacgaatgtgctatgcaagaacggcagggatctccacaggatagataccttttgaggaaggcactcaaatctgctctaactcacttgaaagcagatcatgcaggagattttcttagttgccatggccagagggttcgtgaatacgttcctgaccttgcggaatcaatcgctgggctgatcttgtcatccaccgatgaagagttccaaggcgaatgctttgcgcttcttgggctaggctccgaacaagacgtctctggaggagctgttcagtcgtcgatctgcgagaagatgatccgcatcatagagataaatgacaccaaggataattcagaggacaacgtgccttatctgttcgaatgcgagaagctggatgaagatagcgagctggacgaaggaggtggagatgaagacatggcttccgatttctagcgttgttttcacccgtctaccgtctcgtagagttgtagtgtagttagagatggcaatgggtgtcgaaaacccgaatacttatgtaggtggatatgagatgatttttatattggtggatatgttaatgaacaacaatccctgcccgttggataaacggtacgatacacgcaccgtatatccgtgagtaaaatatatctgtaccatacaactattattatctaataaaattaaaataaaaccctttttcgactatcgtttat

SEQ ID NO: 49077 - DNA, 4075 bp, Zea Mays
ggagcggcgaggttggcgcgcgccgatacggcggcggaattccggcgaccggctcaacgatccatagctttctttttgtaatctgctccgccagccgaagcaccgggcgttgtcgctcaacctaaccatggcgtcaacctcctctccccaccggaagttgctccactccctggtgtactgggcggtgcagcgctgccggatgtcggagttgccgtgccggctcacggtctccctcaagcgccccgccgaacccgccagctccccgccgctgcgcgtctccgtttcggacacgggggtggggagcaaactggaggagttcctggagctcgacgccctggcgcgtgagattcccgtagagagatgggatggcacactcttagtcacaactactggaatcaatgatgaagccatttatcgttatcaaattaatcttcaagaagagacatcaagtgcaagatttagcaagttggctaccgcatacaaaaatcatgcacgattcagtggaactgaagtctgcctttgtctctcaaatgatgctgatgttgatgattttgtattatggttggtttgtttcttcaaaaagatacaagtgctaagagcagcagtaagtatatctgaactgttatctttcctcaagttggaagtgtagtatttcacactttcattttcaatgctcctttgcagcttaaatggcttatttctactcttatgcaatctcagatttacttatccttaatttcttcagtttgattaacaaagctgtttgatgtgtattatcttatgtttttctttctaattcaaagggttaagttagtttagttgccttttagcatattcatcttaatttgcctttgtattgtttaatcaaacaatagtaaatttaatgccatccagatcttaaaaatttcaaacacaccggttgcattatacctattcacttcatgaggcttagttttattgtagttctttacatgtttgtacttttaggtatgattcattcttttttggtaataagtaggatatgaagcatacgttttaatatatttgtgtgggtatggctttgtttgactgaaacaaactgatgtccaaatttgcttatgtcaatgtttattataaaaactcgacctgcggagggtaagactgccccacggcattacaattaagaagacttcatgcagatcgagaaaaccccaaacctccgtcccaccatatacaacggtaccgtagcccatgtgagaacggtcgcggccagggctagaccttagacttgtgcgttggcgtgggacagacgagaggattttttaatcctagcttgaaattcgcttagtcgaactcatgacctgaagagtgctactcataccacctaaccaattcagctagaggccctttcgcgtcaatgtttattatgatggattggaaaaaaacaacaacatgattctagaagttgaaacctcctagataagaacatgaatacatttagaatgcaacatatatttgatattgtcaatggctggagatagttgattagaagtgcattggctacggatatattggtaacaagtatcttggaaaaaaggttatcaataaactaaataggtgtatatatgtccttgagctgattaactgaaacaaaaaaacataacaggtctaaaagtgattaccatttttcagctgtcggtcacttgtggtgtgaccgtccgagtgtgacatttaacttgaattggttgtggaatattttcagtttcgattgttgagtatcaaggacgcatgtaccttgagaatctctgttttgcctctttttccttaagctgacaacttaagttcctgtttggctgtttattttgtacttagaatttagcatgtgagctctttgttgagcaaacaggcaacactggttccagaaatgtctgtctaccacaagattctgatgatgtgcatcattctgttacggcatcaagtattgaccagctagtttctggtcttaaagactactcactctcccatgtaaattcttgcgacaagtgtggcatgtgcttatttgataggtaaaaaaacctttccatcatgactgtcttacatatttttctcatactactatgctgctaagataattttactgaatttgctaatatatgctccaaaattttcatgctgaagtcacccttattcttacctgggggcatctaggtaggggttgtgctttttgatttgcttgtgtcccttttctgagcttaccaatattctgtttataattacttctagtctttactcaaaatgagatgttttaaaaaccaaatcatatttttctgctatctgtctttatttgaatctttcatcagtagtttatcatctgtattcatttctagcttttttcctgaactcacaatttagaaagctaaatgatatttctggaatctcttttccgtgttctttggagtttgctgttgataaatcttgttaagcagatcgctttttccattattctttgaattcaattgtatatttttttcctttttttcaggtccattgacatcatgttttttgttttaggtatagccctatgtgagaaagctaaccaagaatcactgctatgtgctatgtttgcattcgttgatttttttaagaaatttgcattcatttgtgtttaagacatattttcacacttgttagcatgatttgtgtttaagatatattttcacacttgttagcattagatcttttgtatcttctttcctatatttaaccatgagaaaattgttgatggcagcccacatgcaacagcatcccatgcttcactgtgtatttgcccatttcttaatcgcccaagcccaagcccaagcccaagcccattctctcggcctttctggcatgcatgtgctaagctcctatgtccaaacctttatgtagtctggtctgttgtctattcactcattggcatgctaatgaacacttgcatatcatctgagtgtggtgttatgcatcctcacgggtcaggacagattggtgtgcttccataacatgattagtaagttttagtttttcttccttcttacttcagagatcttctaaagattggaactggagcagcaaaccatgtagaaagaagaaaagctaaccgactacatgttgaagtagtcatagtgattgcacatattgcatctgattcagattgttgtatggcaaattgctcgtccacgcaggttttgtactttgaagattttgtaccttgtcagatattgcagtcctcttttgatgtgttgatgagcacagactggcaaagctatggtttcaagttaaaaggaggtttgatgggtgatgacggaaacgctgttctcgagtgggataacatggcatttgctcgtattgatatttccattcatacttaccacgaatgtgctatgcaagaacggcagggatctccacaggatagataccttttgaggaaggcactcaaatctgctctaactcacttgaaagcagatcatgcaggagattttcttagttgccatggccagagggttcgtgaatacgttcctgaccttgcggaatcaatcgctgggctgatcttgtcatccaccgatgaagagttccaaggcgaatgctttgcgcttcttgggctaggctccgaacaagacgtctctggaggagctgttcagtcgtcgatctgcgagaagatgatccgcatcatagagataaatgacaccaaggataattcagaggacaacgtgccttatctgttcgaatgcgagaagctggatgaagatagcgagctggacgaaggaggtggagatgaagacatggcttccgatttctagcgttgttttcacccgtctaccgtctcgtagagttgtagtgtagttagagatggcaatgggtgtcgaaaacccgaatacttatgtaggtggatatgagatgatttttatattggtggatatgttaatgaacaacaatccctgcccgttggataaacggtacgatacacgcaccgtatatccgtgagtaaaatatatctgtaccatacaactattattatctaataaaattaaaataaaaccctttttcgactatcgtttat

SEQ ID NO: 49078 - DNA, 3057 bp, Zea Mays
ggcgaggttggcgcgcgccgatacggcggcggaattccggcgaccggctcaacgatccatagctttctttttgtaatctgctccgccagccgaagcaccgggcgttgtcgctcaacctaaccatggcgtcaacctcctctccccaccggaagttgctccactccctggtgtactgggcggtgcagcgctgccggatgtcggagttgccgtgccggctcacggtctccctcaagcgccccgccgaacccgccagctccccgccgctgcgcgtctccgtttcggacacgggggtggggagcaaactggaggagttcctggagctcgacgccctggcgcgtgagattcccgtagagagatgggatggcacactcttagtcacaactactggaatcaatgatgaagccatttatcgttatcaaattaatcttcaagaagagacatcaagtgcaagatttagcaagttggctaccgcatacaaaaatcatgcacgattcagtggaactgaagtctgcctttgtctctcaaatgatgctgatgttgatgattttgtattatggttggtttgtttcttcaaaaagatacaagtgctaagagcagcagtaagtatatctgaactgttatctttcctcaagttggaagtgtagtatttcacactttcattttcaatgctcctttgcagcttaaatggcttatttctactcttatgcaatctcagatttacttatccttaatttcttcagtttgattaacaaagctgtttgatgtgtattatcttatgtttttctttctaattcaaagggttaagttagtttagttgccttttagcatattcatcttaatttgcctttgtattgtttaatcaaacaatagtaaatttaatgccatccagatcttaaaaatttcaaacacaccggttgcattatacctattcacttcatgaggcttagttttattgtagttctttacatgtttgtacttttaggtatgattcattcttttttggtaataagtaggatatgaagcatacgttttaatatatttgtgtgggtatggctttgtttgactgaaacaaactgatgtccaaatttgcttatgtcaatgtttattataaaaactcgacctgcggagggtaagactgccccacggcattacaattaagaagacttcatgcagatcgagaaaaccccaaacctccgtcccaccatatacaacggtaccgtagcccatgtgagaacggtcgcggccagggctagaccttagacttgtgcgttggcgtgggacagacgagaggattttttaatcctagcttgaaattcgcttagtcgaactcatgacctgaagagtgctactcataccacctaaccaattcagctagaggccctttcgcgtcaatgtttattatgatggattggaaaaaaacaacaacatgattctagaagttgaaacctcctagataagaacatgaatacatttagaatgcaacatatatttgatattgtcaatggctggagatagttgattagaagtgcattggctacggatatattggtaacaagtatcttggaaaaaaggttatcaataaactaaataggtgtatatatgtccttgagctgattaactgaaacaaaaaaacataacaggtctaaaagtgattaccatttttcagctgtcggtcacttgtggtgtgaccgtccgagtgtgacatttaacttgaattggttgtggaatattttcagtttcgattgttgagtatcaaggacgcatgtaccttgagaatctctgttttgcctctttttccttaagctgacaacttaagttcctgtttggctgtttattttgtacttagaatttagcatgtgagctctttgttgagcaaacaggcaacactggttccagaaatgtctgtctaccacaagattctgatgatgtgcatcattctgttacggcatcaagtattgaccagctagtttctggtcttaaagactactcactctcccatgtaaattcttgcgacaagtgtggcatgtgcttatttgatagagatcttctaaagattggaactggagcagcaaaccatgtagaaagaagaaaagctaaccgactacatgttgaagtagtcatagtgattgcacatattgcatctgattcagattgttgtatggcaaattgctcgtccacgcaggttttgtactttgaagattttgtaccttgtcagatattgcagtcctcttttgatgtgttgatgagcacagactggcaaagctatggtttcaagttaaaaggaggtttgatgggtgatgacggaaacgctgttctcgagtgggataacatggcatttgctcgtattgatatttccattcatacttaccacgaatgtgctatgcaagaacggcagggatctccacaggatagataccttttgaggaaggcactcaaatctgctctaactcacttgaaagcagatcatgcaggagattttcttagttgccatggccagagggttcgtgaatacgttcctgaccttgcggaatcaatcgctgggctgatcttgtcatccaccgatgaagagttccaaggcgaatgctttgcgcttcttgggctaggctccgaacaagacgtctctggaggagctgttcagtcgtcgatctgcgagaagatgatccgcatcatagagataaatgacaccaaggataattcagaggacaacgtgccttatctgttcgaatgcgagaagctggatgaagatagcgagctggacgaaggaggtggagatgaagacatggcttccgatttctagcgttgttttcacccgtctaccgtctcgtagagttgtagtgtagttagagatggcaatgggtgtcgaaaacccgaatacttatgtaggtggatatgagatgatttttatattggtggatatgttaatgaacaacaatccctgcccgttggataaacggtacgatacacgcaccgtatatccgtgagtaaaatatatctgtaccatacaactattattatctaataaaattaaaataaaaccctttttcgactatcgtttat

SEQ ID NO: 49079 - DNA, 1809 bp, Zea Mays
cgaggttggcgcgcgccgatacggcggcggaattccggcgaccggctcaacgatccatagctttctttttgtaatctgctccgccagccgaagcaccgggcgttgtcgctcaacctaaccatggcgtcaacctcctctccccaccggaagttgctccactccctggtgtactgggcggtgcagcgctgccggatgtcggagttgccgtgccggctcacggtctccctcaagcgccccgccgaacccgccagctccccgccgctgcgcgtctccgtttcggacacgggggtggggagcaaactggaggagttcctggagctcgacgccctggcgcgtgagattcccgtagagagatgggatggcacactcttagtcacaactactggaatcaatgatgaagccatttatcgttatcaaattaatcttcaagaagagacatcaagtgcaagatttagcaagttggctaccgcatacaaaaatcatgcacgattcagtggaactgaagtctgcctttgtctctcaaatgatgctgatgttgatgattttgtattatggttggtttgtttcttcaaaaagatacaagtgctaagagcagcaaatttagcatgtgagctctttgttgagcaaacaggcaacactggttccagaaatgtctgtctaccacaagattctgatgatgtgcatcattctgttacggcatcaagtattgaccagctagtttctggtcttaaagactactcactctcccatgtaaattcttgcgacaagtgtggcatgtgcttatttgatagagatcttctaaagattggaactggagcagcaaaccatgtagaaagaagaaaagctaaccgactacatgttgaagtagtcatagtgattgcacatattgcatctgattcagattgttgtatggcaaattgctcgtccacgcaggttttgtactttgaagattttgtaccttgtcagatattgcagtcctcttttgatgtgttgatgagcacagactggcaaagctatggtttcaagttaaaaggaggtttgatgggtgatgacggaaacgctgttctcgagtgggataacatggcatttgctcgtattgatatttccattcatacttaccacgaatgctgctatgcaagaacggcagggatctccacaggatagataccttttgaggaaggcactcaaatctgctctaactcacttgaaagcagatcatgcaggagattttcttagttgccatggccagagggttcgtgaatacgttcctgaccttgcggaatcaatcgctgggctgatcttgtcatccaccgatgaagagttccaaggcgaatgctttgcgcttcttgggctaggctccgaacaagacgtctctggaggagctgttcagtcgtcgatctgcgagaagatgatccgcatcatagagataaatgacaccaaggataattcagaggacaacgtgccttatctgttcgaatgcgagaagctggatgaagatagcgagctggacgaaggaggtggagatgaagacatggcttccgatttctagcgttgttttcacccgtctaccgtctcgtagagttgtagtgtagttagagatggcaatgggtgtcgaaaacccgaatacttatgtaggtggatatgagatgatttttatattggtggatatgttaatgaacaacaatccctgcccgttggataaacggtacgatacacgcaccgtatatccgtgagtaaaatatatctgtaccatacaactattattatctaataaaattaaaataaaaccctttttcgactatcgtttat

SEQ ID NO: 49080 - DNA, 1729 bp, Zea Mays
cgaggttggcgcgcgccgatacggcggcggaattccggcgaccggctcaacgatccatagctttctttttgtaatctgctccgccagccgaagcaccgggcgttgtcgctcaacctaaccatggcgtcaacctcctctccccaccggaagttgctccactccctggtgtactgggcggtgcagcgctgccggatgtcggagttgccgtgccggctcacggtctccctcaagcgccccgccgaacccgccagctccccgccgctgcgcgtctccggtaacaaatttcggacacgggggtggggagcaaactggaggagttcctggagctcgacgccctggcgcgtgagattcccgtagagagatgggatggcacactcttagtcacaactactggaatcaatgatgaagccatttatcgttatcaaattaatcttcaagaagagacatcaagtgcaagatttagcaagttggctaccgcatacaaaaatcatgcacgattcagtggaactgaagtctgcctttgtctctcaaatgatgctgatgttgatgattttgtattatggttggtttgtttcttcaaaaagatacaagtgctaagagcagcaaatttagcatgtgagctctttgttgagcaaacaggcaacactggttccagaaatgtctgtctaccacaagattctgatgatgtgcatcattctgttacggcatcaagtattgaccagctagtttctggtcttaaagactactcactctcccatgtaaattcttgcgacaagtgtggcatgtgcttatttgatagagatcttctaaagattggaactggagcagcaaaccatgtagaaagaagaaaagctaaccgactacatgttgaagtagtcatagtgattgcacatattgcatctgattcagattgttgtatggcaaattgctcgtccacgcaggttttgtactttgaagattttgtaccttgtcagatattgcagtcctcttttgatgtgttgatgagcacagactggcaaagctatggtttcaagttaaaaggagccactgctatgcaagaacggcagggatctccacaggatagataccttttgaggaaggcactcaaatctgctctaactcacttgaaagcagatcatgcaggagattttcttagttgccatggccagagggttcgtgaatacgttcctgaccttgcggaatcaatcgctgggctgatcttgtcatccaccgatgaagagttccaaggcgaatgctttgcgcttcttgggctaggctccgaacaagacgtctctggaggagctgttcagtcgtcgatctgcgagaagatgatccgcatcatagagataaatgacaccaaggataattcagaggacaacgtgccttatctgttcgaatgcgagaagctggatgaagatagcgagctggacgaaggaggtggagatgaagacatggcttccgatttctagcgttgttttcacccgtctaccgtctcgtagagttgtagtgtagttagagatggcaatgggtgtcgaaaacccgaatacttatgtaggtggatatgagatgatttttatattggtggatatgttaatgaacaacaatccctgcccgttggataaacggtacgatacacgcaccgtatatccgtgagtaaaatatatctgtaccatacaactattattatctaataaaattaaaataaaaccctttttcgactatcgtttat

SEQ ID NO: 49081 - DNA, 576 bp, Zea Mays
gcgagggcgccttgttattacttttcgtgggcgaggcgaagagccgaagacagaagactgcagcaaaaccatcagatctagcagaactctctcgacctcatcggcgttggcggagcgcgtgttgaccggagatggcgccgagcgggtggaggaggagcgcggcggcgcgggtcgcctggcgcccggccacggtttgcctgtggctcgcgctcgccgccgccgcactgacgctcgcccaggctaagaaggacctgacggaggttacccacaaggtctacttcgacatcgagatcgacggcaagcccgcaggccggattgtcatggggctttttgggaagactgttcctaagacggcagagaacttccgagctctttgcacaggagagaaaggggttggcaagagtggcaaagccctccactacaagggaagtaagttccacagaatcatccccagcttcatgctccaaggaggtgacttcactctcggggacgggaggggtggtgaatctatctacggcttgaagtttgcggatgagaacttcaagatcaagcacactggtccagattcataacatg

SEQ ID NO: 49082 - DNA, 1612 bp, Zea Mays
cttgttattacttttcgtgggcgaggcgaagagccgaagacagaagactgcagcaaaaccatcagatctagcagaactctctcgacctcatcggcgttggcggagcgcgtgttgaccggagatggcgccgagcgggtggaggaggagcgcggcggcgcgggtcgcctggcgcccggccacggtttgcctgtggctcgcgctcgccgccgccgcactgacgctcgcccaggtgctcgtcaacctcgtccgtcccttgcccacaggcccatgatttgtccctccaacctcttttctttcaccgatctgattagagactgcgcagcgcgggattggtcgtcgatatgactgtttctgacgcttgcgctagcttctggatgtctggatccgttggatcggggtccgagcagctaacaacgccgttgtgtttggcttctggtttgtcaggctaagaaggacctgacggaggttacccacaaggtctacttcgacatcgagatcgacggcaagcccgcaggccggattgtcatggggctttttgggaagactgttcctaagacggcaggagagaaaggggttggcaagagtggcaaagccctccactacaagggaagtaagttccacagaatcatccccagcttcatgctccaaggaggtgacttcactctcggggacgggaggggtggtgaatctatctacggcttgaagtttgcggatgagaacttcaagatcaagcacactggtccaggccttctgtccatggccaatgccgggagagatacaaacggatcccagtttttcatcaccacagtgacaacaagttggttggacgggaagcatgtggtgtttggcaaggtgttgtctggaatggatgttgtgtacaaggtcgaagctgaaggccggcagagtggggagccgaagagcaaggttgtgatagcagatagcggcgagctgccgatgtgacggcgtgctgaattgatgttccatcccgaaacatgatgaatagaagtttctggtggccgtctgtcgttctagaactgttaggccctctttggaatcttactgtttttacagttttgaaggaatactatggtttaaaaagtcaaaatctgtttgcttgtataaggtaaaacgcagtttcgaataccatggtctatctaaagcgtagtatttttacagttttgaaaacttcacttggacttaagttttcaaaggcttagcagccataccgctgcctgtgatgcgtacgcatacggcacacggctaaacagttcttagtatttttgaaaactataaacagttcttagtatttttgaaaactatggttttagtgtggttttgaaaactttgttgccaaacacgtgcttaattagcggctgaaaattggctttacagtcttctgtttacagcagtgatcttttttttgttgtcagaccacgtcttttagcttgtgcactaccaaacacctaaaaacacgcaatttcctctattcttgttccagggccggaacttttttgtttgtttgaattcgttgaagaatatatccactcctgttttgtttggcatggattctatcgattttatccagaaacgtcactggcatgagagcgcagaa

SEQ ID NO: 49083 - DNA, 649 bp, Zea Mays
cgagacgactaccggcccgcaggaggctaataattggcggccccggtttcgtccccacccccatcacccaaaacacaagtagggttaggaaggcggcggccagcggcgagagcgcgagaggaagagcaggaggaggggtcggccatgacggggaaggcgaagccgaagaagcacacgcccggcgtccgcggcagcctcaagaagtaagcttgctgggcttggttggctcgcccgcctgcatggggcgcaattcccttcggtttcaatcccatccgccgacccgatctataatcaatcaaaccgccgccctccggcctggcggctgccgcagtcggcctgcggtgtactgttagtctgctgctgatttccgttgttatactgctggtacatgtgtcgtgtgatagatgtgtcaactatatatcaatctcgtcgccggcagctctggcatgtttgagtatgtgttgcttctctgtggtgccggcgacgatggctgctagtactgttaatgtgatcgggtctccttgaacaatggcataaatatgttgcttgtttactttttcctctaatggcaagtaaagttcatgatttgcgaattcttttgttcgttgcttaatactgccagctgagggttaagggttctattttcatg

SEQ ID NO: 49084 - DNA, 587 bp, Zea Mays
ttcgtccccacccccatcacccaaaacacaagtagggttaggaaggcggcggccagcggcgagagcgcgagaggaagagcaggaggaggggtcggccatgacggggaagcccaagcccggcgtccgcggcagcctcaagaagtaagcttgctgggcttggttggctcgcccgcctgcatggggcgcaattcccttcggtttcaatcccatccgccgacccgatctataatcaatcaaaccgccgccctccggcctggcggctgccgcagtcggcctgcggtgtactgttagtctgctgctgatttccgttgttatactgctggtacatgtgtcgtgtgatagatgtgtcaactatatatcaatctcgtcgccggcagctctggcatgtttgagtatgtgttgcttctctgtggtgccggcgacgatggctgctagtactgttaatgtgatcgggtctccttgaacaatggcataaatatgttgcttgtttactttttcctctaatggcaagtaaagttcatgatttgcgaattcttttgttcgttgcttaatactgccagctgagggttaagggttctattttcatg

SEQ ID NO: 49085 - DNA, 602 bp, Zea Mays
ttcgtccccacccccatcacccaaaacacaagtagggttaggaaggcggcggccagcggcgagagcgcgagaggaagagcaggaggaggggtcggccatgacggggaaggccaccacctccaagcccaagcccggcgtccgcggcagcctcaagaagtaagcttgctgggcttggttggctcgcccgcctgcatggggcgcaattcccttcggtttcaatcccatccgccgacccgatctataatcaatcaaaccgccgccctccggcctggcggctgccgcagtcggcctgcggtgtactgttagtctgctgctgatttccgttgttatactgctggtacatgtgtcgtgtgatagatgtgtcaactatatatcaatctcgtcgccggcagctctggcatgtttgagtatgtgttgcttctctgtggtgccggcgacgatggctgctagtactgttaatgtgatcgggtctccttgaacaatggcataaatatgttgcttgtttactttttcctctaatggcaagtaaagttcatgatttgcgaattcttttgttcgttgcttaatactgccagctgagggttaagggttctattttcatg

SEQ ID NO: 49086 - DNA, 607 bp, Zea Mays
ttcgtccccacccccatcacccaaaacacaagtagggttaggaaggcggcggccagcggcgagagcgcgagaggaagagcaggaggaggggtcggccatgacggggaaggcgaagccaccacctccaagcccaagcccggcgtccgcggcagcctcaagaagtaagcttgctgggcttggttggctcgcccgcctgcatggggcgcaattcccttcggtttcaatcccatccgccgacccgatctataatcaatcaaaccgccgccctccggcctggcggctgccgcagtcggcctgcggtgtactgttagtctgctgctgatttccgttgttatactgctggtacatgtgtcgtgtgatagatgtgtcaactatatatcaatctcgtcgccggcagctctggcatgtttgagtatgtgttgcttctctgtggtgccggcgacgatggctgctagtactgttaatgtgatcgggtctccttgaacaatggcataaatatgttgcttgtttactttttcctctaatggcaagtaaagttcatgatttgcgaattcttttgttcgttgcttaatactgccagctgagggttaagggttctattttcatg

SEQ ID NO: 49087 - DNA, 1842 bp, Zea Mays
gcgccaagggccggcctagagattcggcccatcgccggtgttctggtggatcacgcgtccttctctccaaccgcaccgaccgatatcttcctctccgctagggcaagggcggtgccggtgaggcgatccgtcggtggtgtcggagcggtggaggaggatggccgacgtgcagggagacaacgaagcagttctggaggacgacgctttccccgacgacgggcccttagatacggaggagggaggtggaggagaacccatcagcggaggcgacgaggaagaggaggaggacgtcgacggcctcgccagcttccttgagtcggagatcctctccggatccagcgacgaggatcctattgaccggcagcagaaggaggaaggtgatgctgcgaagaataagcggaagcagggttcaggatcggacggggatggctgcagcggcagcgagggggagcagacgaagagggcgaggagggaggagaagaggaggcaggcgaaagggaaagccgtggcgcctcagatcgacacgggcttgttcagcaacgtcccccctgagctgttcctgcagatcttcaagttcctctcctcggaggacctcatctcctgcgctctagtctgccgcttcatgaatgctgccgcgtccgacgagaccctctggcgccgcctgtactgcatgaggtggggactggcctccaatgccaaattcagggagtgcgcttggaagaacctctacatacagagagatagagaggatatggttgaatttgtgaggaatactcctacagagttcaaggagtactatattcagatgcaggctgcaaaaaggagtcaagctccccgtccgtcagaagtcaacgacgacaaggttatgcttgataagacagtagctgaccaggtatctagttggaaaaacagccgggggcttactgatgaagctgtcaaggggcactcttgttctggaaatacatgctcgtacacccagattggtgatgcttacatttgtgagaagactggtcgtgtccacgtgggctgcttctttgtacgatatctggccactgctttgagaggtggctgtgtcctgatgatgaatgggatgctgatgataccgatctgcaacaggctggtgtagtggatgaagcagagccattcatgggatctggacgttacgcacgggcgattatgttgggctacaactgcactgatgagaaggagcttgaggatgccttgcgtttctgttgacgtgtttctgtcgatatgcccttcactcttgatcaagtgaagacgaagccagcggggatatgccggatgtatagctctgtgctatgttttcactgtatttcaccctcgagcatgtacctaagaatagaaggatgtacctaagaatagaacttgtttttgaggtagatcgctgatatgttttgatcagcagagggagccgttatgttgtcgtatgatttcataaattatgcctgtaataaaatataatttacataatgagttttttgtttgtatgatatgatggtggtatatcgtagatgcatgtgagatgccgacgcgtctcgactctacgaatttcaggtccagctcaggctggagggctttaatccaagtatttcatgtctgttgtagcttctacctaaataggtgcgttgtagcttcttctacctaaaaatagctgcttcaaaaacaaggttttcgtaccccttcgtaaagttacacgaaaattactcaccagattgcatgtcattatgttttgcttctattcgcttgtgtttttcttgtaattgattgtgcacccaggagatggatcgagtcctcttctagcgaggcgtccccatcgagcgg

SEQ ID NO: 49088 - DNA, 1872 bp, Zea Mays
gcgccaagggccggcctagagattcggcccatcgccggtgttctggtggatcacgcgtccttctctccaaccgcaccgaccgatatcttcctctccgctagggcaagggcggtgccggtgaggcgatccgtcggtggtgtcggagcggtggaggaggatggccgacgtgcagggagacaacgaagcagttctggaggacgacgctttccccgacgacgggcccttagatacggaggagggaggtggaggagaacccatcagcggaggcgacgaggaagaggaggaggacgtcgacggcctcgccagcttccttgagtcggagatcctctccggatccagcgacgaggatcctattgaccaatcgaattggttgccgcggcaggagcagcggcagcagaaggaggaaggtgatgctgcgaagaataagcggaagcagggttcaggatcggacggggatggctgcagcggcagcgagggggagcagacgaagagggcgaggagggaggagaagaggaggcaggcgaaagggaaagccgtggcgcctcagatcgacacgggcttgttcagcaacgtcccccctgagctgttcctgcagatcttcaagttcctctcctcggaggacctcatctcctgcgctctagtctgccgcttcatgaatgctgccgcgtccgacgagaccctctggcgccgcctgtactgcatgaggtggggactggcctccaatgccaaattcagggagtgcgcttggaagaacctctacatacagagagatagagaggatatggttgaatttgtgaggaatactcctacagagttcaaggagtactatattcagatgcaggctgcaaaaaggagtcaagctccccgtccgtcagaagtcaacgacgacaaggttatgcttgataagacagtagctgaccaggtatctagttggaaaaacagccgggggcttactgatgaagctgtcaaggggcactcttgttctggaaatacatgctcgtacacccagattggtgatgcttacatttgtgagaagactggtcgtgtccacgtgggctgcttctttgtacgatatctggccactgctttgagaggtggctgtgtcctgatgatgaatgggatgctgatgataccgatctgcaacaggctggtgtagtggatgaagcagagccattcatgggatctggacgttacgcacgggcgattatgttgggctacaactgcactgatgagaaggagcttgaggatgccttgcgtttctgttgacgtgtttctgtcgatatgcccttcactcttgatcaagtgaagacgaagccagcggggatatgccggatgtatagctctgtgctatgttttcactgtatttcaccctcgagcatgtacctaagaatagaaggatgtacctaagaatagaacttgtttttgaggtagatcgctgatatgttttgatcagcagagggagccgttatgttgtcgtatgatttcataaattatgcctgtaataaaatataatttacataatgagttttttgtttgtatgatatgatggtggtatatcgtagatgcatgtgagatgccgacgcgtctcgactctacgaatttcaggtccagctcaggctggagggctttaatccaagtatttcatgtctgttgtagcttctacctaaataggtgcgttgtagcttcttctacctaaaaatagctgcttcaaaaacaaggttttcgtaccccttcgtaaagttacacgaaaattactcaccagattgcatgtcattatgttttgcttctattcgcttgtgtttttcttgtaattgattgtgcacccaggagatggatcgagtcctcttctagcgaggcgtccccatcgagcgg

SEQ ID NO: 49089 - DNA, 744 bp, Zea Mays
catgtattgtcggcagaatcccctccacccggacgccatcgccaactgcatcgagcgcccgccattagcgtccgatttggaaacacagggtggaggggattctgccatgccaagacagagcccaacatcagcgcccaccatcagcgcagatccagtcacaccatccctagcgcattgtctgcgacaccgatttggaaagcgcactcgtggaaatcgccttgccaaacgattccaacacaaaactgttcgtgcacgccgattaaaaaggtcgcaattcagttcctgctctaaccatcctacggtttttcagttatccttcgcccaccctcgtagaggcatgaagccgaactggcaactacggcaactcaaccattaccagatgacaatgacgacctgatcgagtagatgttgcattatactactttatcgatctacatgtctcgcccaatgcgtcttctcataagttctcgtgtcctaaactttgggatggtgaagttttttgtagctaactgtcctgattagttgggttccaccatatttgatgaactggcttcattgcaatggttatttgcttaattgctttgattgccaaataaaatgcacgttttctttgtgtttttgtatatcacgaaatagtaggcatttattggtgatagatggagatggcggttataaagtctgattcagttataaattacttcaaaaacatcatatgtaatgtaactcgaagtctcgtagtttgat

SEQ ID NO: 49090 - DNA, 3038 bp, Zea Mays
gctagccacggccagtcaaccaccgcgagctccatctccatggacgcctgctctctcgtccactgccatctgccacggccactgcagctcccgctccttgcgcctccaactcccagccggcaccggccccgcgtcgccagcgccttggtctgctgctgctgccccgccgccgcggcagaccaccaccaggaacggccctgggagtggtacgaccgcgccatccagtcccacgcggggtccgacctggcgcgctccctaggacttctcgccgacatgcaagcgtccggggggcgccctagcggcagcgcgtacgcgcgcctcatccgcgcgctgtcccgcgcagggcgcgcgctggaggccgaggcgctcctcctcgagatgcgccgcctcggcccgcgcccggaagccgcgcactacaacgcgctccttgagggcctgctcgccgccgcgcacctccgcctcgccgacctcctcctcctccagatggccgacgacggcgtcgcgaggaaccggcgcacctacacgctcttgctaggcgcgtacgcgcgcgccggccggctcgaggactcgtggtgggtgctcggtgagatgaggcgctggggcattcgcctcgacaccgccgggtatagcatgctcgtgcggctgtaccgggacaatggcatgtggaagaaggccaccgacctcgtcatggagatgcaggaggttggggtggaactggatgttaagatctacagcggcctgatcgatacgttcggcaagtatggacagctagcggacgcacgcaggatgtttgataaaatgcgcgccgaaggcgtcaggccagacatatcgacttggaatgctttgattcaatggcattgtcgggttgggaacatgaaacgcgctctgcggttcttcacatccatgcaggaggaagggatgtacccggacccaaagatatttgttatgatcatcagccggttgggggaacaagggaagtgggatgagattaagaagttgtttgatggcatgaacaatcgaggtttcaaggagagtggcgcagtgtacgcaatattggttgacatttacgggcagtatggccattttcgtgatgcacaggactgtatagctgctcttagagctgagaatacacagcttttgcctcgtgtattttgtgtcattgcaaacgcttatgctcaacagggactgtgtgaacaaactgtaaatgtacttcagttgatggaggaagaaggatttgagccaaaccttgttatgctgaattcgttaatcaatgcttttggcactgctggaaggcatttggaggcactagctgtatttcagcatatcaaggatagtggtatgagcccagatgttgtgacatacactacacttatgaagacattcatgagagcaaagaaatttgaaaaggtatctgaagtatacagagaaatggaacgtgctggatgtgctccagatagaaaggctagagaaatgttacatgatgcaactgtagttctagaacaaagaggatgtatctattgaattcggaatcattgctgttgtaattggtccattgtcaatgcatgtaacttcagggagcccaccccctttttgcttacacatgcatgatgcagagcaaacacaggattgaatgttctgatacatgtagatgatcatgtactggttttcttcaaggttgaaacactatgcatgcgaagatttggatggttatggcatcaagccaataactctttccaaggctcctgaatgtctatatgttgatcagaagagtgaaaaagtcatggttatggtcaaagcaagactatcaggcataaacataaggatgaatcagaaaatatacataggccatgaacagcgagaagcatatagacactccgaaaatgaagcacatcaacttggtggaatttccttacaggtttctttctttccaagtcatatattatgaattttgtgtgagtgtgacaaggaattgctgaaaacatttggtgttgatcattgattgttatgtaaatgtatccaagtagctacatggtagcttatgcaatcaattgccaagtggtagagtgtaaacaatacaactacattttcactatttataatgtcagttgtaaatacttcaaattcaaagtagcgcaacacaattatgattcagtcctaataaacagactgtaaatacttgatggcttgatgtactattaaaattagaatagccaagtgtaaatatttgattttgttctggttactgaattaactttggcacccatttccacactgttattattgagtttatttattgtgggcttcatcgcttataatttatatacagaatgaaataaaacacatggtcaaaccttttcatcagaattgtaggctctccgttcctatattatcactgatggactccttacatacttgatcagatcatagattttgcttgatgctaacaataacataaaattaagagacaaaaaaaggagcagcgtcctctcgtgactctgctagaacgagaagcaagacaaacattttgatagatttgtggccatcaagacagtcaatggcgtgagctcatttgagctccttttgtcttgattcaaaatgctcttgttgcatgcaacattagaatttgttgtggtgggattttgcacatctagccagaatttggtaacctcatgtttcttttatcccaactgcataatagatgcaaaatctaatagctcacattcccaacaaaattaccctgtccttctcaaaagatacactaatgatgaaattacaatgtgggcaaataaaatcatcccacttactgcatgaagaatgggattacaaaactacctatctccttcctttcgagctcacccttgtcagtcattgagctgccagacacctgagaagaatcgatctcttgctttgtatttcacattctttgtaacctgaaaaggtgccagtaaaattaccagagttctttaggcctttagggacactcatcaccattggtttcttttttttctgaggcgtgacaaatgttgatccaactggaa

SEQ ID NO: 49091 - DNA, 3071 bp, Zea Mays
ctagccacggccagtcaaccaccgcgagctccatctccatggacgcctgctctctcgtccactgccatctgccacggccactgcagctcccgctccttgcgcctccaactcccagccggcaccggccccgcgtcgccagcgccttggtctgctgctgctgccccgccgccgcggcagaccaccaccaggaacggccctgggagtggtacgaccgcgccatccagtcccacgcggggtccgacctggcgcgctccctaggacttctcgccgacatgcaagcgtccggggggcgccctagcggcagcgcgtacgcgcgcctcatccgcgcgctgtcccgcgcagggcgcgcgctggaggccgaggcgctcctcctcgagatgcgccgcctcggcccgcgcccggaagccgcgcactacaacgcgctccttgagggcctgctcgccgccgcgcacctccgcctcgccgacctcctcctcctccagatggccgacgacggcgtcgcgaggaaccggcgcacctacacgctcttgctaggcgcgtacgcgcgcgccggccggctcgaggactcgtggtgggtgctcggtgagatgaggcgctggggcattcgcctcgacaccgccgggtatagcatgctcgtgcggctgtaccgggacaatggcatgtggaagaaggccaccgacctcgtcatggagatgcaggaggttggggtggaactggatgttaagatctacagcggcctgatcgatacgttcggcaagtatggacagctagcggacgcacgcaggatgtttgataaaatgcgcgccgaaggcgtcaggccagacatatcgacttggaatgctttgattcaatggcattgtcgggttgggaacatgaaacgcgctctgcggttcttcacatccatgcaggaggaagggatgtacccggacccaaagatatttgttatgatcatcagccggttgggggaacaagggaagtgggatgagattaagaagttgtttgatggcatgaacaatcgaggtttcaaggagagtggcgcagtgtacgcaatattggttgacatttacgggcagtatggccattttcgtgatgcacaggactgtatagctgctcttagagctgagaatacacagcttttgcctcgtgtattttgtgtcattgcaaacgcttatgctcaacagggactgtgtgaacaaactgtaaatgtacttcagttgatggaggaagaaggatttgagccaaaccttgttatgctgaattcgttaatcaatgcttttggcactgctggaaggcatttggaggcactagctgtatttcagcatatcaaggatagtggtatgagcccagatgttgtgacatacactacacttatgaagacattcatgagagcaaagaaatttgaaaaggtatctgaagtatacagagaaatggaacgtgctggatgtgctccagatagaaaggctagagaaatgttacatgatgcaactgtagttctagaacaaagaggatgtatctattgaattcggaatcattgctgttgtaattggtccattgtcaatgcatgtaacttcagggagcccaccccctttttgcttacacatgcatgatgcagagcaaacacaggattgaatgttctgatacatgtagatgatcatgtactggttttcttcaaggttgaaacactatgcatgcgaagatttggatggttatggcatcaagccaataactctttccaaggctcctgaatgtctatatgttgatcagaagagtgaaaaaggataaccgagtatagttttcacccttgtacttagtcatggttatggtcaaagcaagactatcaggcataaacataaggatgaatcagaaaatatacataggccatgaacagcgagaagcatatagacactccgaaaatgaagcacatcaacttggtggaatttccttacaggtttctttctttccaagtcatatattatgaattttgtgtgagtgtgacaaggaattgctgaaaacatttggtgttgatcattgattgttatgtaaatgtatccaagtagctacatggtagcttatgcaatcaattgccaagtggtagagtgtaaacaatacaactacattttcactatttataatgtcagttgtaaatacttcaaattcaaagtagcgcaacacaattatgattcagtcctaataaacagactgtaaatacttgatggcttgatgtactattaaaattagaatagccaagtgtaaatatttgattttgttctggttactgaattaactttggcacccatttccacactgttattattgagtttatttattgtgggcttcatcgcttataatttatatacagaatgaaataaaacacatggtcaaaccttttcatcagaattgtaggctctccgttcctatattatcactgatggactccttacatacttgatcagatcatagattttgcttgatgctaacaataacataaaattaagagacaaaaaaaggagcagcgtcctctcgtgactctgctagaacgagaagcaagacaaacattttgatagatttgtggccatcaagacagtcaatggcgtgagctcatttgagctccttttgtcttgattcaaaatgctcttgttgcatgcaacattagaatttgttgtggtgggattttgcacatctagccagaatttggtaacctcatgtttcttttatcccaactgcataatagatgcaaaatctaatagctcacattcccaacaaaattaccctgtccttctcaaaagatacactaatgatgaaattacaatgtgggcaaataaaatcatcccacttactgcatgaagaatgggattacaaaactacctatctccttcctttcgagctcacccttgtcagtcattgagctgccagacacctgagaagaatcgatctcttgctttgtatttcacattctttgtaacctgaaaaggtgccagtaaaattaccagagttctttaggcctttagggacactcatcaccattggtttcttttttttctgaggcgtgacaaatgttgatccaactggaa

SEQ ID NO: 49092 - DNA, 2853 bp, Zea Mays
gccacggccagtcaaccaccgcgagctccatctccatggacgcctgctctctcgtccactgccatctgccacggccactgcagctcccgctccttgcgcctccaactcccagccggcaccggccccgcgtcgccagcgccttggtctgctgctgctgccccgccgccgcggcagaccaccaccaggaacggccctgggagtggtacgaccgcgccatccagtcccacgcggggtccgacctggcgcgctccctaggacttctcgccgacatgcaagcgtccggggggcgccctagcggcagcgcgtacgcgcgcctcatccgcgcgctgtcccgcgcagggcgcgcgctggaggccgaggcgctcctcctcgagatgcgccgcctcggcccgcgcccggaagccgcgcactacaacgcgctccttgagggcctgctcgccgccgcgcacctccgcctcgccgacctcctcctcctccagatggccgacgacggcgtcgcgaggaaccggcgcacctacacgctcttgctaggcgcgtacgcgcgcgccggccggctcgaggactcgtggtgggtgctcggtgagatgaggcgctggggcattcgcctcgacaccgccgggtatagcatgctcgtgcggctgtaccgggacaatggcatgtggaagaaggccaccgacctcgtcatggagatgcaggaggttggggtggaactggatgttaagatctacagcggcctgatcgatacgttcggcaagtatggacagctagcggacgcacgcaggatgtttgataaaatgcgcgccgaaggcgtcaggccagacatatcgacttggaatgctttgattcaatggcattgtcgggttgggaacatgaaacgcgctctgcggttcttcacatccatgcaggaggaagggatgtacccggacccaaagatatttgttatgatcatcagccggttgggggaacaagggaagtgggatgagattaagaagttgtttgatggcatgaacaatcgaggtttcaaggagagtggcgcagtgtacgcaatattggttgacatttacgggcagtatggccattttcgtgatgcacaggactgtatagctgctcttagagctgagaatacacagcttttgcctcgtgtattttgtgtcattgcaaacgcttatgctcaacagttgatggaggaagaaggatttgagccaaaccttgttatgctgaattcgttaatcaatgcttttggcactgctggaaggcatttggaggcactagctgtatttcagcatatcaaggatagtggtatgagcccagatgttgtgacatacactacacttatgaagacattcatgagagcaaagaaatttgaaaaggtatctattgaattcggaatcattgctgttgtaattggtccattgtcaatgcatatgatcatgtactggttttcttcaaggttgaaacactatgcatgcgaagatttggatggttatggcatcaagccaataactctttccaaggctcctgaatgtctatatgttgatcagaagagtgaaaaagtgcaggataaccgagtatagttttcacccttgtacttagtcatggttatggtcaaagcaagactatcaggcataaacataaggatgaatcagaaaatatacataggccatgaacagcgagaagcatatagacactccgaaaatgaagcacatcaacttggtggaatttccttacaggtttctttctttccaagtcatatattatgaattttgtgtgagtgtgacaaggaattgctgaaaacatttggtgttgatcattgattgttatgtaaatgtatccaagtagctacatggtagcttatgcaatcaattgccaagtggtagagtgtaaacaatacaactacattttcactatttataatgtcagttgtaaatacttcaaattcaaagtagcgcaacacaattatgattcagtcctaataaacagactgtaaatacttgatggcttgatgtactattaaaattagaatagccaagtgtaaatatttgattttgttctggttactgaattaactttggcacccatttccacactgttattattgagtttatttattgtgggcttcatcgcttataatttatatacagaatgaaataaaacacatggtcaaaccttttcatcagaattgtaggctctccgttcctatattatcactgatggactccttacatacttgatcagatcatagattttgcttgatgctaacaataacataaaattaagagacaaaaaaaggagcagcgtcctctcgtgactctgctagaacgagaagcaagacaaacattttgatagatttgtggccatcaagacagtcaatggcgtgagctcatttgagctccttttgtcttgattcaaaatgctcttgttgcatgcaacattagaatttgttgtggtgggattttgcacatctagccagaatttggtaacctcatgtttcttttatcccaactgcataatagatgcaaaatctaatagctcacattcccaacaaaattaccctgtccttctcaaaagatacactaatgatgaaattacaatgtgggcaaataaaatcatcccacttactgcatgaagaatgggattacaaaactacctatctccttcctttcgagctcacccttgtcagtcattgagctgccagacacctgagaagaatcgatctcttgctttgtatttcacattctttgtaacctgaaaaggtgccagtaaaattaccagagttctttaggcctttagggacactcatcaccattggtttcttttttttctgaggcgtgacaaatgttgatccaactggaa

SEQ ID NO: 49093 - DNA, 2984 bp, Zea Mays
gccacggccagtcaaccaccgcgagctccatctccatggacgcctgctctctcgtccactgccatctgccacggccactgcagctcccgctccttgcgcctccaactcccagccggcaccggccccgcgtcgccagcgccttggtctgctgctgctgccccgccgccgcggcagaccaccaccaggaacggccctgggagtggtacgaccgcgccatccagtcccacgcggggtccgacctggcgcgctccctaggacttctcgccgacatgcaagcgtccggggggcgccctagcggcagcgcgtacgcgcgcctcatccgcgcgctgtcccgcgcagggcgcgcgctggaggccgaggcgctcctcctcgagatgcgccgcctcggcccgcgcccggaagccgcgcactacaacgcgctccttgagggcctgctcgccgccgcgcacctccgcctcgccgacctcctcctcctccagatggccgacgacggcgtcgcgaggaaccggcgcacctacacgctcttgctaggcgcgtacgcgcgcgccggccggctcgaggactcgtggtgggtgctcggtgagatgaggcgctggggcattcgcctcgacaccgccgggtatagcatgctcgtgcggctgtaccgggacaatggcatgtggaagaaggccaccgacctcgtcatggagatgcaggaggttggggtggaactggatgttaagatctacagcggcctgatcgatacgttcggcaagtatggacagctagcggacgcacgcaggatgtttgataaaatgcgcgccgaaggcgtcaggccagacatatcgacttggaatgctttgattcaatggcattgtcgggttgggaacatgaaacgcgctctgcggttcttcacatccatgcaggaggaagggatgtacccggacccaaagatatttgttatgatcatcagccggttgggggaacaagggaagtgggatgagattaagaagttgtttgatggcatgaacaatcgaggtttcaaggagagtggcgcagtgtacgcaatattggttgacatttacgggcagtatggccattttcgtgatgcacaggactgtatagctgctcttagagctgagaatacacagcttttgcctcgtgtattttgtgtcattgcaaacgcttatgctcaacagggactgtgtgaacaaactgtaaatgtacttcagttgatggaggaagaaggatttgagccaaaccttgttatgctgaattcgttaatcaatgcttttggcactgctggaaggcatttggaggcactagctgtatttcagcatatcaaggatagtggtatgagcccagatgttgtgacatacactacacttatgaagacattcatgagagcaaagaaatttgaaaaggtatctgaagtatacagagaaatggaacgtgctggatgtgctccagatagaaaggctagagaaatgttacatgatgcaactgtagttctagaacaaagaggatgtatctattgaattcggaatcattgctgttgtaattggtccattgtcaatgcatatgatcatgtactggttttcttcaaggttgaaacactatgcatgcgaagatttggatggttatggcatcaagccaataactctttccaaggctcctgaatgtctatatgttgatcagaagagtgaaaaaggataaccgagtatagttttcacccttgtacttagtcatggttatggtcaaagcaagactatcaggcataaacataaggatgaatcagaaaatatacataggccatgaacagcgagaagcatatagacactccgaaaatgaagcacatcaacttggtggaatttccttacaggtttctttctttccaagtcatatattatgaattttgtgtgagtgtgacaaggaattgctgaaaacatttggtgttgatcattgattgttatgtaaatgtatccaagtagctacatggtagcttatgcaatcaattgccaagtggtagagtgtaaacaatacaactacattttcactatttataatgtcagttgtaaatacttcaaattcaaagtagcgcaacacaattatgattcagtcctaataaacagactgtaaatacttgatggcttgatgtactattaaaattagaatagccaagtgtaaatatttgattttgttctggttactgaattaactttggcacccatttccacactgttattattgagtttatttattgtgggcttcatcgcttataatttatatacagaatgaaataaaacacatggtcaaaccttttcatcagaattgtaggctctccgttcctatattatcactgatggactccttacatacttgatcagatcatagattttgcttgatgctaacaataacataaaattaagagacaaaaaaaggagcagcgtcctctcgtgactctgctagaacgagaagcaagacaaacattttgatagatttgtggccatcaagacagtcaatggcgtgagctcatttgagctccttttgtcttgattcaaaatgctcttgttgcatgcaacattagaatttgttgtggtgggattttgcacatctagccagaatttggtaacctcatgtttcttttatcccaactgcataatagatgcaaaatctaatagctcacattcccaacaaaattaccctgtccttctcaaaagatacactaatgatgaaattacaatgtgggcaaataaaatcatcccacttactgcatgaagaatgggattacaaaactacctatctccttcctttcgagctcacccttgtcagtcattgagctgccagacacctgagaagaatcgatctcttgctttgtatttcacattctttgtaacctgaaaaggtgccagtaaaattaccagagttctttaggcctttagggacactcatcaccattggtttcttttttttctgaggcgtgacaaatgttgatccaactggaa

SEQ ID NO: 49094 - DNA, 3063 bp, Zea Mays
gtcaaccaccgcgagctccatctccatggacgcctgctctctcgtccactgccatctgccacggccactgcagctcccgctccttgcgcctccaactcccagccggcaccggccccgcgtcgccagcgccttggtctgctgctgctgccccgccgccgcggcagaccaccaccaggaacggccctgggagtggtacgaccgcgccatccagtcccacgcggggtccgacctggcgcgctccctaggacttctcgccgacatgcaagcgtccggggggcgccctagcggcagcgcgtacgcgcgcctcatccgcgcgctgtcccgcgcagggcgcgcgctggaggccgaggcgctcctcctcgagatgcgccgcctcggcccgcgcccggaagccgcgcactacaacgcgctccttgagggcctgctcgccgccgcgcacctccgcctcgccgacctcctcctcctccagatggccgacgacggcgtcgcgaggaaccggcgcacctacacgctcttgctaggcgcgtacgcgcgcgccggccggctcgaggactcgtggtgggtgctcggtgagatgaggcgctggggcattcgcctcgacaccgccgggtatagcatgctcgtgcggctgtaccgggacaatggcatgtggaagaaggccaccgacctcgtcatggagatgcaggaggttggggtggaactggatgttaagatctacagcggcctgatcgatacgttcggcaagtatggacagctagcggacgcacgcaggatgtttgataaaatgcgcgccgaaggcgtcaggccagacatatcgacttggaatgctttgattcaatggcattgtcgggttgggaacatgaaacgcgctctgcggttcttcacatccatgcaggaggaagggatgtacccggacccaaagatatttgttatgatcatcagccggttgggggaacaagggaagtgggatgagattaagaagttgtttgatggcatgaacaatcgaggtttcaaggagagtggcgcagtgtacgcaatattggttgacatttacgggcagtatggccattttcgtgatgcacaggactgtatagctgctcttagagctgagaatacacagcttttgcctcgtgtattttgtgtcattgcaaacgcttatgctcaacagggactgtgtgaacaaactgtaaatgtacttcagttgatggaggaagaaggatttgagccaaaccttgttatgctgaattcgttaatcaatgcttttggcactgctggaaggcatttggaggcactagctgtatttcagcatatcaaggatagtggtatgagcccagatgttgtgacatacactacacttatgaagacattcatgagagcaaagaaatttgaaaaggtatctgaagtatacagagaaatggaacgtgctggatgtgctccagatagaaaggctagagaaatgttacatgatgcaactgtagttctagaacaaagaggatgtatctattgaattcggaatcattgctgttgtaattggtccattgtcaatgcatgtaacttcagggagcccaccccctttttgcttacacatgcatgatgcagagcaaacacaggattgaatgttctgatacatgtagatgatcatgtactggttttcttcaaggttgaaacactatgcatgcgaagatttggatggttatggcatcaagccaataactctttccaaggctcctgaatgtctatatgttgatcagaagagtgaaaaagtgcaggataaccgagtatagttttcacccttgtacttagtcatggttatggtcaaagcaagactatcaggcataaacataaggatgaatcagaaaatatacataggccatgaacagcgagaagcatatagacactccgaaaatgaagcacatcaacttggtggaatttccttacaggtttctttctttccaagtcatatattatgaattttgtgtgagtgtgacaaggaattgctgaaaacatttggtgttgatcattgattgttatgtaaatgtatccaagtagctacatggtagcttatgcaatcaattgccaagtggtagagtgtaaacaatacaactacattttcactatttataatgtcagttgtaaatacttcaaattcaaagtagcgcaacacaattatgattcagtcctaataaacagactgtaaatacttgatggcttgatgtactattaaaattagaatagccaagtgtaaatatttgattttgttctggttactgaattaactttggcacccatttccacactgttattattgagtttatttattgtgggcttcatcgcttataatttatatacagaatgaaataaaacacatggtcaaaccttttcatcagaattgtaggctctccgttcctatattatcactgatggactccttacatacttgatcagatcatagattttgcttgatgctaacaataacataaaattaagagacaaaaaaaggagcagcgtcctctcgtgactctgctagaacgagaagcaagacaaacattttgatagatttgtggccatcaagacagtcaatggcgtgagctcatttgagctccttttgtcttgattcaaaatgctcttgttgcatgcaacattagaatttgttgtggtgggattttgcacatctagccagaatttggtaacctcatgtttcttttatcccaactgcataatagatgcaaaatctaatagctcacattcccaacaaaattaccctgtccttctcaaaagatacactaatgatgaaattacaatgtgggcaaataaaatcatcccacttactgcatgaagaatgggattacaaaactacctatctccttcctttcgagctcacccttgtcagtcattgagctgccagacacctgagaagaatcgatctcttgctttgtatttcacattctttgtaacctgaaaaggtgccagtaaaattaccagagttctttaggcctttagggacactcatcaccattggtttcttttttttctgaggcgtgacaaatgttgatccaactggaa

SEQ ID NO: 49095 - DNA, 2871 bp, Zea Mays
gtcaaccaccgcgagctccatctccatggacgcctgctctctcgtccactgccatctgccacggccactgcagctcccgctccttgcgcctccaactcccagccggcaccggccccgcgtcgccagcgccttggtctgctgctgctgccccgccgccgcggcagaccaccaccaggaacggccctgggagtggtacgaccgcgccatccagtcccacgcggggtccgacctggcgcgctccctaggacttctcgccgacatgcaagcgtccggggggcgccctagcggcagcgcgtacgcgcgcctcatccgcgcgctgtcccgcgcagggcgcgcgctggaggccgaggcgctcctcctcgagatgcgccgcctcggcccgcgcccggaagccgcgcactacaacgcgctccttgagggcctgctcgccgccgcgcacctccgcctcgccgacctcctcctcctccagatggccgacgacggcgtcgcgaggaaccggcgcacctacacgctcttgctaggcgcgtacgcgcgcgccggccggctcgaggactcgtggtgggtgctcggtgagatgaggcgctggggcattcgcctcgacaccgccgggtatagcatgctcgtgcggctgtaccgggacaatggcatgtggaagaaggccaccgacctcgtcatggagatgcaggaggttggggtggaactggatgttaagatctacagcggcctgatcgatacgttcggcaagtatggacagctagcggacgcacgcaggatgtttgataaaatgcgcgccgaaggcgtcaggccagacatatcgacttggaatgctttgattcaatggcattgtcgggttgggaacatgaaacgcgctctgcggttcttcacatccatgcaggaggaagggatgtacccggacccaaagatatttgttatgatcatcagccggttgggggaacaagggaagtgggatgagattaagaagttgtttgatggcatgaacaatcgaggtttcaaggagagtggcgcagtgtacgcaatattggttgacatttacgggcagtatggccattttcgtgatgcacaggactgtatagctgctcttagagctgagaatacacagcttttgcctcgtgtattttgtgtcattgcaaacgcttatgctcaacagggactgtgtgaacaaactgtaaatgtacttcagttgatggaggaagaaggatttgagccaaaccttgttatgctgaattcgttaatcaatgcttttggcactgctggaaggcatttggaggcactagctgtatttcagcatatcaaggatagtggtatgagcccagatgttgtgacatacactacacttatgaagacattcatgagagcaaagaaatttgaaaaggtatctattgaattcggaatcattgctgttgtaattggtccattgtcaatgcatatgatcatgtactggttttcttcaaggttgaaacactatgcatgcgaagatttggatggttatggcatcaagccaataactctttccaaggctcctgaatgtctatatgttgatcagaagagtgaaaaaggataaccgagtatagttttcacccttgtacttagtcatggttatggtcaaagcaagactatcaggcataaacataaggatgaatcagaaaatatacataggccatgaacagcgagaagcatatagacactccgaaaatgaagcacatcaacttggtggaatttccttacaggtttctttctttccaagtcatatattatgaattttgtgtgagtgtgacaaggaattgctgaaaacatttggtgttgatcattgattgttatgtaaatgtatccaagtagctacatggtagcttatgcaatcaattgccaagtggtagagtgtaaacaatacaactacattttcactatttataatgtcagttgtaaatacttcaaattcaaagtagcgcaacacaattatgattcagtcctaataaacagactgtaaatacttgatggcttgatgtactattaaaattagaatagccaagtgtaaatatttgattttgttctggttactgaattaactttggcacccatttccacactgttattattgagtttatttattgtgggcttcatcgcttataatttatatacagaatgaaataaaacacatggtcaaaccttttcatcagaattgtaggctctccgttcctatattatcactgatggactccttacatacttgatcagatcatagattttgcttgatgctaacaataacataaaattaagagacaaaaaaaggagcagcgtcctctcgtgactctgctagaacgagaagcaagacaaacattttgatagatttgtggccatcaagacagtcaatggcgtgagctcatttgagctccttttgtcttgattcaaaatgctcttgttgcatgcaacattagaatttgttgtggtgggattttgcacatctagccagaatttggtaacctcatgtttcttttatcccaactgcataatagatgcaaaatctaatagctcacattcccaacaaaattaccctgtccttctcaaaagatacactaatgatgaaattacaatgtgggcaaataaaatcatcccacttactgcatgaagaatgggattacaaaactacctatctccttcctttcgagctcacccttgtcagtcattgagctgccagacacctgagaagaatcgatctcttgctttgtatttcacattctttgtaacctgaaaaggtgccagtaaaattaccagagttctttaggcctttagggacactcatcaccattggtttcttttttttctgaggcgtgacaaatgttgatccaactggaa

SEQ ID NO: 49096 - DNA, 1963 bp, Zea Mays
gtcaaccaccgcgagctccatctccatggacgcctgctctctcgtccactgccatctgccacggccactgcagctcccgctccttgcgcctccaactcccagccggcaccggccccgcgtcgccagcgccttggtctgctgctgctgccccgccgccgcggcagaccaccaccaggaacggccctgggagtggtacgaccgcgccatccagtcccacgcggggtccgacctggcgcgctccctaggacttctcgccgacatgcaagcgtccggggggcgccctagcggcagcgcgtacgcgcgcctcatccgcgcgctgtcccgcgcagggcgcgcgctggaggccgaggcgctcctcctcgagatgcgccgcctcggcccgcgcccggaagccgcgcactacaacgcgctccttgagggcctgctcgccgccgcgcacctccgcctcgccgacctcctcctcctccagatggccgacgacggcgtcgcgaggaaccggcgcacctacacgctcttgctaggcgcgtacgcgcgcgccggccggctcgaggactcgtggtgggtgctcggtgagatgaggcgctggggcattcgcctcgacaccgccgggtatagcatgctcgtgcggctgtaccgggacaatggcatgtggaagaaggccaccgacctcgtcatggagatgcaggaggttggggtggaactggatgttaagatctacagcggcctgatcgatacgttcggcaagtatggacagctagcggacgcacgcaggatgtttgataaaatgcgcgccgaaggcgtcaggccagacatatcgacttggaatgctttgattcaatggcattgtcgggttgggaacatgaaacgcgctctgcggttcttcacatccatgcaggaggaagggatgtacccggacccaaagatatttgttatgatcatcagccggttgggggaacaagggaagtgggatgagattaagaagttgtttgatggcatgaacaatcgaggtttcaaggagagtggcgcagtgtacgcaatattggttgacatttacgggcagtatggccattttcgtgatgcacaggactgtatagctgctcttagagctgagaatacacagcttttgcctcgtgtattttgtgtcattgcaaacgcttatgctcaacagggactgtgtgaacaaactgtaaatgtacttcagttgatggaggaagaaggatttgagccaaaccttgttatgctgaattcgttaatcaatgcttttggcactgctggaaggcatttggaggcactagctgtatttcagcatatcaaggatagtggtatgagcccagatgttgtgacatacactacacttatgaagacattcatgagagcaaagaaatttgaaaaggtatctgaagtatacagagaaatggaacgtgctggatgtgctccagatagaaaggctagagaaatgttacatgatgcaactgtagttctagaacaaagaggatgtatctattgaattcggaatcattgctgttgtaattggtccattgtcaatgcatgtaacttcagggagcccaccccctttttgcttacacatgcatgatgcagagcaaacacaggattgaatgttctgatacatgtagatgatcatgtactggttttcttcaaggttgaaacactatgcatgcgaagatttggatggttatggcatcaagccaataactctttccaaggctcctgaatgtctatatgttgatcagaagagtgaaaaagtgcaggataaccgagtatagttttcacccttgtacttagtcatggttatggtcaaagcaagactatcaggcataaacataaggatgaatcagaaaatatacataggccatgaacagcgagaagcatatagacactccgaaaatgaagcacatcaacttggtggaatttccttacagaagaaaggctcagtttcatgcat

SEQ ID NO: 49097 - DNA, 2803 bp, Zea Mays
tcaaccaccgcgagctccatctccatggacgcctgctctctcgtccactgccatctgccacggccactgcagctcccgctccttgcgcctccaactcccagccggcaccggccccgcgtcgccagcgccttggtctgctgctgctgccccgccgccgcggcagaccaccaccaggaacggccctgggagtggtacgaccgcgccatccagtcccacgcggggtccgacctggcgcgctccctaggacttctcgccgacatgcaagcgtccggggggcgccctagcggcagcgcgtacgcgcgcctcatccgcgcgctgtcccgcgcagggcgcgcgctggaggccgaggcgctcctcctcgagatgcgccgcctcggcccgcgcccggaagccgcgcactacaacgcgctccttgagggcctgctcgccgccgcgcacctccgcctcgccgacctcctcctcctccagatggccgacgacggcgtcgcgaggaaccggcgcacctacacgctcttgctaggcgcgtacgcgcgcgccggccggctcgaggactcgtggtgggtgctcggtgagatgaggcgctggggcattcgcctcgacaccgccgggtatagcatgctcgtgcggctgtaccgggacaatggcatgtggaagaaggccaccgacctcgtcatggagatgcaggaggttggggtggaactggatgttaagatctacagcggcctgatcgatacgttcggcaagtatggacagctagcggacgcacgcaggatgtttgataaaatgcgcgccgaaggcgtcaggccagacatatcgacttggaatgctttgattcaatggcattgtcgggttgggaacatgaaacgcgctctgcggttcttcacatccatgcaggaggaagggatgtacccggacccaaagatatttgttatgatcatcagccggttgggggaacaagggaagtgggatgagattaagaagttgtttgatggcatgaacaatcgaggtttcaaggagagtggcgcagtgtacgcaatattggttgacatttacgggcagtatggccattttcgtgatgcacaggactgtatagctgctcttagagctgagaatacacagcttttgcctcgtgtattttgtgtcattgcaaacgcttatgctcaacagttgatggaggaagaaggatttgagccaaaccttgttatgctgaattcgttaatcaatgcttttggcactgctggaaggcatttggaggcactagctgtatttcagcatatcaaggatagtggtatgagcccagatgttgtgacatacactacacttatgaagacattcatgagagcaaagaaatttgaaaaggtatctattgaattcggaatcattgctgttgtaattggtccattgtcaatgcatatgatcatgtactggttttcttcaaggttgaaacactatgcatgcgaagatttggatggttatggcatcaagccaataactctttccaaggctcctgaatgtctatatgttgatcagaagagtgaaaaagtcatggttatggtcaaagcaagactatcaggcataaacataaggatgaatcagaaaatatacataggccatgaacagcgagaagcatatagacactccgaaaatgaagcacatcaacttggtggaatttccttacaggtttctttctttccaagtcatatattatgaattttgtgtgagtgtgacaaggaattgctgaaaacatttggtgttgatcattgattgttatgtaaatgtatccaagtagctacatggtagcttatgcaatcaattgccaagtggtagagtgtaaacaatacaactacattttcactatttataatgtcagttgtaaatacttcaaattcaaagtagcgcaacacaattatgattcagtcctaataaacagactgtaaatacttgatggcttgatgtactattaaaattagaatagccaagtgtaaatatttgattttgttctggttactgaattaactttggcacccatttccacactgttattattgagtttatttattgtgggcttcatcgcttataatttatatacagaatgaaataaaacacatggtcaaaccttttcatcagaattgtaggctctccgttcctatattatcactgatggactccttacatacttgatcagatcatagattttgcttgatgctaacaataacataaaattaagagacaaaaaaaggagcagcgtcctctcgtgactctgctagaacgagaagcaagacaaacattttgatagatttgtggccatcaagacagtcaatggcgtgagctcatttgagctccttttgtcttgattcaaaatgctcttgttgcatgcaacattagaatttgttgtggtgggattttgcacatctagccagaatttggtaacctcatgtttcttttatcccaactgcataatagatgcaaaatctaatagctcacattcccaacaaaattaccctgtccttctcaaaagatacactaatgatgaaattacaatgtgggcaaataaaatcatcccacttactgcatgaagaatgggattacaaaactacctatctccttcctttcgagctcacccttgtcagtcattgagctgccagacacctgagaagaatcgatctcttgctttgtatttcacattctttgtaacctgaaaaggtgccagtaaaattaccagagttctttaggcctttagggacactcatcaccattggtttcttttttttctgaggcgtgacaaatgttgatccaactggaa

SEQ ID NO: 49098 - DNA, 2836 bp, Zea Mays
tcaaccaccgcgagctccatctccatggacgcctgctctctcgtccactgccatctgccacggccactgcagctcccgctccttgcgcctccaactcccagccggcaccggccccgcgtcgccagcgccttggtctgctgctgctgccccgccgccgcggcagaccaccaccaggaacggccctgggagtggtacgaccgcgccatccagtcccacgcggggtccgacctggcgcgctccctaggacttctcgccgacatgcaagcgtccggggggcgccctagcggcagcgcgtacgcgcgcctcatccgcgcgctgtcccgcgcagggcgcgcgctggaggccgaggcgctcctcctcgagatgcgccgcctcggcccgcgcccggaagccgcgcactacaacgcgctccttgagggcctgctcgccgccgcgcacctccgcctcgccgacctcctcctcctccagatggccgacgacggcgtcgcgaggaaccggcgcacctacacgctcttgctaggcgcgtacgcgcgcgccggccggctcgaggactcgtggtgggtgctcggtgagatgaggcgctggggcattcgcctcgacaccgccgggtatagcatgctcgtgcggctgtaccgggacaatggcatgtggaagaaggccaccgacctcgtcatggagatgcaggaggttggggtggaactggatgttaagatctacagcggcctgatcgatacgttcggcaagtatggacagctagcggacgcacgcaggatgtttgataaaatgcgcgccgaaggcgtcaggccagacatatcgacttggaatgctttgattcaatggcattgtcgggttgggaacatgaaacgcgctctgcggttcttcacatccatgcaggaggaagggatgtacccggacccaaagatatttgttatgatcatcagccggttgggggaacaagggaagtgggatgagattaagaagttgtttgatggcatgaacaatcgaggtttcaaggagagtggcgcagtgtacgcaatattggttgacatttacgggcagtatggccattttcgtgatgcacaggactgtatagctgctcttagagctgagaatacacagcttttgcctcgtgtattttgtgtcattgcaaacgcttatgctcaacagggactgtgtgaacaaactgtaaatgtacttcagttgatggaggaagaaggatttgagccaaaccttgttatgctgaattcgttaatcaatgcttttggcactgctggaaggcatttggaggcactagctgtatttcagcatatcaaggatagtggtatgagcccagatgttgtgacatacactacacttatgaagacattcatgagagcaaagaaatttgaaaaggtatctattgaattcggaatcattgctgttgtaattggtccattgtcaatgcatatgatcatgtactggttttcttcaaggttgaaacactatgcatgcgaagatttggatggttatggcatcaagccaataactctttccaaggctcctgaatgtctatatgttgatcagaagagtgaaaaagtcatggttatggtcaaagcaagactatcaggcataaacataaggatgaatcagaaaatatacataggccatgaacagcgagaagcatatagacactccgaaaatgaagcacatcaacttggtggaatttccttacaggtttctttctttccaagtcatatattatgaattttgtgtgagtgtgacaaggaattgctgaaaacatttggtgttgatcattgattgttatgtaaatgtatccaagtagctacatggtagcttatgcaatcaattgccaagtggtagagtgtaaacaatacaactacattttcactatttataatgtcagttgtaaatacttcaaattcaaagtagcgcaacacaattatgattcagtcctaataaacagactgtaaatacttgatggcttgatgtactattaaaattagaatagccaagtgtaaatatttgattttgttctggttactgaattaactttggcacccatttccacactgttattattgagtttatttattgtgggcttcatcgcttataatttatatacagaatgaaataaaacacatggtcaaaccttttcatcagaattgtaggctctccgttcctatattatcactgatggactccttacatacttgatcagatcatagattttgcttgatgctaacaataacataaaattaagagacaaaaaaaggagcagcgtcctctcgtgactctgctagaacgagaagcaagacaaacattttgatagatttgtggccatcaagacagtcaatggcgtgagctcatttgagctccttttgtcttgattcaaaatgctcttgttgcatgcaacattagaatttgttgtggtgggattttgcacatctagccagaatttggtaacctcatgtttcttttatcccaactgcataatagatgcaaaatctaatagctcacattcccaacaaaattaccctgtccttctcaaaagatacactaatgatgaaattacaatgtgggcaaataaaatcatcccacttactgcatgaagaatgggattacaaaactacctatctccttcctttcgagctcacccttgtcagtcattgagctgccagacacctgagaagaatcgatctcttgctttgtatttcacattctttgtaacctgaaaaggtgccagtaaaattaccagagttctttaggcctttagggacactcatcaccattggtttcttttttttctgaggcgtgacaaatgttgatccaactggaa

SEQ ID NO: 49099 - DNA, 2990 bp, Zea Mays
tcaaccaccgcgagctccatctccatggacgcctgctctctcgtccactgccatctgccacggccactgcagctcccgctccttgcgcctccaactcccagccggcaccggccccgcgtcgccagcgccttggtctgctgctgctgccccgccgccgcggcagaccaccaccaggaacggccctgggagtggtacgaccgcgccatccagtcccacgcggggtccgacctggcgcgctccctaggacttctcgccgacatgcaagcgtccggggggcgccctagcggcagcgcgtacgcgcgcctcatccgcgcgctgtcccgcgcagggcgcgcgctggaggccgaggcgctcctcctcgagatgcgccgcctcggcccgcgcccggaagccgcgcactacaacgcgctccttgagggcctgctcgccgccgcgcacctccgcctcgccgacctcctcctcctccagatggccgacgacggcgtcgcgaggaaccggcgcacctacacgctcttgctaggcgcgtacgcgcgcgccggccggctcgaggactcgtggtgggtgctcggtgagatgaggcgctggggcattcgcctcgacaccgccgggtatagcatgctcgtgcggctgtaccgggacaatggcatgtggaagaaggccaccgacctcgtcatggagatgcaggaggttggggtggaactggatgttaagatctacagcggcctgatcgatacgttcggcaagtatggacagctagcggacgcacgcaggatgtttgataaaatgcgcgccgaaggcgtcaggccagacatatcgacttggaatgctttgattcaatggcattgtcgggttgggaacatgaaacgcgctctgcggttcttcacatccatgcaggaggaagggatgtacccggacccaaagatatttgttatgatcatcagccggttgggggaacaagggaagtgggatgagattaagaagttgtttgatggcatgaacaatcgaggtttcaaggagagtggcgcagtgtacgcaatattggttgacatttacgggcagtatggccattttcgtgatgcacaggactgtatagctgctcttagagctgagaatacacagcttttgcctcgtgtattttgtgtcattgcaaacgcttatgctcaacagttgatggaggaagaaggatttgagccaaaccttgttatgctgaattcgttaatcaatgcttttggcactgctggaaggcatttggaggcactagctgtatttcagcatatcaaggatagtggtatgagcccagatgttgtgacatacactacacttatgaagacattcatgagagcaaagaaatttgaaaaggtatctgaagtatacagagaaatggaacgtgctggatgtgctccagatagaaaggctagagaaatgttacatgatgcaactgtagttctagaacaaagaggatgtatctattgaattcggaatcattgctgttgtaattggtccattgtcaatgcatgtaacttcagggagcccaccccctttttgcttacacatgcatgatgcagagcaaacacaggattgaatgttctgatacatgtagatgatcatgtactggttttcttcaaggttgaaacactatgcatgcgaagatttggatggttatggcatcaagccaataactctttccaaggctcctgaatgtctatatgttgatcagaagagtgaaaaagtcatggttatggtcaaagcaagactatcaggcataaacataaggatgaatcagaaaatatacataggccatgaacagcgagaagcatatagacactccgaaaatgaagcacatcaacttggtggaatttccttacaggtttctttctttccaagtcatatattatgaattttgtgtgagtgtgacaaggaattgctgaaaacatttggtgttgatcattgattgttatgtaaatgtatccaagtagctacatggtagcttatgcaatcaattgccaagtggtagagtgtaaacaatacaactacattttcactatttataatgtcagttgtaaatacttcaaattcaaagtagcgcaacacaattatgattcagtcctaataaacagactgtaaatacttgatggcttgatgtactattaaaattagaatagccaagtgtaaatatttgattttgttctggttactgaattaactttggcacccatttccacactgttattattgagtttatttattgtgggcttcatcgcttataatttatatacagaatgaaataaaacacatggtcaaaccttttcatcagaattgtaggctctccgttcctatattatcactgatggactccttacatacttgatcagatcatagattttgcttgatgctaacaataacataaaattaagagacaaaaaaaggagcagcgtcctctcgtgactctgctagaacgagaagcaagacaaacattttgatagatttgtggccatcaagacagtcaatggcgtgagctcatttgagctccttttgtcttgattcaaaatgctcttgttgcatgcaacattagaatttgttgtggtgggattttgcacatctagccagaatttggtaacctcatgtttcttttatcccaactgcataatagatgcaaaatctaatagctcacattcccaacaaaattaccctgtccttctcaaaagatacactaatgatgaaattacaatgtgggcaaataaaatcatcccacttactgcatgaagaatgggattacaaaactacctatctccttcctttcgagctcacccttgtcagtcattgagctgccagacacctgagaagaatcgatctcttgctttgtatttcacattctttgtaacctgaaaaggtgccagtaaaattaccagagttctttaggcctttagggacactcatcaccattggtttcttttttttctgaggcgtgacaaatgttgatccaactggaa

SEQ ID NO: 49100 - DNA, 3024 bp, Zea Mays
tcaaccaccgcgagctccatctccatggacgcctgctctctcgtccactgccatctgccacggccactgcagctcccgctccttgcgcctccaactcccagccggcaccggccccgcgtcgccagcgccttggtctgctgctgctgccccgccgccgcggcagaccaccaccaggaacggccctgggagtggtacgaccgcgccatccagtcccacgcggggtccgacctggcgcgctccctaggacttctcgccgacatgcaagcgtccggggggcgccctagcggcagcgcgtacgcgcgcctcatccgcgcgctgtcccgcgcagggcgcgcgctggaggccgaggcgctcctcctcgagatgcgccgcctcggcccgcgcccggaagccgcgcactacaacgcgctccttgagggcctgctcgccgccgcgcacctccgcctcgccgacctcctcctcctccagatggccgacgacggcgtcgcgaggaaccggcgcacctacacgctcttgctaggcgcgtacgcgcgcgccggccggctcgaggactcgtggtgggtgctcggtgagatgaggcgctggggcattcgcctcgacaccgccgggtatagcatgctcgtgcggctgtaccgggacaatggcatgtggaagaaggccaccgacctcgtcatggagatgcaggaggttggggtggaactggatgttaagatctacagcggcctgatcgatacgttcggcaagtatggacagctagcggacgcacgcaggatgtttgataaaatgcgcgccgaaggcgtcaggccagacatatcgacttggaatgctttgattcaatggcattgtcgggttgggaacatgaaacgcgctctgcggttcttcacatccatgcaggaggaagggatgtacccggacccaaagatatttgttatgatcatcagccggttgggggaacaagggaagtgggatgagattaagaagttgtttgatggcatgaacaatcgaggtttcaaggagagtggcgcagtgtacgcaatattggttgacatttacgggcagtatggccattttcgtgatgcacaggactgtatagctgctcttagagctgagaatacacagcttttgcctcgtgtattttgtgtcattgcaaacgcttatgctcaacagttgatggaggaagaaggatttgagccaaaccttgttatgctgaattcgttaatcaatgcttttggcactgctggaaggcatttggaggcactagctgtatttcagcatatcaaggatagtggtatgagcccagatgttgtgacatacactacacttatgaagacattcatgagagcaaagaaatttgaaaaggtatctgaagtatacagagaaatggaacgtgctggatgtgctccagatagaaaggctagagaaatgttacatgatgcaactgtagttctagaacaaagaggatgtatctattgaattcggaatcattgctgttgtaattggtccattgtcaatgcatgtaacttcagggagcccaccccctttttgcttacacatgcatgatgcagagcaaacacaggattgaatgttctgatacatgtagatgatcatgtactggttttcttcaaggttgaaacactatgcatgcgaagatttggatggttatggcatcaagccaataactctttccaaggctcctgaatgtctatatgttgatcagaagagtgaaaaaggataaccgagtatagttttcacccttgtacttagtcatggttatggtcaaagcaagactatcaggcataaacataaggatgaatcagaaaatatacataggccatgaacagcgagaagcatatagacactccgaaaatgaagcacatcaacttggtggaatttccttacaggtttctttctttccaagtcatatattatgaattttgtgtgagtgtgacaaggaattgctgaaaacatttggtgttgatcattgattgttatgtaaatgtatccaagtagctacatggtagcttatgcaatcaattgccaagtggtagagtgtaaacaatacaactacattttcactatttataatgtcagttgtaaatacttcaaattcaaagtagcgcaacacaattatgattcagtcctaataaacagactgtaaatacttgatggcttgatgtactattaaaattagaatagccaagtgtaaatatttgattttgttctggttactgaattaactttggcacccatttccacactgttattattgagtttatttattgtgggcttcatcgcttataatttatatacagaatgaaataaaacacatggtcaaaccttttcatcagaattgtaggctctccgttcctatattatcactgatggactccttacatacttgatcagatcatagattttgcttgatgctaacaataacataaaattaagagacaaaaaaaggagcagcgtcctctcgtgactctgctagaacgagaagcaagacaaacattttgatagatttgtggccatcaagacagtcaatggcgtgagctcatttgagctccttttgtcttgattcaaaatgctcttgttgcatgcaacattagaatttgttgtggtgggattttgcacatctagccagaatttggtaacctcatgtttcttttatcccaactgcataatagatgcaaaatctaatagctcacattcccaacaaaattaccctgtccttctcaaaagatacactaatgatgaaattacaatgtgggcaaataaaatcatcccacttactgcatgaagaatgggattacaaaactacctatctccttcctttcgagctcacccttgtcagtcattgagctgccagacacctgagaagaatcgatctcttgctttgtatttcacattctttgtaacctgaaaaggtgccagtaaaattaccagagttctttaggcctttagggacactcatcaccattggtttcttttttttctgaggcgtgacaaatgttgatccaactggaa

SEQ ID NO: 49101 - DNA, 1649 bp, Zea Mays
tgcgcgaaggctccgacggcgacggcaagaaggtggatccccgctgccccaacgcgcccaacccgttccacgtctgcaccgaccactgcctcgccaagatatccgaggccggccgctcgtcggagggagccaagtcgccgatctcgctcttctcccgccactcccgccgctcctcctcgtcctccgaagatggcagcgtgaagtccgcggggagcaagaaggtggatccaaggtgcccgaacgctggcaatctgttccatgaatgcggtgagcattgcgccgccaagatgcagcggtcggagcagcagcacaagggggtcaatctcaagtcaccgcgcaggaaagtggggaagaacgctacagcgatcccaaactggaaggttgatccgaggtgccctaacgcgtccaatccgttccacatgtgcgcccagtactgcttcgaccatctgagtgaaacagcgcagacaagtgcagcaaagtcagacaagagacgaggcaagggcgtttctgaagacgagggaagaggagaaaccaaaaccaaccctggttgcgccaacgcgtccaacccctaccacaagtgcggtgaccaatgcaagagaaagggtggtggtgataggtagaccgtagacgaggaaggctagtgaagttcctctgccaaccgagtcagtcgttcactcatttgttatctttgagtaagagctgctgctatattgttagtggcgaaaaaaattgctattttgcctcttacagttttgttgttatgtcaaccatgtgtctatgatttgtgagacatctgcttcaataatttgtgggtccgatgatacatcgatgaagcctatagatcgtaatggcacagaaagttgacagcttctatgccctttcattccggagatcatcttaaacgatgttcgtatgtgtctcaagaactgccaagctgcatctttctttctttctttcgctgtcttcttaaggggctgtccgttttttcagaatggagacatggaataattcctagccagtttgtttctctaatttatataagttttgattagctgaaatgattcctggtccatttatagacaaaccaataaggcgtaaacgatgttcctgatcgatctttcaactcttgggctcttggccccatccacctcccacccagaacgtgttgcagactgctgggtctctctctctttgcagggaaaaagaaaagaaaaaaagagaggaaagaaagaaagaaaagtagaaaacctaggcgtatagctgctgaataacggattgagaaaaagcatcgcggaacgcttgaccatctcggtggttggttgggatttcgaacgctaccatatctcacatgcttttcttcctttgattgatggacaggcaggccggcaagacaggatctgtccggacggacgatcgacggcgggcgatgaagggaagaaagaaaaaacaaagctagttcccatcgaccgtccctgcgggctccgttctgtatgtagagtggtgtgcttccccgttttccattgtaatgcactatgtttctctgacgatgaaggttgcctgtacgagcagaagcctcctggagtgtttggtgtcatctttttttcttttttcttttggttcgctttcacggaaatggagacatgtttttg

SEQ ID NO: 49102 - DNA, 904 bp, Zea Mays
tgcgcgaaggctccgacggcgacggcaagaaggtggatccccgctgccccaacgcgcccaacccgttccacgtctgcaccgaccactgcctcgccaagatatccgaggccggccgctcgtcggagggagccaagtcgccgatctcgctcttctcccgccactcccgccgctcctcctcgtcctccgaagatggcagcgtgaagtccgcggggagcaagaaggtggatccaaggtgcccgaacgctggcaatctgttccatgaatgcggtgagcattgcgccgccaagatgcagcggtcggagcagcagcacaagggggtcaatctcaagtcaccgcgcaggaaagtggggaagaacgctacagcgatcccaaactggaaggttgatccgaggtgccctaacgcgtccaatccgttccacatgtgcgcccagtactgcttcgaccatctgagtgaaacagcgcagacaagtgcagcaaagtcagacaagagacgaggcaagggcgtttctgaagacgagggaagaggagaaaccaaaaccaaccctggttgcgccaacgcgtccaacccctaccacaagtgcggtgaccaatgcaagagaaagggtggtggtgataggtagaccgtagacgaggaaggccggcaagacaggatctgtccggacggacgatcgacggcgggcgatgaagggaagaaagaaaaaacaaagctagttcccatcgaccgtccctgcgggctccgttctgtatgtagagtggtgtgcttccccgttttccattgtaatgcactatgtttctctgacgatgaaggttgcctgtacgagcagaagcctcctggagtgtttggtgtcatctttttttcttttttcttttggttcgctttcacggaaatggagacatgtttttg

SEQ ID NO: 49103 - DNA, 908 bp, Zea Mays
tgcgcgaaggctccgacggcgacggcaagaaggtggatccccgctgccccaacgcgcccaacccgttccacgtctgcaccgaccactgcctcgccaagatatccgaggccggccgctcgtcggagggagccaagtcgccgatctcgctcttctcccgccactcccgccgctcctcctcgtcctccgaagatggcagcgtgaagtccgcggggagcaagaaggtggatccaaggtgcccgaacgctggcaatctgttccatgaatgcggtgagcattgcgccgccaagatgcagcggtcggagcagcagcacaagggggtcaatctcaagtcaccgcgcaggaaagtggggaagaacgctacagcgatcccaaactggaaggttgatccgaggtgccctaacgcgtccaatccgttccacatgtgcgcccagtactgcttcgaccatctgagtgaaacagcgcagacaagtgcagcaaagtcagacaagagacgaggcaagggcgtttctgaagacgagggaagaggagaaaccaaaaccaaccctggttgcgccaacgcgtccaacccctaccacaagtgcggtgaccaatgcaagagaaagggtggtggtgataggtagaccgtagacgaggaaggcaggccggcaagacaggatctgtccggacggacgatcgacggcgggcgatgaagggaagaaagaaaaaacaaagctagttcccatcgaccgtccctgcgggctccgttctgtatgtagagtggtgtgcttccccgttttccattgtaatgcactatgtttctctgacgatgaaggttgcctgtacgagcagaagcctcctggagtgtttggtgtcatctttttttcttttttcttttggttcgctttcacggaaatggagacatgtttttg

SEQ ID NO: 49104 - DNA, 1324 bp, Zea Mays
gccgcctgggcgcgcaggcccgcgccactttcatcctctcccagtatccacggccacgggctcgcacgcagtcgccgccgccctgcccgtctccttcctgtcgtctccccttctccaatcgcttcccgatcccagccaatatctcagacggaatcgatccaaagctatcctagggttccgccgtcccgtccagatccgggctcgtcgatggggaaggagggcgtggcggcggggccggcggcggaggggagtaaatcgcggtcggagtgtatcaactcgtccaacccgtaccacgagtgctccgactactgcctccgcaagatcgccgaggccaggcagcgcctcgacgacgagctccctgactcgtggaacagcatcggcctatagataacgattccgacgaacaggagggcgcaggtccggatgacggctacccgcagatgacggagaagcagaagaagttgttcgagctgcggcttaagatgaatgaagcacggaaagcgaaccagcaggcgatggttgccgagaagaaaaggatggagcctcgtggcgagagccgaggtgtttctaagcagaagtggttagacgacaggaagaagaagattgggaagctgctggactcgaatgggcttgatatgaaaatggcgtacatgctcgacacgcaggagactgcagaagccaagtacaagaagtgggagaaggaacctgctccatatgggtgggatgttttcaatcaaaagaccttgtatgacgcatacaagaagaggaccaagaacatagaagttgacatggagtcttacaataaagccaaagaagctgatcctgaattctaccgcgacgcctcaagtctccagtatgggaaggtgtccaatgtcccagaagaaaacatcgacaagatggtaaaggaactcagggagcgggaagagaagcggaaatcgttcagcaggaggcgcaagttcaacgaagacaaggacattgactccatcaatgaccggaacgagcacttcaacaagaaggttgagcgtgccttcggcaagtacacgctcgagatcaagaacaacctcgaaagaggtactgcgctgccggactaataaaaccttacacggcagctatcttcgaccgtttttcaagctaaccagtcgactagaggcgtgtgtccctgctgctgttttccttttcgcacggttacttgtatgcttgtaacttaacttgaggccacagttccattgtgacttgtaacaaaacctggactgggttgtgtaatgacgcgaggctgaagcaaacatttgtgtatgcatgtgagttgtcaactcgtggggccgag

SEQ ID NO: 49105 - DNA, 3533 bp, Zea Mays
atttttgaaaacagaaacatgaaatcttcattgtgaggagtggtgtacaaccaaggtggttagagttagaatctacgtatgcgaggtcgtaattcgtaaagtcggcaaagccatcggaaagactgatatggccctgtctgtgcaacttgcatgctgctgccgaccgcgtggcccaaaggaaactagggtccaccaaatgtgtcgagaggcgtaggtaggaggaggaggatcgccagctgctgatccgttcaacacctgccggcgcccgcctgcctgcctgcccaaaacaagaccggccacttgctagccgtcctcctcccctgcccctgccatgcggcggcaccggcacctttccagattaactggctgcaccaccaccacaccaccacgccacatcgccgtcggccaccacatgatgcacgcgcacgccgccatataatactagtactactgaactacaaggggttcgccgtgcgagcgcaagcaacgacgcgccggcccgcctactactagtacggccgcatccaccatggctgcacccgccgcggccaagcgcccgtactggcaggcccccgccacggccgccggagcagctgagcccaacaagcggcaccgcacggccgcggcgccggcgcacatggacgcggagccggagcaggaggagcagcccctgctcccgggcctgccggaccacctcgcccagctctgcctcgccccgctcccgccgcgcctcctgcacgccgtctgccgcccctggcgccgcctcctctactcgccctcgttcccgccgttcctcgcgctctacgccgtgctcgacgacgccgccgccttcgccggcagcggcgtctcgttcgcggcctacgacgccgtggcggggcggtgggacgagcttcccgcgccgccgatgccgtcgccgccgcccaggctgtggcacccggccttcctgtcccgccggctcccgctccagtccgtggccgcggggggcaggctcgtgctcgtggccggctccacgcgggcgctcgccccggcgctgccccgccccgtggtcttcgacccggccgcccgctcgtggcggctcggcccgcgcctcccgttcgcgccgcgccggtggtgcgcggcgggcgcggcccgcggtcgcgtgttcgttgcgggcggagtcggcgcgggctacgacgccagcgacgcccggtccggcgccacgtgggacccggccgcggacgccgccgcggccgcggcgtgggagccgatcccgcccatgcgcgacgcgcggttcagccgcgacgccgcggaggccgtctgcgccgcggggaaggtgtgcatggtcagcctccgcggccgcggcgccaaggagggcgccgtcttcgacctgcgcgccgcgcggtgggaggacatgccgcccgggatgctcgctggctggaagggcccggccgcggccgcggccgctggcggcgacgaggacgagacgactatcttcgtggtggacgaggagcgcggggcgctgagcgcctacgattgggccggggaccggtggcgcacggtagtggagtcggagcggctcaagggcgccgccgagatggcggctggcgggggccgggtgtgcgtggcggcccagggtggcgacaaggtgctcgtggtcgacgtggcgccctcacggccacggcggtggggtgcccccgccgccgcggagctccggccccgcgtctgggaggtggcggcgccgccggggaagcgggtggtggcgctgcacgtgctgccccggatggcgcgcgcggactagcaggttcccgccacgtcgtctgggaatggcggattgcatgctcgttggattcgctacacgtgctgtacaagagacggcgcacacactgccacctgctgctcatgatccgactccacctccagacgttcgcatctccttccttgcagagagtttgattctactagcgtgctggatcattccattccattccattgagaaatcgagataccataccccccgtatacacacggcacttgctgtgttttctagactctttcctggcacgacatgacacggcagattcgtaggactgctggaggcacgagcgcggaagcagacgttgtatgtacccagagaccaagggaatcgaaaggaatgtgcacggttggcgacgcggtcggttctttcgcggcgggcggcgaaccggatcttccccggggatcctgtaccgtgcatatggatgtggcgtgccggtgccggtgccggccatccacgcgcggtgcacgtcgccgcctccctctccgggcggtcagacatggcagcctgagggtgtcgtctcgtccacacggccaccagacacaggcgggcgcgcgcccaggcgtgggtcgccgtcgccgcgacccgaccgccgtagcccgtacggtgccccaacgtctagtctactaccggcaggcccccttgcgccgtggacgtcgtacgtggcgccggcagggatggggtcgtgtgtggtggtctggtcgagcattggtggagctgaaaagtaggcgcccgtcggttgcaggcgcgcgggaacggccggccggccggccatcaatgcggcagctttccgtggtttggctcattcaatcaggaaaggcgggcggggccggccagcgacggcgaccgcgactgcgacggcggtcgtggggtgtatggaggacggcatccgcatccgcatccgcgtccgcggcgcgaaaaggcgggaggcgtataataaattgcgatgcgcacagggcgcccgcccgcccgccgtcggctcatctcatgcctgatgtcaccggcgcggcgaccagtcgacctgacctgccctccccgcgccttaaatttcatttgccggcttgccgcctgcggaagcgcaaaggccggcgtccccttttcgggagagtcaccaaatggaaatgggagcctgaaggatgtataggataaattttatattaccaactactatcatttgacaccggaaaggcttttgaatagggcccgcgggctgaacaagcacaatccccaggatccagttgttcatgtcatcactcatcatgtgcttggttcgcaatcgaaatatcgtcagaaaacctgtgacaagtgtagggattccaaaggaaacaaggagagaaaaaacagctgtgcgggccccgcgcagaggatgttgacgagtaaatgagaaattgtaacgggaaaaacaatgggaataacctgagccagaaaaaaaaaacgggaataacacgaggaaaaagaaccacaacacctggtctggtgtacaaatgaacaagaacgtgcaagaagcagggaccatcgcaaggaacaagtagctccgtagaaaacaaaatatgcggaaaaaaaaaacaggaaacgtaacacggtgaactcaaggggaaaaaaacaattcagttgaataacctgtccaagtggacgacaaaagataactagagaacaaaagaaattcaaaagccacacaaaccttagagcatctccgaggtggctcgtcaaaccaaattttggctactcaacagcgaaataa

SEQ ID NO: 49106 - DNA, 2330 bp, Zea Mays
caataagtactcatgaaactgcgggggacaatagcaaaaacgaaacggcgaccacatacaaaacagcgactcccttgttgccggctatagcttttgcctccgtttcgctttgataaataaaagccataactcccggccgtccatcgctcgcctcccctccctccctccccgccgctgtctccggcgacagccagcctcatcgtccatggcctctacatgcctagcccccgcctccctctccacgcccctgctctccgactccatcgcgcgcgcgcccgccgccaacgggcacgccaccaaccaccgacaccaccaccacgacgacagcgacggtgctgcggcggtctccgtttgcgacgacggcggcggggacccgttcgcgttcctctcggaggaccggccgccgagggaccgagggccgtccccggccgacccgttccgcaacggcacgccggcgtggggcggcggcgtgtacgcgtggtcgaggacgctgctgctcctgccggtcgcgttggtgcggctggcactgttcgggctctccatcgcgatcggctacgcggccacgtgggtggctctccgcgggtgggcggacacgcacgggaggccgcgggtgggcggcgggcctatgccggcgtggcgccgccggctcatgtggatcacgcggatctcagctcgctgcatcctcttctctttcgggtaccattggatcagaaagaaaggaaggcccgctcgtagggagctcgcacctattgttgtttccaatcatatctcgtacatagaacccatattcttcttctatgaattgttcccaaccattgtttcgtcagagtctcatgatgccctaccatttgttggaacaattattcgagcgatgcaggttatatatgttgacagattctcaccagcttctcggaaggctgctgtaaatgaaataaaggatgtcctttcagagaaaggcagcttgcaatagcttcccgcgggtcctgttattccctgaaggtaccacaacaaatgggagattcctgatttcgttccaacatggtgcattcatacctggctaccctgttcaacctgttgttgtccgttatccacatgtgcactttgatcaatcatgggggaatatatcgttattaaagctcatgtttaagatgttcacccaatttcataatttcatggaggtagagtaccttcctgttgtctaccctcctgagatcaagcaagagaatgcccttcattttgcggaggataccagctatgctatggcacgtgccctcaatgtcttgccaacttcctattcatatggtgattctatgattatggcacgggcaatagaagctggaaaggtgaatggctcaaattacatggtagaaatggcttgggtaaaagatatttatggtgtgagcacagcagaagcaatggacctattggaacatttcctggcaatgaatccagataacgatggacgtgtgaaagcacaagatttttgggctcattttggtctggattgcagtcctctgtgtaagaagatatttcactactttgatttaggcattaaggaatcgattacgttccgtcagttcttggttgggtgcgcgcacctgaggaagcaaccgttgttccagggtgcctgtgagaccgcctttgagaagtgccgggatcctgaaacatctgagatctccagggcacagctagccgatgtcctgcggttaagcatgctgctgccgtctggtgatagaatgctggacctgttcaagacgtttgacatagatggcgacgaaaagatcagcaaggacgacttcatgacgtgtcttgggaggttcccgttcctgattgcgttctttgcagccccgatcaatggggaagtgtacatcgagatagtctgaaggcaaggcgatgccgtgtaagagtaaccaggcgcagttcaaagatgaactagcaggcgacaaatatttgagaagggagttagtattatattgtcattacggaatctgctgtgagatacgcgctggactgatagattgtcgatggaactgagaatgcacatagaaagcatttctaatgtactcctgtaagaaaacttttttggacaaacaatgaccctgtaacctcaagttgtgtttattcttgctagatggattacataacaaagcccaacgtaggtatatccagatacataaccttttgaacattgtaacctcatgttcggcgagttgaacatttgtttagaccatttagatgtaatgtatatttagatacataacaaagcgcagcaaatattcagacgcaactttttagaaacaattttgttatgttccaagaatagcctaaac

SEQ ID NO: 49107 - DNA, 2625 bp, Zea Mays
aaaaacgaaacggcgaccacatacaaaacagcgactcccttgttgccggctatagcttttgcctccgtttcgctttgataaataaaagccataactcccggccgtccatcgctcgcctcccctccctccctccccgccgctgtctccggcgacagccagcctcatcgtccatggcctctacatgcctagcccccgcctccctctccacgcccctgctctccgactccatcgcgcgcgcgcccgccgccaacgggcacgccaccaaccaccgacaccaccaccacgacgacagcgacggtgctgcggcggtctccgtttgcgacgacggcggcggggacccgttcgcgttcctctcggaggaccggccgccgagggaccgagggccgtccccggccgacccgttccgcaacggcacgccggcgtggggcggcggcgtgtacgcgtggtcgaggacgctgctgctcctgccggtcgcgttggtgcggctggcactgttcgggctctccatcgcgatcggctacgcggccacgtgggtggctctccgcgggtgggcggacacgcacgggaggccgcgggtgggcggcgggcctatgccggcgtggcgccgccggctcatgtggatcacgcggatctcagctcgctgcatcctcttctctttcgggtaccattggatcagaaagaaaggaaggcccgctcgtagggagctcgcacctattgttgtttccaatcatatctcgtacatagaacccatattcttcttctatgaattgttcccaaccattgtttcgtcagagtctcatgatgccctaccatttgttggaacaattattcgagcgatgcaggttatatatgttgacagattctcaccagcttctcggaaggctgctgtaaatgaaataaaggtaaaaaccgttcctcttaatatgtgttgtgatcacttggttgcctttaaaaatgttgcattgtattttgtcacatgttagccaccccgttgatttatgtaagttttaagttattgaatatcactgctctacattgacttaatatatggaaaaaagtaacaaacagaaggatatctacaagctacttcttgcagttgcctgctttacagatccttttaatttcgtttgcagctgacatcataattgattctaaaatcgactccagccaacttgtcctagaataacatgattgtcttttagttatttgttcatatggtacatactctctaggatgtcctttcagagaaaggcagcttgcaatagcttcccgcgggtcctgttattccctgaaggtaccacaacaaatgggagattcctgatttcgttccaacatggtgcattcatacctggctaccctgttcaacctgttgttgtccgttatccacatgtgcactttgatcaatcatgggggaatatatcgttattaaagctcatgtttaagatgttcacccaatttcataatttcatggaggtagagtaccttcctgttgtctaccctcctgagatcaagcaagagaatgcccttcattttgcggaggataccagctatgctatggcacgtgccctcaatgtcttgccaacttcctattcatatggtgattctatgattatggcacgggcaatagaagctggaaaggtgaatggctcaaattacatggtagaaatggcttgggtaaaagatatttatggtgtgagcacagcagaagcaatggacctattggaacatttcctggcaatgaatccagataacgatggacgtgtgaaagcacaagatttttgggctcattttggtctggattgcagtcctctgtgtaagaagatatttcactactttgatttaggcattaaggaatcgattacgttccgtcagttcttggttgggtgcgcgcacctgaggaagcaaccgttgttccagggtgcctgtgagaccgcctttgagaagtgccgggatcctgaaacatctgagatctccagggcacagctagccgatgtcctgcggttaagcatgctgctgccgtctggtgatagaatgctggacctgttcaagacgtttgacatagatggcgacgaaaagatcagcaaggacgacttcatgacgtgtcttgggaggttcccgttcctgattgcgttctttgcagccccgatcaatggggaagtgtacatcgagatagtctgaaggcaaggcgatgccgtgtaagagtaaccaggcgcagttcaaagatgaactagcaggcgacaaatatttgagaagggagttagtattatattgtcattacggaatctgctgtgagatacgcgctggactgatagattgtcgatggaactgagaatgcacatagaaagcatttctaatgtactcctgtaagaaaacttttttggacaaacaatgaccctgtaacctcaagttgtgtttattcttgctagatggattacataacaaagcccaacgtaggtatatccagatacataaccttttgaacattgtaacctcatgttcggcgagttgaacatttgtttagaccatttagatgtaatgtatatttagatacataacaaagcgcagcaaatattcagacgcaactttttagaaacaattttgttatgttccaagaatagcctaaac

SEQ ID NO: 49108 - DNA, 2316 bp, Zea Mays
aaaaacgaaacggcgaccacatacaaaacagcgactcccttgttgccggctatagcttttgcctccgtttcgctttgataaataaaagccataactcccggccgtccatcgctcgcctcccctccctccctccccgccgctgtctccggcgacagccagcctcatcgtccatggcctctacatgcctagcccccgcctccctctccacgcccctgctctccgactccatcgcgcgcgcgcccgccgccaacgggcacgccaccaaccaccgacaccaccaccacgacgacagcgacggtgctgcggcggtctccgtttgcgacgacggcggcggggacccgttcgcgttcctctcggaggaccggccgccgagggaccgagggccgtccccggccgacccgttccgcaacggcacgccggcgtggggcggcggcgtgtacgcgtggtcgaggacgctgctgctcctgccggtcgcgttggtgcggctggcactgttcgggctctccatcgcgatcggctacgcggccacgtgggtggctctccgcgggtgggcggacacgcacgggaggccgcgggtgggcggcgggcctatgccggcgtggcgccgccggctcatgtggatcacgcggatctcagctcgctgcatcctcttctctttcgggtaccattggatcagaaagaaaggaaggcccgctcgtagggagctcgcacctattgttgtttccaatcatatctcgtacatagaacccatattcttcttctatgaattgttcccaaccattgtttcgtcagagtctcatgatgccctaccatttgttggaacaattattcgagcgatgcaggttatatatgttgacagattctcaccagcttctcggaaggctgctgtaaatgaaataaagagaaaggcagcttgcaatagcttcccgcgggtcctgttattccctgaaggtaccacaacaaatgggagattcctgatttcgttccaacatggtgcattcatacctggctaccctgttcaacctgttgttgtccgttatccacatgtgcactttgatcaatcatgggggaatatatcgttattaaagctcatgtttaagatgttcacccaatttcataatttcatggaggtatgcatggcctgctgaattttgcctaactaatgtagagtaccttcctgttgtctaccctcctgagatcaagcaagagaatgcccttcattttgcggaggataccagctatgctatggcacgtgccctcaatgtcttgccaacttcctattcatatggtgattctatgattatggcacgggcaatagaagctggaaaggtgaatggctcaaattacatggtagaaatggcttgggtaaaagatatttatggtgtgagcacagcagaagcaatggacctattggaacatttcctggcaatgaatccagataacgatggacgtgtgaaagcacaagatttttgggctcattttggtctggattgcagtcctctgtgtaagaagatatttcactactttgatttaggcattaaggaatcgattacgttccgtcagttcttggttgggtgcgcgcacctgaggaagcaaccgttgttccagggtgcctgtgagaccgcctttgagaagtgccgggatcctgaaacatctgagatctccagggcacagctagccgatgtcctgcggttaagcatgctgctgccgtctggtgatagaatgctggacctgttcaagacgtttgacatagatggcgacgaaaagatcagcaaggacgacttcatgacgtgtcttgggaggttcccgttcctgattgcgttctttgcagccccgatcaatggggaagtgtacatcgagatagtctgaaggcaaggcgatgccgtgtaagagtaaccaggcgcagttcaaagatgaactagcaggcgacaaatatttgagaagggagttagtattatattgtcattacggaatctgctgtgagatacgcgctggactgatagattgtcgatggaactgagaatgcacatagaaagcatttctaatgtactcctgtaagaaaacttttttggacaaacaatgaccctgtaacctcaagttgtgtttattcttgctagatggattacataacaaagcccaacgtaggtatatccagatacataaccttttgaacattgtaacctcatgttcggcgagttgaacatttgtttagaccatttagatgtaatgtatatttagatacataacaaagcgcagcaaatattcagacgcaactttttagaaacaattttgttatgttccaagaatagcctaaac

SEQ ID NO: 49109 - DNA, 2767 bp, Zea Mays
aaaaacgaaacggcgaccacatacaaaacagcgactcccttgttgccggctatagcttttgcctccgtttcgctttgataaataaaagccataactcccggccgtccatcgctcgcctcccctccctccctccccgccgctgtctccggcgacagccagcctcatcgtccatggcctctacatgcctagcccccgcctccctctccacgcccctgctctccgactccatcgcgcgcgcgcccgccgccaacgggcacgccaccaaccaccgacaccaccaccacgacgacagcgacggtgctgcggcggtctccgtttgcgacgacggcggcggggacccgttcgcgttcctctcggaggaccggccgccgagggaccgagggccgtccccggccgacccgttccgcaacggcacgccggcgtggggcggcggcgtgtacgcgtggtcgaggacgctgctgctcctgccggtcgcgttggtgcggctggcactgttcgggctctccatcgcgatcggctacgcggccacgtgggtggctctccgcgggtgggcggacacgcacgggaggccgcgggtgggcggcgggcctatgccggcgtggcgccgccggctcatgtggatcacgcggatctcagctcgctgcatcctcttctctttcgggtaccattggatcagaaagaaaggaaggcccgctcgtagggagctcgcacctattgttgtttccaatcatatctcgtacatagaacccatattcttcttctatgaattgttcccaaccattgtttcgtcagagtctcatgatgccctaccatttgttggaacaattattcgagcgatgcaggttatatatgttgacagattctcaccagcttctcggaaggctgctgtaaatgaaataaaggtaaaaaccgttcctcttaatatgtgttgtgatcacttggttgcctttaaaaatgttgcattgtattttgtcacatgttagccaccccgttgatttatgtaagttttaagttattgaatatcactgctctacattgacttaatatatggaaaaaagtaacaaacagaaggatatctacaagctacttcttgcagttgcctgctttacagatccttttaatttcgtttgcagctgacatcataattgattctaaaatcgactccagccaacttgtcctagaataacatgattgtcttttagttatttgttcatatggtacatactctctaggatgtcctttcagagaaaggcagcttgcaatagcttcccgcgggtcctgttattccctgaaggtaccacaacaaatgggagattcctgatttcgttccaacatggtgcattcatacctggctaccctgttcaacctgttgttgtccgttatccacatgtgcactttgatcaatcatgggggaatatatcgttattaaagctcatgtttaagatgttcacccaatttcataatttcatggaggtagagtaccttcctgttgtctaccctcctgagatcaagcaagagaatgcccttcattttgcggaggatgtaaatatgttcatctcaaataaaattttcatctaacatcctgtgtgtttcactagtggtgtgataatatgtcatccctacaaattttaattcttgcagaccagctatgctatggcacgtgccctcaatgtcttgccaacttcctattcatatggtgattctatgattatggcacgggcaatagaagctggaaaggtgaatggctcaaattacatggtagaaatggcttgggtaaaagatatttatggtgtgagcacagcagaagcaatggacctattggaacatttcctggcaatgaatccagataacgatggacgtgtgaaagcacaagatttttgggctcattttggtctggattgcagtcctctgtggtgcctgtgagaccgcctttgagaagtgccgggatcctgaaacatctgagatctccagggcacagctagccgatgtcctgcggttaagcatgctgctgccgtctggtgatagaatgctggacctgttcaagacgtttgacatagatggcgacgaaaagatcagcaaggacgacttcatgacgtgtcttgggaggttcccgttcctgattgcgttctttgcagccccgatcaatggggaagtgtacatcgagatagtctgaaggcaaggcgatgccgtgtaagagtaaccaggcgcaggtagggccggggatccctccgtttatgcaatgggatacccacctgtatttgggttgcatcgagtggctgaccaatatagtgcgtcaattttgtttcgttgcttctttcaaatgctcacttcgttcttttttatttgttgcgttttagttcaaagatgaactagcaggcgacaaatatttgagaagggagttagtattatattgtcattacggaatctgctgtgagatacgcgctggactgatagattgtcgatggaactgagaatgcacatagaaagcatttctaatgtactcctgtaagaaaacttttttggacaaacaatgaccctgtaacctcaagttgtgtttattcttgctagatggattacataacaaagcccaacgtaggtatatccagatacataaccttttgaacattgtaacctcatgttcggcgagttgaacatttgtttagaccatttagatgtaatgtatatttagatacataacaaagcgcagcaaatattcagacgcaactttttagaaacaattttgttatgttccaagaatagcctaaac

SEQ ID NO: 49110 - DNA, 2645 bp, Zea Mays
cttcattttccctcctcatttaaccaataaaagttagctagcaataacaactgcaataatgttttcttcccagctggaaaaataaattgtaggataaataaaacactcggataatcgacgtgaataaataaagaaacaaacgaactattctgccctgccaactgacaagtgcatgcgagttggggccgggggacggatggatgtacagacacactgcaaaggcctagtttctcctgtcagtaaaaattcctccctgtcctctgtcgccatgtagtcatgctgttattgacaagccacggatggatggcaggcagggacgacagctcggtggtaataattcgccaaagcccaagggtacaaactgtaaaaagggagccagggcaaaggcaaagggaaacaactctctgcaaaaagaaaagaaataaaaaaaaagaaaatacacacgctaccctactactactaccactgccatgctcactttctccatttcttccctttttctcctcctcgtctcccttctctctctcctgcgtccatcctctctctctcatctcatctggttgggtggagtggagataagctagagaggtgagctctgtgggatcggagcgagagcaataaatagaaattaaggtcggggccgcctccatggcggcgtttgcaggcgccctcgaattcctcccctgaacccattcgatccgccccctagctctctctcttcctcctccgccctctttatatagcgatactacttgtgtagcgggcgagggtgaggtgaggtgaggaagaaagagagccctcgccgcgtgcttaggccccccccaagacgccgagagaggaaagggattaggcagcaagaggaggcgctccgctctcggattagaggcgagcttcctatttccagcaaaggcaaggagaggatcagctagctagctgctaggaggccggagggagagaaagatcggaggaggagctgcaaaggctagcttttctttggtgcggctggtgctggtggtgaactggtctcggtgctcggtggtgcgtggtgtggtgcacactgcacactctccctctcgcgttcgtcttgatggtgggtggtggtggcagctgcctcgcatggctgggttctctctgaggggcggcggaggcgggaggggcggtgaccggggcggcgatcacccgatcggcgccgacagcctgttcctgtacgcgcgaggggcggccgccgcggctgccgacacggcggccagcggcggcggtgggggcggcgggatagggttccagctctggcacccgcaccagcaggcgacggcggcggcggtgccgcacacgtcgcagttcttctcctccggcgccgtcgccacgggcgtcgtgctcggcttctcctcgcatgacggggccggcgggatcggcggtgcgggtggcgccggcgctggcggcggcagggccgggaccagctgccaggactgcggcaacaacgccaagaaggactgcacccacatgcgctgccgcacctgctgccggagccgcggcttcagctgccccacgcacgtcaagagcacctgggtccccgccgccaagcgccgggagcgccagcagcagctcgccgcgctcttccgcggcgccgccaacagcaacagcgccgccgccgccgctgctgcggccgcgagcaagcgcccgcgggagctcgtccggtcacttggccgcttgccgtccgccaactccgccatggtcaccacgaccacctcctcaggcgacggcggcggcgggaggttcccgccggagctgagcgtggaggcggtgttccggtgcgtgcggatcgggccggtggacgagccagacgcggagctcgcgtaccagacggcggtgagcatcggcgggcacactttcaaggggatcctgcgtgaccacgggccggcggacgacgcggcggtgggccagctgccgccgtcctctgcggagtaccaccaccagctgacggcggggcaagcgagggaagggtcgtcgcccgcggggagcagcgaggcggcggccacggtggccacgtcggcggcggtgctgatggacccgtacccgacgccgatcggcgccttcgccgcaggcacccagttcttccctcataaccctagaacctagcttaagttagctagctttgctgcttccattattcgtatcggtgctagtagcttaattcctttgatggttccatttacttcttccaacaaattaaagatgatgatgaacatgagctaagtagtcatcgtcatcgtcgcaatcaaattcgagacaagaagagaagagattttaattgttactgcatactactactacaacgtgcattcgagccgttgatcgatgaacactagtgcatgatcagcaatgtgtggatcatatataatgttattagctagtagagctagtgtactgttacttgttgagcaatcttgttttgggtttcattaataatttggctaccttaatgcaatgcaaagataagaattttcaagtgtagcttccttcttcattcattccacaaatgatgggagctccatttgacatgcagtagtcctgcacgtgattagttagtgctagctactgtatactgtctagctagctagctagcttattataagctaatatagtat

SEQ ID NO: 49111 - DNA, 2614 bp, Zea Mays
cactttctccatttcttccctttttctcctcctcgtctcccttctctctctcctgcgtccatcctctctctctcatctcatctggttgggtggagtggagataagctagagaggtgagctctgtgggatcggagcgagagcaataaatagaaattaaggtcggggccgcctccatggcggcgtttgcaggcgccctcgaattcctcccctgaacccattcgatccgccccctagctctctctcttcctcctccgccctctttatatagcgcagatactacttgtgtagcgggcgagggtgaggtgaggtgaggaagaaagagagccctcgccgcgtgcttaggccccccccaagacgccgagagaggaaagggattaggcagcaagaggaggcgctccgctctcggattagaggcgagcttcctatttccagcaaaggcaaggtgagtagcactggtagcagtactgatgagtgagtgatggtgcggtggagcactgcagcggcaggtttatctttctcctctcttgctcactcgcacatgcatatcccactcacaccagcagcagcgagctgaggctaggctagccatcctcatcctcaactcctacgcgcttagcttgcttgcacaaacctctctctatgtctaagagcttctcgctgcagatctaccgccgatccatccgctaccgagctatgccaatctatatatgcagctcatgcatctaacctactgcatgtcacacagccccagccccatgcccgctgtaccgtgccgccgtgttgttgcttttgcttctctgcctgcgcgcaccttctgcttctgcgccagcttttttcttactcccaagatctctatttgtttttttttccgttgttgctgtaggagaggatcagctagctagctgctaggaggccggagggagagaaagatcggaggaggagctgcaaaggctagcttttctttggtgcggctggtgctggtggtgaactggtctcggtgctcggtggtgcgtggtgtggtgcacactgcacactctccctctcgcgttcgtcttgatggtgggtggtggtggcagctgcctcgcatggctgggttctctctgaggggcggcggaggcgggaggggcggtgaccggggcggcgatcacccgatcggcgccgacagcctgttcctgtacgcgcgaggggcggccgccgcggctgccgacacggcggccagcggcggcggtgggggcggcgggatagggttccagctctggcacccgcaccagcaggcgacggcggcggcggtgccgcacacgtcgcagttcttctcctccggcgccgtcgccacgggcgtcgtgctcggcttctcctcgcatgacggggccggcgggatcggcggtgcgggtggcgccggcgctggcggcggcagggccgggaccagctgccaggactgcggcaacaacgccaagaaggactgcacccacatgcgctgccgcacctgctgccggagccgcggcttcagctgccccacgcacgtcaagagcacctgggtccccgccgccaagcgccgggagcgccagcagcagctcgccgcgctcttccgcggcgccgccaacagcaacagcgccgccgccgccgctgctgcggccgcgagcaagcgcccgcgggagctcgtccggtcacttggccgcttgccgtccgccaactccgccatggtcaccacgaccacctcctcaggcgacggcggcggcgggaggttcccgccggagctgagcgtggaggcggtgttccggtgcgtgcggatcgggccggtggacgagccagacgcggagctcgcgtaccagacggcggtgagcatcggcgggcacactttcaaggggatcctgcgtgaccacgggccggcggacgacgcggcggtgggccagctgccgccgtcctctgcggagtaccaccaccagctgacggcggggcaagcgagggaagggtcgtcgcccgcggggagcagcgaggcggcggccacggtggccacgtcggcggcggtgctgatggacccgtacccgacgccgatcggcgccttcgccgcaggcacccagttcttccctcataaccctagaacctagcttaagttagctagctttgctgcttccattattcgtatcggtgctagtagcttaattcctttgatggttccatttacttcttccaacaaattaaagatgatgatgaacatgagctaagtagtcatcgtcatcgtcgcaatcaaattcgagacaagaagagaagagattttaattgttactgcatactactactacaacgtgcattcgagccgttgatcgatgaacactagtgcatgatcagcaatgtgtggatcatatataatgttattagctagtagagctagtgtactgttacttgttgagcaatcttgttttgggtttcattaataatttggctaccttaatgcaatgcaaagataagaattttcaagtgtagcttccttcttcattcattccacaaatgatgggagctccatttgacatgcagtagtcctgcacgtgattagttagtgctagctactgtatactgtctagctagctagctagcttattataagctaatatagtat

SEQ ID NO: 49112 - DNA, 2193 bp, Zea Mays
ggagtggagataagctagagaggtgagctctgtgggatcggagcgagagcaataaatagaaattaaggtcggggccgcctccatggcggcgtttgcaggcgccctcgaattcctcccctgaacccattcgatccgccccctagctctctctcttcctcctccgccctctttatatagcggtagcctcccacctctcatctcctcatcaccccccaaaaagcagcttgcttgcttgcttgcgttctctaccacgacttatgctcgatcgtaaactaacctcagcaccgtcctccagcagatactacttgtgtagcgggcgagggtgaggtgaggtgaggaagaaagagagccctcgccgcgtgcttaggccccccccaagacgccgagagaggaaagggattaggcagcaagaggaggcgctccgctctcggattagaggcgagcttcctatttccagcaaaggagaggatcagctagctagctgctaggaggccggagggagagaaagatcggaggaggagctgcaaaggctagcttttctttggtgcggctggtgctggtggtgaactggtctcggtgctcggtggtgcgtggtgtggtgcacactgcacactctccctctcgcgttcgtcttgatggtgggtggtggtggcagctgcctcgcatggctgggttctctctgaggggcggcggaggcgggaggggcggtgaccggggcggcgatcacccgatcggcgccgacagcctgttcctgtacgcgcgaggggcggccgccgcggctgccgacacggcggccagcggcggcggtgggggcggcgggatagggttccagctctggcacccgcaccagcaggcgacggcggcggcggtgccgcacacgtcgcagttcttctcctccggcgccgtcgccacgggcgtcgtgctcggcttctcctcgcatgacggggccggcgggatcggcggtgcgggtggcgccggcgctggcggcggcagggccgggaccagctgccaggactgcggcaacaacgccaagaaggactgcacccacatgcgctgccgcacctgctgccggagccgcggcttcagctgccccacgcacgtcaagagcacctgggtccccgccgccaagcgccgggagcgccagcagcagctcgccgcgctcttccgcggcgccgccaacagcaacagcgccgccgccgccgctgctgcggccgcgagcaagcgcccgcgggagctcgtccggtcacttggccgcttgccgtccgccaactccgccatggtcaccacgaccacctcctcaggcgacggcggcggcgggaggttcccgccggagctgagcgtggaggcggtgttccggtgcgtgcggatcgggccggtggacgagccagacgcggagctcgcgtaccagacggcggtgagcatcggcgggcacactttcaaggggatcctgcgtgaccacgggccggcggacgacgcggcggtgggccagctgccgccgtcctctgcggagtaccaccaccagctgacggcggggcaagcgagggaagggtcgtcgcccgcggggagcagcgaggcggcggccacggtggccacgtcggcggcggtgctgatggacccgtacccgacgccgatcggcgccttcgccgcaggcacccagttcttccctcataaccctagaacctagcttaagttagctagctttgctgcttccattattcgtatcggtgctagtagcttaattcctttgatggttccatttacttcttccaacaaattaaagatgatgatgaacatgagctaagtagtcatcgtcatcgtcgcaatcaaattcgagacaagaagagaagagattttaattgttactgcatactactactacaacgtgcattcgagccgttgatcgatgaacactagtgcatgatcagcaatgtgtggatcatatataatgttattagctagtagagctagtgtactgttacttgttgagcaatcttgttttgggtttcattaataatttggctaccttaatgcaatgcaaagataagaattttcaagtgtagcttccttcttcattcattccacaaatgatgggagctccatttgacatgcagtagtcctgcacgtgattagttagtgctagctactgtatactgtctagctagctagctagcttattataagctaatatagtat

SEQ ID NO: 49113 - DNA, 2187 bp, Zea Mays
ggagtggagataagctagagaggtgagctctgtgggatcggagcgagagcaataaatagaaattaaggtcggggccgcctccatggcggcgtttgcaggcgccctcgaattcctcccctgaacccattcgatccgccccctagctctctctcttcctcctccgccctctttatatagcggtagcctcccacctctcatctcctcatcaccccccaaaaagcagcttgcttgcttgcttgcgttctctaccacgacttatgctcgatcgtaaactaacctcagcaccgtcctccagcagatactacttgtgtagcgggcgagggtgaggtgaggtgaggaagaaagagagccctcgccgcgtgcttaggccccccccaagacgccgagagaggaaagggattaggcagcaagaggaggcgctccgctctcggattagaggcgagcttcctatttccagcaaaggcaagctagctagctgctaggaggccggagggagagaaagatcggaggaggagctgcaaaggctagcttttctttggtgcggctggtgctggtggtgaactggtctcggtgctcggtggtgcgtggtgtggtgcacactgcacactctccctctcgcgttcgtcttgatggtgggtggtggtggcagctgcctcgcatggctgggttctctctgaggggcggcggaggcgggaggggcggtgaccggggcggcgatcacccgatcggcgccgacagcctgttcctgtacgcgcgaggggcggccgccgcggctgccgacacggcggccagcggcggcggtgggggcggcgggatagggttccagctctggcacccgcaccagcaggcgacggcggcggcggtgccgcacacgtcgcagttcttctcctccggcgccgtcgccacgggcgtcgtgctcggcttctcctcgcatgacggggccggcgggatcggcggtgcgggtggcgccggcgctggcggcggcagggccgggaccagctgccaggactgcggcaacaacgccaagaaggactgcacccacatgcgctgccgcacctgctgccggagccgcggcttcagctgccccacgcacgtcaagagcacctgggtccccgccgccaagcgccgggagcgccagcagcagctcgccgcgctcttccgcggcgccgccaacagcaacagcgccgccgccgccgctgctgcggccgcgagcaagcgcccgcgggagctcgtccggtcacttggccgcttgccgtccgccaactccgccatggtcaccacgaccacctcctcaggcgacggcggcggcgggaggttcccgccggagctgagcgtggaggcggtgttccggtgcgtgcggatcgggccggtggacgagccagacgcggagctcgcgtaccagacggcggtgagcatcggcgggcacactttcaaggggatcctgcgtgaccacgggccggcggacgacgcggcggtgggccagctgccgccgtcctctgcggagtaccaccaccagctgacggcggggcaagcgagggaagggtcgtcgcccgcggggagcagcgaggcggcggccacggtggccacgtcggcggcggtgctgatggacccgtacccgacgccgatcggcgccttcgccgcaggcacccagttcttccctcataaccctagaacctagcttaagttagctagctttgctgcttccattattcgtatcggtgctagtagcttaattcctttgatggttccatttacttcttccaacaaattaaagatgatgatgaacatgagctaagtagtcatcgtcatcgtcgcaatcaaattcgagacaagaagagaagagattttaattgttactgcatactactactacaacgtgcattcgagccgttgatcgatgaacactagtgcatgatcagcaatgtgtggatcatatataatgttattagctagtagagctagtgtactgttacttgttgagcaatcttgttttgggtttcattaataatttggctaccttaatgcaatgcaaagataagaattttcaagtgtagcttccttcttcattcattccacaaatgatgggagctccatttgacatgcagtagtcctgcacgtgattagttagtgctagctactgtatactgtctagctagctagctagcttattataagctaatatagtat

SEQ ID NO: 49114 - DNA, 998 bp, Zea Mays
tctgatgaagtataaggtagtataaggtgattctatgaaccaaacacaccgttagattattatttgactttttacccgctaataatttgtataaacaaacatctctaacaagattatataaattagattatataacctgaattatataatctatataaaataagctggattatataatgatgtgtgcaaccctgggagaagaagatctgggtgatgaacgttgtgaacgtggacgcgcccgacacactttcggtcatcttcgagcgcgggctgctgggcatctaccatgactggtgcgagtccttcagcgcctacccgagatcaaagaggtcagtggccagcaccaccagtctgtctgttttcttcacatctttctagcttgatgacgcacatggccgtcttcttcagatgcgcggttctgccatggtggtggaggtggacaggcacaggatcgtcaggccaggggtcagcatcgtcgtgcgcgacaaggccagcgccgtcggcgaggtggacaagctcctgagatcgctccacttggacgcgcggctgaaggacgacgaaggcgtgatgtacgcagagaagcccgattggcggccggagctcgaagaagagccgttgtaatggccaccatttcagagtggcgagcagtagggttcttttcttttcttgcgtccaccagcattgatagtactgtacatgattttgtcattgctgcagcagtagtatgtacagtttgttcataagcatcagaattctagattatattatatacatacatacagcaacccgagtgtctgatgatagttacgagattccatattgtgtgtaccttgcacgccagacggccagaggttctgtgaaatatatgcgcagctgaacatgcgcgcgaacatgttggtaatatagctttgtgaagcgtccaaagataagttcaatagcaaatccaaattatctgagaccatgtaatgatgtaaaaatgattttacatatcagctgtt

SEQ ID NO: 49115 - DNA, 634 bp, Zea Mays
agattctgcacgagggattttacgaggggaaggttgtccatgagaaatgctccatagttaccccgtcttgcaatacgctgcgggcaactgcaaggcaatatattaacgcgattcagaagaatatggaaccatatttttcaagcaatatatatacggggaaatggtatatgttaactagagatgtacctgtggaatattcagcactagtgctctaagcaagctaagaaagcagttagcggcagataaactaacactaaaattaaaaagcagcaggtttcgagtggagtgtgcagagaatgacctagcatggtggcttattcttcatcacattagtatcgcgcttgaaggcttgagggctgatgcaccactaacaacgttactcaacgactttatccaggagcagattatttttgtagagtatatgacgtttatgttagtaaactatttatgccattacaaaggtggagtaatctacaatcgagcactagataagtagatatgaataaaaaaccagtaaagcagcataactgcataaggaattgcacattacccaaaattgatatcaacgtagtcgcaatatggttccaccttcttcgcagcttgcaacaaaatgtcaggatcattggcacaaaac

SEQ ID NO: 49116 - DNA, 2291 bp, Zea Mays
gaggactcaacacaaaagaagcacaaacaaggtggcgaacttggcctcctctcctcactcctatcccctcttcccccaaacaagatgtcgcctctccctgtcatggcggataatttaatctcgccacccccacatgctctgtttttatattgcttcctcctcactgtacccatcccgccatgtcctctcctctgtctctctctctttgagcctcctttttcaacctaacctttgacgctgtagctcgagagcaagcatagtgcctagtgcctaccagattctctccctgagcggctgagctctgccgatccgcgataggctcgcgccatgcagatgctctgcgacgtctgcgccgccgcgccggccgccgtgatctgctgcgccgacgaggccgcgctctgctccgcctgcgaccgccgcgtccaccgcgccaacaagctcgcccacaagcaccgccgcatccccctcgcccagccctctggcgacgaatccgacgccgacgccaagccgctctgcgacgtgtgtaaggagcggaggggcctcgtgttctgcgtggaggaccgcgccatcctgtgccccgactgcgacgaccccatccacagcgccaacgacctcaccgccaagcacacccgcttcctcctcgtcggggccaagctctccgccgcgctcgtcgacgcccaggcgccccactcccctgacgacgacgacaacgactgcggccgcggcaacggcgccgccgccgagcccgacgctgtccccgccgtctgcgcgcagggctcctgcgcggccaaggcctcgtctcttgagtccggtggcggcggcggcggcggcagcggcagcggcagcagcatctccgagtacctcaccaacatctgcccaggctggcgcgtcgacgacctcctctttgacgactcggcgttctcagcggcatcgaaggccgacagctgcgacgacgggcacgagcaggtgccgtccctggacgccgacctcttcgacgtggtggctggcgccggctggccggggaagcgcggcagcgcgtggtcaggagtcggagctctgggcttcgacaaggtgccggcctccgttgttgtcgtcccgacggcggccaagcaacagcaggggtgcgtgagggagaggacctgggactcggacagcgacagcgacgtgttcgcggtgccggagctcccgcaaccaccgcaggccaagaaggcgcggccggcgccggctccggcgccgactttctggtgcttctgagctgcactgtcccagtccggtccggccggcctgtgtgcactgtgtactagggatggcaatcgggcgggtagtacacggatatatagttcgcgaatccatacccacgagacaaaactcaacccatacacgtacccataaacgttcgtgggtatggatctgtatccatacccgtacccgtcgggtatccgctatccagtggatacccgttacccgcccgcccactacaattttagcattaaacaccaaacaacaattttattatatttcaaaataattatcattctaatagcattaaatgataatttcagcaccaaacaacatgttatggataaaagttgaaaaataagaatttatgataatatataaatctggatggcccacatgttagatatccattgggtaacgggtatggatactggatatccatacccacgaaaaaatatccgcggataccttattatatccataaccgtacccgcggatatcaaattccaccatacccatatccaatggataattatccgcggttatttacccatacccgtacccattgccatccctactgtgtacttgccgtgacttctgtaaccagtgtgtgtgagcgagcttgctcgtgctttttacccatgtactgttgttactgcatacacacacacacttaccactactattagtagctagcagtgctcaaacccaagttaattaagtttggcgcagtttatattatgacttaatcatgaggtgatattgctgttaccgtattgtaaactgcccaaagttacgtttcgaacttgtacgggctacaacacatgttttggtgctacatatttgacacaaaactacaagtattagcacagcactatgaaaaactacaataatatagagtattgatatttatttcagaactttctagaaggggacacaagtcatccttataaggattatcttagcctatatctcctctatcatgttatactcacttttttgtgacatgtcaaggaaaaagatcactggacccttagggcccaccggttcag

SEQ ID NO: 49117 - DNA, 2612 bp, Zea Mays
taatatagaaaatgatattttatagttgtagtggggtatagagggagtatttagggggaaccactgcgggagatgaaaaaatagggggtgaaatgttgatgatgtgacccaaaaaagtgatataggggaaaaatttaggggtaacgcttgcggatagcctaagaggctctatattcttcctaatctatataaataaagtttttaaaaaaaaaccctccaacagactagcaaaacgactatccaaatatagtcatattctattccggatttctcgctagccaaatatagaaatgtgattatgtgaatgactatctagagtgtatataagatatagaaagacttggaaattgaaaaaaatatagaaagtgattttacgcaaataactctacaaataataatttagcgaactcttgaagttgttctaaagctatctccacatctttttattttaaacttaaatatataaataaaacaatctacattataacacagtgcacaacaatagttggcttggctatagcctaactcaaactccaaacgacaagcaaccacagaagaagcaaacctaccgctcgcagcaaacagcagtgctctccactccgaatccgccacgtctcctccggccgcacgaatccggcgcaaaaggcccgaggtgacgacgccggtgcacacgcgattctatcgccgacatccgggtctcgcctgtagggccacagccagtagcggctccgggcccgcctgtcatacgaagccgagtcccgcgctggtttctcgttaactaataagccctcaccgcgcgcgagggtggagtagacgcaatcccacgcgaatcccatcggatcgagtccatcagcacgccgaagaataaaccgtcgtcgaggaggaagtagggggccgcgaggtggacttcaggatgcaggcgcagaggtccccggcgatggcgggaggtggcggcgccgccacggcggtggcggctggggcggcggttgggatgccgtcccaggccacgctgccggtgcggcggcggtgcgagggcacggccatgggagccatcacgcttgacctccgccccgggctcggcgtcggccccttcaccctcggcatgccgatatcggatgcgtttacacagatagagcggcagccgaatatctacgacgttgtccacgtgaaatacttcgacgaggagcctctcaagctggactttgtcattagctttccggaccatggatttcacctacgctttgatccttggtcccagaggctccgtctcgtagagatttatgatgttaagagattgcaattgcgatatgcgacatctttaattggtggcccgtcaacattagccacttttgcggctgtgtatgcactctttggaccaactttccctggcatatatgacaaagagaggggaatttatacgctgttctacccaggtttatccttcgcattccctattcccagccagtatacaaatctattcactaatggagaagtggcagatttgccactggaattcccagatggtacaacccctgttacttgtcgggtttgtatatatgatagctcgacagatagcaaggttggggttggatctttgatggacaaagcaatggtacctgcactgcctgcaggcagcctgtatatggaggaggtgcacgcgaagcttggtgaagaactttggttcacaataggggggcaacatattccttttggtgcatcaccacaggatgtctggactgacttgggtcgtccttgtggtatccatcagaagcaggtggaccaaatggtcatacactccgcatcagaagccaggcctcggacgaccctttgtggagattacttttacaactacttctcacgtggaattgatatcttatttaatggacagacacataggataaagaagtttgttttgcatacaaacttccctggccactcagatttcaattcatataagaaatgcaactttgttatatacgacgctgaaggtacatgtcagcctaataatgcctcaaaaaattgcataacacctagtacaaaatgggaacaagtcaaggagatcctcggtgactgtggccgagctgcaatccagacacaaggctccatgaacaatccatttggatcaacttttgtatatggttatcagaatatcgctttcgaggtgatgaaaaacggatatattgcaactgtcaccctcttccaatcatgagtgtgccactacatgtgctgctgctctgagctctggctgcaacaatgatggttaacctgcagaaaggaagtatgccgtacttttgtgcttcagcagcagcaatttcgagtcgaagccaactctatggggcctggtgacggtgcttggtttatggaatgggatgcagctgcgcagtcgatatggatcagcaccgtgacttgtatttgtgctgtacatcccggccgttgtacatgaactaactgtaccctgtgacctcaccttgtgtacataaatggtctttatttattggaaaagaaaatgtacatactgccatgtggtcgcctaatggaactgtgctagctaaacatctcatgtgggtactgatatgatttgtccagtagtttgatattggttccagtctttc

SEQ ID NO: 49118 - DNA, 2499 bp, Zea Mays
aaataacggacgccacctctcgctccctccctcctcctcctgtctcgcgcccccctggcccctgcttcttctccttcccctttcattcccaacgaggcaacgacccgccctgccccgcctcgcgatccccacccgcggcggcgcggagggccggaacccaaaccctaaccctagcggcccgggcgccgcctccggtctcgcccgcccgccgcgccgggccgcgatggggcagtgctacgggaaggcgcgcggcgcgtcctcgcgggcggaccacgacgccgacccctcgggggcggggtcggtcgcgccgccatccccgctgccggccaacggcgcgccgctgcccgccacgcccaggcgccacaagtccggatccaccacgccggtgcaccaccaccaggcggcgacgcccggcgccgccgcctggcctagtccgtacccggccggcggcgccagcccgctccccgcgggcgtgtcgccgtcgccggcccggtccacgccccggaggttcttcaagcggcccttcccgccgccctcgcccgccaagcacatcaaggccacgctcgccaagcgcctcggcgggggcaagcccaaggagggcaccataccggaggagggcggcgcgggggccggggccggggccggcgccggcgcggccgttggtgccgccgattccgccgaggccgaccgcccgttggacaaaacgttcggcttcgccaagaactttggggccaagtacgatctcgggaaggaggtcgggaggggccactttggccacacctgctccgccgtcgtcaagaagggcgagcacaagggccatactgtcgctgtcaagatcatctccaaagctaagatgacaacggccatttccattgaagatgttcgtagggaggtcaagattttgaaagccctatcagggcacgataatctcgtcagattctatgatgcatattatgtgaaggtggagagttgctagacagaattttagcaagaggtgggagatatacagaagaagatgccaaagcgatcattgtacagattttgagcgtagtggccttctgtcatcttcagggagtagtgcatcgtgatttgaagccagagaattttctcttcacaacaagagatgaaagcgctcctatgaagttgattgactttggtctgtcagattttattagaccagatgaaaggctcaatgatattgttggaagtgcttattatgttgctccagaggttctacacagatcatacagtatggaagcagacatttggagtataggtgttataacatacattctgctctgtggcagtcggccattctgggcaaggacagaatctgggatcttccggtccgtattgagggctgatcccaattttgacgattcaccatggccttcagtatcggctgaggctaaggattttgtgaagagatttctgaacaaagattaccgcaaaagaatgactgctgtccaagcactgactcacccttggttacgagatgaacaaaggcaaattccattggacatactcattttcagattagttaagcagtatctccgtgctactcctcttaaacgtttggcattaaaggcactatctaaggctttaagcgaggatgaacttttgtatcttaggttgcagtttaagctgcttgaacccagagatgggttcgtgtcactcgacaactttcgggcggctctgacaagatactcaactgacgccatgagagaatcaagggttcttgagtttcagcatgcgttggaaccacttgcgtacagaaagatggactttgaagaattctgtgctgcagcaatcagcccgtaccagctggaagctttggaaaggtgggaagaaattgctggaacagcttttcagcactttgaacaagagggcaaccgagttatatcagttgaggagttagcacaggaactaaatctcgcgccgacacattactccattgtgcaagactggatcagaaaatcggatggcaagcttaactttcttgggttcaccaaatttttgcacggtgtcacgatacggggttcaaatacaagacgacactaaacagatgcaaactgtattcgcttctaatttgaagcctctcatcgattatatggccctgattgctgttacctcctgcctgccctgcccgagtctggtcaatgaccatccttgtttgtgatgcccctcccgctgttgccgtcgtagcttttgtagagtacatgtaaagatccttgtaatggcgaaatcatatggtttgctcaagaaatatatagtgtcatttgttcttttttttttggctcgctaattttggatctttatccgtgggcagtcttttgttgacgttggcgctgaagttgataccgtcgcaggaacctgtaaggatgtaactttgtatgcacatacttgtatattattggcgtaaatttagttgtacactatcaacttataactgggttacaaagaaatgccagatatgtttgggatgaggatctcgcttta

SEQ ID NO: 49119 - DNA, 2323 bp, Zea Mays
cctcctcctcctgtctcgcgcccccctggcccctgcttcttctccttcccctttcattcccaacgaggcaacgacccgccctgccccgcctcgcgatccccacccgcggcggcgcggagggccggaacccaaaccctaaccctagcggcccgggcgccgcctccggtctcgcccgcccgccgcgccgggccgcgatggggcagtgctacgggaaggcgcgcggcgcgtcctcgcgggcggaccacgacgccgacccctcgggggcggggtcggtcgcgccgccatccccgctgccggccaacggcgcgccgctgcccgccacgcccaggcgccacaagtccggatccaccacgccggtgcaccaccaccaggcggcgacgcccggcgccgccgcctggcctagtccgtacccggccggcggcgccagcccgctccccgcgggcgtgtcgccgtcgccggcccggtccacgccccggaggttcttcaagcggcccttcccgccgccctcgcccgccaagcacatcaaggccacgctcgccgaccgcccgttggacaaaacgttcggcttcgccaagaactttggggccaagtacgatctcgggaaggaggtcgggaggggccactttggccacacctgctccgccgtcgtcaagaagggcgagcacaagggccatactgtcgctgtcaagatcatctccaaagctaagatgacaacggccatttccattgaagatgttcgtagggaggtcaagattttgaaagccctatcagggcacgataatctcgtcagattctatgatgcatgtgaggacgccctcaatgtctacattgtcatggaattatgtgaaggtggagagttgctagacagaattttagcaagaggtgggagatatacagaagaagatgccaaagcgatcattgtacagattttgagcgtagtggccttctgtcatcttcagggagtagtgcatcgtgatttgaagccagagaattttctcttcacaacaagagatgaaagcgctcctatgaagttgattgactttggtctgtcagattttattagaccagatgaaaggctcaatgatattgttggaagtgcttattatgttgctccagaggttctacacagatcatacagtatggaagcagacatttggagtataggtgttataacatacattctgctctgtggcagtcggccattctgggcaaggacagaatctgggatcttccggtccgtattgagggctgatcccaattttgacgattcaccatggccttcagtatcggctgaggctaaggattttgtgaagagatttctgaacaaagattaccgcaaaagaatgactgctgtccaagcactgactcacccttggttacgagatgaacaaaggcaaattccattggacatactcattttcagattagttaagcagtatctccgtgctactcctcttaaacgtttggcattaaaggcactatctaaggctttaagcgaggatgaacttttgtatcttaggttgcagtttaagctgcttgaacccagagatgggttcgtgtcactcgacaactttcgggcggctctgacaagatactcaactgacgccatgagagaatcaagggttcttgagtttcagcatgcgttggaaccacttgcgtacagaaagatggactttgaagaattctgtgctgcagcaatcagcccgtaccagctggaagctttggaaaggtgggaagaaattgctggaacagcttttcagcactttgaacaagagggcaaccgagttatatcagttgaggagttagcacaggaactaaatctcgcgccgacacattactccattgtgcaagactggatcagaaaatcggatggcaagcttaactttcttgggttcaccaaatttttgcacggtgtcacgatacggggttcaaatacaagacgacactaaacagatgcaaactgtattcgcttctaatttgaagcctctcatcgattatatggccctgattgctgttacctcctgcctgccctgcccgagtctggtcaatgaccatccttgtttgtgatgcccctcccgctgttgccgtcgtagcttttgtagagtacatgtaaagatccttgtaatggcgaaatcatatggtttgctcaagaaatatatagtgtcatttgttcttttttttttggctcgctaattttggatctttatccgtgggcagtcttttgttgacgttggcgctgaagttgataccgtcgcaggaacctagggacctcgtcacggaggtgtccacagcagggagaacgtaacgcagaagaacaaaaatg

SEQ ID NO: 49120 - DNA, 2896 bp, Zea Mays
gtcacggagaaaagaaaaagtaaccaacctccggtccaacccgatagcccaaaccccctgcgagcacaagcacaaagctaaagctgtgtaagcagcagaatccaatccaatccccagctcgcgccgccccctctaatccctcctccgcaaggcagacaggggccggcgttcactcgggcatccgcgggacggacggggagcaaagcctcagcggcgagtgcgggcgatgaggtcttcggaggcgtcgtcgcggctcgtgcaggagctcgtgctgtacgccgccagcgccgcgctcagctgcctcgtcctcttcgctggcctccgccacctcgaccccaaccgcgccgcttcccagaaggcgcagcaacagaagaaggagatcgccaagcgcctcggccggcccctcgtctccaccacgccctatgaggacgtgattgcgtgcgacgtcatcaaccccgacagcatcgacgtcgaattcgactccatcggcggcctggaccagatcaagcaggcgctctacgagctcgtcatcctgcccctgcgccgccccgagctcttcaccttcggcaagctcctcagcccccagaagggcgtcctcctctatggcccgcccggcacaggcaagaccatgctcgccaaggccatcgccagggagtccggcgccgtcttcatcaatgtcaggatctccaatctcatgagcaagtggttcggggacgcacagaagcttgtggctgctgtctttagtctcgctcacaagctccagcctgctattatcttcattgacgaggtcgacagtttcttggggcagcgacggacaactgaccatgaagccatgactaatatgaagacagagttcatgtccctctgggatggcttcaccaccgaccagaacgctcgtgtaatggtcctggctgctacaaacaggccttctgagctagatgaggccatccttaggcgctttactcagatatttgaaattggaattcctgttgagagtgaaaggagcaagatacttcaggttgtgttgaagggagaaaatgtggagcataatattgattacgatcgcattgcaagtttgtgcgagggctttactggatcagacatcctagaactgtgcaagcaggccgcattctatcctatcagggagctgttggacgatgagaaaaaagggaggaaattagataaacctaggcccttgagacaatcagacttggagagagccttgtcagtgtctagaaagggcaagaaggctgcaagttcagcactgcagtcacctttgtgggtacggccgacagattcagaagacgatcagatctcgtgaaaatctgcagcggagtaaatgcaggcattacgtcgataccgttaggtttccttatgcagtttgcagaggttaaacatatttatatatgtattaattcgttttgcgtttggaacctccaccggttttttttgaagcaaactgcagctggtgaagtggcaagcgtgccctcgtgtttaagttgatcatttcaaaatacgtgccccctgagggccgtaaaactgagaactctatagttgtctggtcaacagtcggtcttggttgcctctgtattttatcttcggtttgactactctagggtggcgaattacaacatacagtataatgcagaaaggttcccaaacgtgcttcggttttttttgttgtctggttattatttacatacatgcactgcatatccttttttatatattttatctccgttatgaaaatttctctcggagcacagcacactgtttgaacatatatttccggattagaattccatgagctgtatatgcatgtataatcgtatatgcatgcaccaccatcacgtgcacgagcagctgccgccgcttgctgttctcaaggcgctcgtctccatgatggatatctcatcagcaagcgacagcttggtgcccttgagagccaggacgtcggtggtgccgccggtttccgccgccgcatccagcgtcttcctggacacgatggcgtggatctcccggagcagcgtgaggaaggcacgctcgacgttgtcgccgctgagggcagacgcctccgagaagaagagcccctgctcctccgcgaaggcggcggcctcgtccgcgtccaccgcgcggcggccggcgtcgcgcgccaggtcggccttgttgccgacgagcatgacgacgatggacttgtcggcgtgggcgcgcagctcggcgacccagcgcgtggcgtggtcgaaggtgcggcggctggtgacgtcgtagacgagcatggcgccgagcgcgccgcggtagtaggcgctggtgaccgcgcggtagcgctcctggccggcggtgtcccagatctgggccttgacgcggtggcgcgcgatgtcgacggtgcgcgtctggaactcgatgccgatggtcgacttggagtccaggaagaactcgtcgcgggtgaagcgccccagcagctgcgtcttacccaccgccgagtcgccgaccaccacgatcttgaacacgtagtcctcctccatctccgttgcacgctactcctgactatcctgcttgcagctgcagcgaatggcttccttctccggccggccggccggccgtctctctcgcccctgttagctctcactctagtgtctagtcatacaaacgcaagcatatatctgacgagacgcagccaggcagcgacatgcagagatcatgtcttacgcaatccttaacctaatcatatatatacatcatggcattatcagcggttaggtttgcaagtgggccttaagaacaaatcgactttaatgcgcaatcctcaactgctactcgatttttcctgttgctatcctgtccaactaaattaataaaagattaaaatacacgaagcggtcctcaaacttgacacgct

SEQ ID NO: 49121 - DNA, 2743 bp, Zea Mays
gtcacggagaaaagaaaaagtaaccaacctccggtccaacccgatagcccaaaccccctgcgagcacaagcacaaagctaaagctgtgtaagcagcagaatccaatccaatccccagctcgcgccgccccctctaatccctcctccgcaaggcagacaggggccggcgttcactcgggcatccgcgggacggacggggagcaaagcctcagcggcgagtgcgggcgatgaggtcttcggaggcgtcgtcgcggctcgtgcaggagctcgtgctgtacgccgccagcgccgcgctcagctgcctcgtcctcttcgctggcctccgccacctcgaccccaaccgcgccgcttcccagaaggcgcagcaacagaagaaggagatcgccaagcgcctcggccggcccctcgtctccaccacgccctatgaggacgtgattgcgtgcgacgtcatcaaccccgacagcatcgacgtcgaattcgactccatcggcggcctggaccagatcaagcaggcgctctacgagctcgtcatcctgcccctgcgccgccccgagctcttcaccttcggcaagctcctcagcccccagaagggcgtcctcctctatggcccgcccggcacaggcaagaccatgctcgccaaggccatcgccagggagtccggcgccgtcttcatcaatgtcaggatctccaatctcatgagcaagtggttcggggacgcacagaagcttgtggctgctgtctttagtctcgctcacaagctccagcctgctattatcttcattgacgaggtcgacagtttcttggggcagcgacggacaactgaccatgaagccatgactaatatgaagacagagttcatgtccctctgggatggcttcaccaccgaccagaacgctcgtgtaatggtcctggctgctacaaacaggccttctgagctagatgaggccatccttaggcgctttactcagatatttgaaattggaattcctgttgagagtgaaaggagcaagatacttcaggttgtgttgaagggagaaaatgtggagcataatattgattacgatcgcattgcaagtttgtgcgagggctttactggatcagacatcctagaactgtgcaagcaggccgcattctatcctatcagggagctgttggacgatgagaaaaaagggaggaaattagataaacctaggcccttgagacaatcagacttggagagagccttgtcagtgtctagaaagggcaagaaggctgcaagttcagcactgcagtcacctttgtgggtacggccgacagattcagaagacgatcagctggtgaagtggcaagcgtgccctcgtgtttaagttgatcatttcaaaatacgtgccccctgagggccgtaaaactgagaactctatagttgtctggtcaacagtcggtcttggttgcctctgtattttatcttcggtttgactactctagggtggcgaattacaacatacagtataatgcagaaaggttcccaaacgtgcttcggttttttttgttgtctggttattatttacatacatgcactgcatatccttttttatatattttatctccgttatgaaaatttctctcggagcacagcacactgtttgaacatatatttccggattagaattccatgagctgtatatgcatgtataatcgtatatgcatgcaccaccatcacgtgcacgagcagctgccgccgcttgctgttctcaaggcgctcgtctccatgatggatatctcatcagcaagcgacagcttggtgcccttgagagccaggacgtcggtggtgccgccggtttccgccgccgcatccagcgtcttcctggacacgatggcgtggatctcccggagcagcgtgaggaaggcacgctcgacgttgtcgccgctgagggcagacgcctccgagaagaagagcccctgctcctccgcgaaggcggcggcctcgtccgcgtccaccgcgcggcggccggcgtcgcgcgccaggtcggccttgttgccgacgagcatgacgacgatggacttgtcggcgtgggcgcgcagctcggcgacccagcgcgtggcgtggtcgaaggtgcggcggctggtgacgtcgtagacgagcatggcgccgagcgcgccgcggtagtaggcgctggtgaccgcgcggtagcgctcctggccggcggtgtcccagatctgggccttgacgcggtggcgcgcgatgtcgacggtgcgcgtctggaactcgatgccgatggtcgacttggagtccaggaagaactcgtcgcgggtgaagcgccccagcagctgcgtcttacccaccgccgagtcgccgaccaccacgatcttgaacacgtagtcctcctccatctccgttgcacgctactcctgactatcctgcttgcagctgcagcgaatggcttccttctccggccggccggccggccgtctctctcgcccctgttagctctcactctagtgtctagtcatacaaacgcaagcatatatctgacgagacgcagccaggcagcgacatgcagagatcatgtcttacgcaatccttaacctaatcatatatatacatcatggcattatcagcggttaggtttgcaagtgggccttaagaacaaatcgactttaatgcgcaatcctcaactgctactcgatttttcctgttgctatcctgtccaactaaattaataaaagattaaaatacacgaagcggtcctcaaacttgacacgct

SEQ ID NO: 49122 - DNA, 1828 bp, Zea Mays
gtcacggagaaaagaaaaagtaaccaacctccggtccaacccgatagcccaaaccccctgcgagcacaagcacaaagctaaagctgtgtaagcagcagaatccaatccaatccccagctcgcgccgccccctctaatccctcctccgcaaggcagacaggggccggcgttcactcgggcatccgcgggacggacggggagcaaagcctcagcggcgagtgcgggcgatgaggtcttcggaggcgtcgtcgcggctcgtgcaggagctcgtgctgtacgccgccagcgccgcgctcagctgcctcgtcctcttcgctggcctccgccacctcgaccccaaccgcgccgcttcccagaaggcgcagcaacagaagaaggagatcgccaagcgcctcggccggcccctcgtctccaccacgccctatgaggacgtgattgcgtgcgacgtcatcaaccccgacagcatcgacgtcgaattcgactccatcggcggcctggaccagatcaagcaggcgctctacgagctcgtcatcctgcccctgcgccgccccgagctcttcaccttcggcaagctcctcagcccccagaagggcgtcctcctctatggcccgcccggcacaggcaagaccatgctcgccaaggccatcgccagggagtccggcgccgtcttcatcaatgtcaggatctccaatctcatgagcaagtggttcggggacgcacagaagcttgtggctgctgtctttagtctcgctcacaagctccagcctgctattatcttcattgacgaggtcgacagtttcttggggcagcgacggacaactgaccatgaagccatgactaatatgaagacagagttcatgtccctctgggatggcttcaccaccgaccagaacgctcgtgtaatggtcctggctgctacaaacaggccttctgagctagatgaggccatccttaggcgctttactcagatatttgaaattggaattcctgttgagagtgaaaggagcaagatacttcaggttgtgttgaagggagaaaatgtggagcataatattgattacgatcgcattgcaagtttgtgcgagggctttactggatcagacatcctagaactgtgcaagcaggccgcattctatcctatcagggagctgttggacgatgagaaaaaagggaggaaattagataaacctaggcccttgagacaatcagacttggagagagccttgtcagtgtctagaaagggcaagaaggctgcaagttcagcactgcagtcacctttgtgggtacggccgacagattcagaagacgatcaggtacagaacgccatctttgagatatctaagctgatgtctcgaatagttcagaacagtgagtcggaaccgcaagagccttcttcaccttaacctaatccttttgctagatctcgtgaaaatctgcagcggagtaaatgcaggcattacgtcgataccgttaggtttccttatgcagtttgcagaggttaaacatatttatatatgtattaattcgttttgcgtttggaacctccaccggttttttttgaagcaaactgcagctggtgaagtggcaagcgtgccctcgtgtttaagttgatcatttcaaaatacgtgccccctgagggccgtaaaactgagaactctatagttgtctggtcaacagtcggtcttggttgcctctgtattttatcttcggtttgactactctagggtggcgaattacaacatacagtataatgcagaaaggttcccaaacgtgcttcggttttttttgaggttttaacttgtttttcttccttgtcttttgtggcaggt

SEQ ID NO: 49123 - DNA, 1830 bp, Zea Mays
gtcacggagaaaagaaaaagtaaccaacctccggtccaacccgatagcccaaaccccctgcgagcacaagcacaaagctaaagctgtgtaagcagcagaatccaatccaatccccagctcgcgccgccccctctaatccctcctccgcaaggcagacaggggccggcgttcactcgggcatccgcgggacggacggggagcaaagcctcagcggcgagtgcgggcgatgaggtcttcggaggcgtcgtcgcggctcgtgcaggagctcgtgctgtacgccgccagcgccgcgctcagctgcctcgtcctcttcgctggcctccgccacctcgaccccaaccgcgccgcttcccagaaggcgcagcaacagaagaaggagatcgccaagcgcctcggccggcccctcgtctccaccacgccctatgaggacgtgattgcgtgcgacgtcatcaaccccgacagcatcgacgtcgaattcgactccatcggcggcctggaccagatcaagcaggcgctctacgagctcgtcatcctgcccctgcgccgccccgagctcttcaccttcggcaagctcctcagcccccagaagggcgtcctcctctatggcccgcccggcacaggcaagaccatgctcgccaaggccatcgccagggagtccggcgccgtcttcatcaatgtcaggatctccaatctcatgagcaagtggttcggggacgcacagaagcttgtggctgctgtctttagtctcgctcacaagctccagcctgctattatcttcattgacgaggtcgacagtttcttggggcagcgacggacaactgaccatgaagccatgactaatatgaagacagagttcatgtccctctgggatggcttcaccaccgaccagaacgctcgtgtaatggtcctggctgctacaaacaggccttctgagctagatgaggccatccttaggcgctttactcagatatttgaaattggaattcctgttgagagtgaaaggagcaagatacttcaggttgtgttgaagggagaaaatgtggagcataatattgattacgatcgcattgcaagtttgtgcgagggctttactggatcagacatcctagaactgtgcaagcaggccgcattctatcctatcagggagctgttggacgatgagaaaaaagggaggaaattagataaacctaggcccttgagacaatcagacttggagagagccttgtcagtgtctagaaagggcaagaaggctgcaagttcagcactgcagtcacctttgtgggtacggccgacagattcagaagacgatcaggtacagaacgccatctttgagatatctaagctgatgtctcgaatagttcagaacagtgagtcggaaccgcaagagccttcttcaccttaacctaatccttttgctagatctcgtgaaaatctgcagcggagtaaatgcaggcattacgtcgataccgttaggtttccttatgcagtttgcagaggttaaacatatttatatatgtattaattcgttttgcgtttggaacctccaccggttttttttgaagcaaactgcagctggtgaagtggcaagcgtgccctcgtgtttaagttgatcatttcaaaatacgtgccccctgagggccgtaaaactgagaactctatagttgtctggtcaacagtcggtcttggttgcctctgtattttatcttcggtttgactactctagggtggcgaattacaacatacagtataatgcagaaaggttcccaaacgtgcttcggttttttttttatgtgaatttttactgaatcttcatttgcgtgttcaaatcac

SEQ ID NO: 49124 - DNA, 1407 bp, Zea Mays
tgttccaagcagttccggacaaaaacgaggggaaggaaaacccaaagccagcagctgtctgcgtcgccgtcggcttcctatcctactgcgtgcgtggacctcgctgtgctcacgcggcgaccggtggctcctcctattgctacaactacttgtactcgcgcccgtcccttgcgcacgcaacgcaagcgcagacacgagcgatccgatccgatccggaactgtgccggccagccatggcgactagggttttgctcaccgccctcctcctcgccttcctcctcgtcgccacccctttcaccgcccgaggtttccagtgatggacctttaagccctgctcctggtgtagagacagtagttgtattccccaaaaatgctggcaaaattgtactagcaggtgaagaaactgaattactagttggtctgcaaaatgagggtgaatcgactttgaatgttgttgctgttcattcaactctccatcttccttttgaccataatatgtatggccagaaccttactgttcagaatttcttcaacgcatcagttcctgtttctgtgcaagcaaccttcccttataaattcgttgtgagcaagttcttgcagcctggagcttatgatctggttggttacatagtgtatgagatcgaccagcacccttaccagaatgtattctacaatggcactattgaggtcgttgaggctggaggcttactcagtgttgagtctgtgttcctcatcacccttggaaccgctcttcttggtctctttggattatgggcatatggccaggttcagcagctctcgaagaaaacgaagaaggcccccaaggtggagctcggaactggaacaactgatgccaacatcgatgagtggctggagggcacttcgtttgtgcagagaagcaaatccaagaaagcagacctgaagctagctctccagagtagttaatccttggaggatctagaatgaggcatttgagggtagcccttcacaagtgacttctgcagaaagatagatgcctaaggaggtgctgaaaaatgtagtttcgtggtcgaacatctttgttgacaccattttcgaccttgtgtacttcacatggaacttttcttcaaacaaagttttgttaaaaaaaggtatatgctgttgtctctgtgatttctgatcttttattcgctgtcatggccactccaggatttttctttgtgggttgtgtagcagaagtcggcaggcaagctgttgatttctgacttcgtttgtgcattatccttatgcttgttctccatcgcttggcattgtgcgtcacgcatgccagcaagtcgattatatatatctgaaacgttattgcaaagtcaacaaatgtagtgtaccaaacggtttttccttttcaggctcgagtgcttccttcactgc

SEQ ID NO: 49125 - DNA, 2075 bp, Zea Mays
ctaaagaccctttcacagtaagttattagttattatgctagctattacattttggcattagacaaaggaaatgaagcttgagaacgtgctcgtagcatggtgttatgccctccaggtgtgaggctgtcaaccagggcccaaaccctgagttctcatacggaaaaaagcccattactttccgttccccatggttgtgtcacagttgctaaagcgatagcctgcaggtagtagccagctttcaggatcttttcttgatgttatgtgcaacgtcatgagaacttctctcccctggggctgagtttcttcaatgaaatggaccttatgttggttgtagtgcaaactttttttccctggcctctgagattccatcaccatctttattccaaatgaaccaacttgtgatagccacttataaattgactgattaacaagcatgacaagatcgaaaggcagagctccactttgttaaaaaaaggcatgacaaacatggtaaccaaggaatccacagtttttttacaaaatgaactacatgaatgtatgtgactcctaaccatgttcttttggagagattcttaaaatgtgtacatagacacgagctgttatttcttagacctttttttgttgctagagcattttacacatgcatgtaggcatgtacagataaaacttgggggatgtaactacattttattttttgttgcagagagtataatgatattacatagtgaattaaagcgccagaggaagctcgtgaaaaatctgaagaagaaatccttgtggtctaggaccttggaagagattgtggagaaacttgtggacatcgtaatatttttgcacaaacaaatccgagattcatttaacgaaactggaactgacttctgcgcttccgagcaaactcagaacaaaaggctaggttcctgtggtctggcgctacattacgctaacattatcaaccaaattgaaaatatagtttcccggcccctctctcttcctcctagtgcaagggacaatctgtaccatggtctcccaataacagtgaagtcagctctgcgatcacgattgcaaacatataaccccgaagaagagcgcacggtagctcaaataaaagccgaaatgcagaaaactcttcgctggcttctgccgatagcagagaatacaataagggcacaccaaggttttggatgggtcggcgagtgggcaaatcttgggagcgacatgagcaagaaatcaggctcccagcacagcgtcacccgcatccagacgctccatcacgccgacaaggcgaaaaccgagcactacatgctggagctggtggcgctcctccaccacctggtgatccaggtgaagaacagaggctacgggaccagcaaatcgtcgaggcacgacgcgtcgtcccggtcccgcaaggcggcggcaacggacctccgaccggagacggagactcggcacaacacgtcgccggtgaacagccgcacggcctcgagcccgctgtcggactgcgagcgcgcggcgctggaccacctgagcttcaggaggacggcctacggcaggagccagagctgcgagcctccgcctggccaccgacggagcaaggcccacaggagctgggacccgtgccggagccacggcagctccccggcgacggagttcggcaggacccccgccgtgcagcagcgcggccggggcagggatcttgacgtaattgatggcctagatagactgccttcctactcgcacccgccctcccctacgttttgctagatgttaatggttaggtattcttttgctgtaactgtaacacgcgtgatatgtccatatgtacatataccatagtcttgttatagcgtgtggtgattgaatcaaagtatatagagcgagatcacaagtggtgttccgatcatctggcctttggagagaaaaaaaatatcgatttgtctgaattctttttttcttcttctgaatttaacgaccaaatgatttgaacattgtaagttttcttcttcttctttctgttcagctttgttaggaagatacttggattgtcgaagcttagtttggaaggtactagtactgct

SEQ ID NO: 49126 - DNA, 1233 bp, Zea Mays
ccgagattcatttaacgaaactgcaggaactgacttctgcgcttccgagcaaactcagaacaaaaggctaggttcctgtggtctggcgctacattacgctaacattatcaaccaaattgaaaatatagtttcccggcccctctctcttcctcctagtgcaagggacaatctgtaccatggtctcccaataacagtgaagtcagctctgcgatcacgattgcaaacatataaccccgaagaagagcgcacggtagctcaaataaaagccgaaatgcagaaaactcttcgctggcttctgccgatagcagagaatacaataagggcacaccaaggttttggatgggtcggcgagtgggcaaatcttgggagcgacatgagcaagaaatcaggctcccagcacagcgtcacccgcatccagacgctccatcacgccgacaaggcgaaaaccgagcactacatgctggagctggtggcgctcctccaccacctggtgatccaggtgaagaacagaggctacgggaccagcaaatcgtcgaggcacgacgcgtcgtcccggtcccgcaaggcggcggcaacggacctccgaccggagacggagactcggcacaacacgtcgccggtgaacagccgcacggcctcgagcccgctgtcggactgcgagcgcgcggcgctggaccacctgagcttcaggaggacggcctacggcaggagccagagctgcgagcctccgcctggccaccgacggagcaaggcccacaggagctgggacccgtgccggagccacggcagctccccggcgacggagttcggcaggacccccgccgtgcagcagcgcggccggggcagggatcttgacgtaattgatggcctagatagactgccttcctactcgcacccgccctcccctacgttttgctagatgttaatggttaggtattcttttgctgtaactgtaacacgcgtgatatgtccatatgtacatataccatagtcttgttatagcgtgtggtgattgaatcaaagtatatagagcgagatcacaagtggtgttccgatcatctggcctttggagagaaaaaaaatatcgatttgtctgaattctttttttcttcttctgaatttaacgaccaaatgatttgaacattgtaagttttcttcttcttctttctgttcagctttgttaggaagatacttggattgtcgaagcttagtttggaaggtactagtactgct

SEQ ID NO: 49127 - DNA, 1702 bp, Zea Mays
caacaacagcacagaaaaccccacaggtcatagacagcggagctccctccagtctccatccaataacacgagctaaccaccgcccaaccgaaaccgggccccaccggtctccccgtcgccacgtacgcggccggagcgccctatacaagcgccacgtcgatcgccgactcgccgtcgccgcgtcccccacggctcttccttcatcctccggcgagctataaatccctcccgccgacgccacccccatggcatcccgcggttccccttcctcctactcctccccgaggaccccgacgtcgtcgaaggctaacccttggcccgcgccctccgccccgccgctgtacccgacgctctccatggccgacctcgcgcccgtcgagatagggcccgcctcgtcgccgacggcctcggatgactacaacgcgcctccgccgtctgaggacgtcctcctccgggtccccggcgcgcggctccacctcgtcgaccgcagccgcagccacccgctggccgccggcgacctctccctcctccgcatccgctccggcgacacctccctggccgccatcgcgctgctgggcccggtccagtggccgctcgcgcgcgacgtggccgccgtcaagctggatccctgccactacgccttctccctcaccgtgccggcctccgccgacgaccccagccccgacccgctccactacggcctcacgctctcccgccccgatgtgcgcctcgacggcgtcctcgctgcctacaccagcttctccgtgcacgccgtggtcggcgcggtggccaggaccatcgccacgggcgccgagcacctcgccaaggggatactgtggtgcggggaggtcacggtggagaggctccgttggggcaatgaggtcctcaagaggaggatgcagcctggcgacgccaacgccgaggtcagccccgagatgctcaggcgaatcaaaagggctaagagggtgagccaaatatctgagaaagtggcgactgggattttgtccggagtggtgaaggtcactggttacttcacaagctctctggccaactcgaaagctggcaagaagttcttcaacatgttgcctggagagatcgttcttgcttcgcttgacggatttgggaagatctgcgacgccgtggaggtggccggaaagaacgttttgtccacgtcgtcaactgtgacgaccgggctagtatctcacaggtacggagacaaagccgccgccgcaacgaacgaagggctggacgccgccgggcacgccatcgggacggcatgggccgtgttcaagatccggcaggccttgaaccccaagagcgtcctcaaacccacggcgctggccacgtccaccatcagggccaacgttgccgagcttcgcgcgatgcacggcagcagcaagtagctcgcgcctgccgtccctgtttcgtaaaaactctattatctcgctctgtcacgaccaacgatgcactcgctgcttccagcagcagcgttggctgttgcctgttggcctgtaaattcgtgtggctgaaactgggaaagccgggaactgaaaggcttaccgcttccgctttgttagtgatgctggtgatgttctaagagcttttaccactgctgtgctgctgcgttggcttgaactgtcacgagttgttcggttttggcctctgaagtctgaaccaagtaaaaaaaaaaactaactaataa

SEQ ID NO: 49128 - DNA, 2466 bp, Zea Mays
caacaacagcacagaaaaccccacaggtcatagacagcggagctccctccagtctccatccaataacacgagctaaccaccgcccaaccgaaaccgggccccaccggtctccccgtcgccacgtacgcggccggagcgccctatacaagcgccacgtcgatcgccgactcgccgtcgccgcgtcccccacggctcttccttcatcctccggcgagctataaatccctcccgccgacgccacccccatggcatcccgcggttccccttcctcctactcctccccgaggaccccgacgtcgtcgaaggctaacccttggcccgcgccctccgccccgccgctgtacccgacgctctccatggccgacctcgcgcccgtcgagatagggcccgcctcgtcgccgacggcctcggatgactacaacgcgcctccgccgtctgaggacgtcctcctccgggtccccggcgcgcggctccacctcgtcgaccgcagccgcagccacccgctggccgccggcgacctctccctcctccgcatccgctccggcgacacctccctggccgccatcgcgctgctgggcccggtccagtggccgctcgcgcgcgacgtggccgccgtcaagctggatccctgccactacgccttctccctcaccgtgccggcctccgccgacgaccccagccccgacccgctccactacggcctcacgctctcccgccccgatgtgcgcctcgacggcgtcctcgctgcctacaccagcttctccgtgcacgccgtggtcggcgccgggcagctggaggccagggtgcgcgacgaggccgaggccgccgcgtactggacggccgtcgcgcccaacgtggaggcgtacggaggcgcggtggccaggaccatcgccacgggcgccgagcacctcgccaaggggatactgtggtgcggggaggtcacggtggagaggctccgttggggcaatgaggtcctcaagaggaggatgcagcctggcgacgccaacgccgaggtcagccccgagatgctcaggcgaatcaaaagggctaagagggtgagccaaatatctgagaaagtggcgactgggattttgtccggagtggtgaaggtcactggttacttcacaagctctctggccaactcgaaagctggcaagaagttcttcaacatgttgcctggagagatcgttcttgcttcgcttgacggatttggtacgttgctgttactaacacttgtatcgtataaggccaagtgcccgtgtggcattactcgtctgtcatttcactctagcggcattgttagatataatattaattgagatgtgcccctctgccagccttgcataagtcaacagacaactgtctgtctgtgtatgttgtagtagtttctgtgttaatagagatgccttggatgccctttatagagtctcgtattgttttttgttttattgagatgataacttctgtagttgtggctttacgaggaaatttagatagtgtttggttccggagccactcgaggtagaatggttccgtcccgagagcggctccgtcctggagattttgaggagtcagatgatttaacaattgagcatgactttccatttttagaatcactccattctatatatgaaatcaatccaaacaacagtaaattaagagcggagcgacctgttggtttcagtacagccacaacaaaagtgctgatgatctatataagtcaagtcaagtcgtcaaagatttctgaacatttgcgacttccattccaccccatgctctgtgaataggtggctgaatgctttgcactctgcttgccaccgtggtttatgcacccaacttacgctgacatgtatgtcttccttcgttgtcgccgacgccataaacagggaagatctgcgacgccgtggaggtggccggaaagaacgttttgtccacgtcgtcaactgtgacgaccgggctagtatctcacaggtacggagacaaagccgccgccgcaacgaacgaagggctggacgccgccgggcacgccatcgggacggcatgggccgtgttcaagatccggcaggccttgaaccccaagagcgtcctcaaacccacggcgctggccacgtccaccatcagggccaacgttgccgagcttcgcgcgatgcacggcagcagcaagtagctcgcgcctgccgtccctgtttcgtaaaaactctattatctcgctctgtcacgaccaacgatgcactcgctgcttccagcagcagcgttggctgttgcctgttggcctgtaaattcgtgtggctgaaactgggaaagccgggaactgaaaggcttaccgcttccgctttgttagtgatgctggtgatgttctaagagcttttaccactgctgtgctgctgcgttggcttgaactgtcacgagttgttcggttttggcctctgaagtctgaaccaagtaaaaaaaaaaactaactaataa

SEQ ID NO: 49129 - DNA, 1507 bp, Zea Mays
cacgtccccgtccagattcatccaccctccccctttcccttcgtctccgtccgctcccggcatcgtcccctcttccccgtctcgcgttcgtcgcccacgggcttcgattgatcttcttccggtgctggtggcaggtggacggatcgtgtccttgcttggccgcccacagcagcaatggacgacggggacctggacttctccaacccggacacgtacctgtgcccggcgctcggcactgacccgcccagcagctgctccatggacagctacttcgacgagatcctcaaggacacggagcaccacgcctgcacgcacacccacacctgcaacccgccggtgcacgacctatcgcacacccacacctgcgtccacgtccacaccaagatcgtcgcggcctcgcccggcgacgacactgccgactcgccgtccgagaacaacaccaacggcagcggcggcaacggcagcaacgccgcctccaagaagcgcccctcggggaaccgcgccgccgtcaggaagtaccgggagaagaagaaggcccacaccgcgtcgctggaggaggaggtggtccatctcagggcgctcaaccagcagctcgtgaagaagctccagagccacgccgcgctcgaggcggaggtggccaggctccgatgcctgctcgtcgacatcaggggcaggatcgagggggagattggcgcgtttccgtaccagaggccgccgccagcggccaagaacgtcgacctcgtgtccggtgttgaccagggagggttccttgccggggctgctgcccaggttaccagttcctgtgatttcagatgcaacgatcagatgtactgcagccctggaatgcagggcgctgttagcggccaggtgttgggacaaggtgcctgcgatgtctcgagtatccaatgcgttggaagcaccaggtctgcgtccactaagctacctgtctgcggggggatggatgcagtacctgctgcctgcttgccaaatgttcaaaacaagtgacggactcccggcagtgtttatggtcccttccttttcagagactgctgggacttcccgttctgcctcgaaggaacgctgtataaaccgctagcttttctatgtagggccgaatctggttcaaactgctacgtgtttctcagatgctctccgtctccgatgaagtgcagcaactgaaccggatccgaaggagttggacatgaacaggttaaaatttggcatatgtggtctaagaagacgctgagatgtttgtagcgaatctcaagttcaatgcgaaccctgttgcctatgtatattcacatcctttgtgtaggtgtcatgtctctcttctgttacgtgcgtggatctgagggaacccccaaaagtttaattgccggctggttcaattgtgtctgtctagacccaattgtggatctgatgaacagaatatgtgccggatagcgctagaaacacatcagcctgacgctggagttcactagcataccagatgggttcagaacttcag

SEQ ID NO: 49130 - DNA, 1727 bp, Zea Mays
ccccgtccagattcatccaccctccccctttcccttcgtctccgtccgctcccggcatcgtcccctcttccccgtctcgcgttcgtcgcccacgggcttcgattgatcttcttccggtgctggtggcaggtggacggatcgtgtccttgcttggccgcccacagcagcaatggacgacggggacctggacttctccaacccggacacgtacctgtgcccggcgctcggcactgacccgcccagcagctgctccatggacagctacttcgacgagatcctcaaggacacggagcaccacgcctgcacgcacacccacacctgcaacccgccggtgcacgacctatcgcacacccacacctgcgtccacgtccacaccaagatcgtcgcggcctcgcccggcgacgacactgccgactcgccgtccgagaacaacaccaacggcagcggcggcaacggcagcaacgccgcctccaagaagcgcccctcggggaaccgcgccgccgtcaggaagtaccgggagaagaagaaggcccacaccgcgtcgctggaggaggaggtggtccatctcagggcgctcaaccagcagctcgtgaagaagctccagagccacgccgcgctcgaggcggaggtggccaggctccgatgcctgctcgtcgacatcaggggcaggatcgagggggagattggcgcgtttccgtaccagaggccgccgccagcggccaagaacgtcgacctcgtgtccggtgttgaccagggagggttccttgccggggctgctgcccaggttaccagttcctgtgatttcagatgcaacgatcagatgtactgcagccctggaatgcagggcgctgttagcggccaggtgttgggacaaggtgcctgcgatgtctcgagtatccaatgcgttggaagcaccaggtctgcgtccactaagctacctgtctgcggggggatggatgcagtacctgctgcctgcttgccaaatgttcaaaacaagtgacgttactggactgctgtgagtcgttggtagaatttgttaatgaatgttcgtactgctcagatcttgcaatggaacttattcaagaaaaaaaaacaggatatgatgtcttattcttcaaatagtcctaaggactcccggcagtgtttatggtcccttccttttcagagactgctgggacttcccgttctgcctcgaaggaacgctgtataaaccgctagcttttctatgtagggccgaatctggttcaaactgctacgtgtgtgagttcgtcgtcgccgatgatgcttctatagtgcctgaggcgattcaagtttgttagctctagagctgataggatatcctcgtttactttgcttagttctcagatgctctccgtctccgatgaagtgcagcaactgaaccggatccgaaggagttggacatgaacaggttaaaatttggcatatgtggtctaagaagacgctgagatgtttgtagcgaatctcaagttcaatgcgaaccctgttgcctatgtatattcacatcctttgtgtaggtgtcatgtctctcttctgttacgtgcgtggatctgagggaacccccaaaagtttaattgccggctggttcaattgtgtctgtctagacccaattgtggatctgatgaacagaatatgtgccggatagcgctagaaacacatcagcctgacgctggagttcactagcataccagatgggttcagaacttcag

SEQ ID NO: 49131 - DNA, 3679 bp, Zea Mays
ccccgtccagattcatccaccctccccctttcccttcgtctccgtccgctcccggcatcgtcccctcttccccgtctcgcgttcgtcgcccacgggcttcgattgatcttcttccggtgctggtggcaggtggacggatcgtgtccttgcttggccgcccacagcagcaatggacgacggggacctggacttctccaacccggacacgtacctgtgcccggcgctcggcactgacccgcccagcagctgctccatggacagctacttcgacgagatcctcaaggacacggagcaccacgcctgcacgcacacccacacctgcaacccgccggtgcacgacctatcgcacacccacacctgcgtccacgtccacaccaagatcgtcgcggcctcgcccggcgacgacactgccgactcgccgtccgagaacaacaccaacggcagcggcggcaacggcagcaacgccgcctccaagaagcgcccctcggggaaccgcgccgccgtcaggaagtaccgggagaagaagaaggcccacaccgcgtcgctggaggaggaggtggtccatctcagggcgctcaaccagcagctcgtgaagaagctccagagccacgccgcgctcgaggcggaggtggccaggctccgatgcctgctcgtcgacatcaggggcaggatcgagggggagattggcgcgtttccgtaccagaggccgccgccagcggccaagaacgtcgacctcgtgtccggtgttgaccagggagggttccttgccggggctgctgcccaggttaccagttcctgtgatttcagatgcaacgatcagatgtactgcagccctggaatgcagggcgctgttagcggccaggtgttgggacaaggtgcctgcgatgtctcgagtatccaatgcgttggaagcaccaggtctgcgtccactaagctacctgtctgcggggggatggatgcagtacctgctgcctgcttgccaaatgttcaaaacaagtgacggattatataactgaagaagaatataactcggctctcttgtcgccgagccattgttttgtggttccattggtttccttctgtctggctgaatgcaattttgagtgaattgccatctaattgtcaacgatgaagatcagatttgcttctgtcccatcctgtcaatccagagctagacttgctcttgtctattttcagccggatgtcttgtgccccttttaaaggcattgctagtcttgttgacacaccagaaactaagatgctctgtatgaatcaactggctgtttattctctgagatttgagaaaaattcttattagccttcttaagtctatttatcatgattattgtgtaatcatggtgtatgttgttgtttattcattttgctgtggcctattcaatttgttgtggcctgattgaatgtatttttagtgaatcggcatcttatcatggaagggcaggcctgatgcacgggatttgtcttactgagtcaccaggtcgcgggttctaagcagggaggcttgcctcggtttatcccttccctagacctcactcatgtgggagcctccgacactgggtttgtcccctttagcaccttatcattactgaagatgagattcctggcgattctgattttttcaaatccatagctagagttttattttcaattggatgatttctaccttttcagacctcctaggtcatctatgtctgcttgaaaaaaacagcattattcattttatcgtgcttttgtatacatttattagtttcaagcaccaaaactattttaaacatggaaataacttagcctgggtttcagctgttagtattcaaggctcaagccatggtactgttttgacctaatagagtagcacttgttttcgacatagtcctatactcccatatgtagctgctgccggtagttgagcaaaagcaggaagtaaaaaaaaattcctacatgctaccaacgcctgcagtgcacctcgcctgcagttccatgctttgaaagaggtcaatgcattcagtttatgggttagttagatttatagtcagggagagccacatttagttgtttcatgtttggtcaattgagcaattctgaagtacattggatttttccccttgacaatccagatgtgagctgtgacggagccattttttggtgaattatgataccagaaattagtaaattaggacactacattgtgcttgtttcacgaaaaaaaaagaaaacatatttcataaaataataattaggacattgtaccatgctaccatatagcagtattatagacatcaataacctccaaattttgctacttctgaagagtattttgttttacagtgattttgtattagctattggagactgtaatacttgggttggtgtctaatctttttttgtgtggaaatatatattttttgaaagtgttaagaacagtacatcaagaagatacaaaggtttagctcagaaaacttctggcctctactaacacgcacacagccaaaaaggcgaaaaaggggagcaaataccaagcacatctctaatgaccttcaatctgtagattagatcgccacctatgtgccagggagaagaaaaccttggccgtttgcaccaaaagttgtgatcctgccacaacccgctcctacaaatccgactgtcccagtatagtgtgtgttcccagttttaaaggcagttctttaggtcgtgccatttgtttatcatgcagagcatctgtttttgttacgaaacttaatacaattatttttggtatgtccatttgtttttcagttactggactgctgtgagtcgttggtagaatttgttaatgaatgttcgtactgctcagatcttgcaatggaacttattcaagaaaaaaaaacaggatatgatgtcttattcttcaaatagtcctaaggtgtagccatctggataagttcatatatgtacctaaacactcgatacccccctgtctgcataatttacagcaaataaacctgatacatgttcccgctgctaggaactttccaagttctaaacgcacaagtaacactaacacatgttctattgctcttttttcaggactcccggcagtgtttatggtcccttccttttcagagactgctgggacttcccgttctgcctcgaaggaacgctgtataaaccgctagcttttctatgtagggccgaatctggttcaaactgctacgtgtgtgagttcgtcgtcgccgatgatgcttctatagtgcctgaggcgattcaagtttgttagctctagagctgataggatatcctcgtttactttgcttagttctcagatgctctccgtctccgatgaagtgcagcaactgaaccggatccgaaggagttggacatgaacaggttaaaatttggcatatgtggtctaagaagacgctgagatgtttgtagcgaatctcaagttcaatgcgaaccctgttgcctatgtatattcacatcctttgtgtaggtgtcatgtctctcttctgttacgtgcgtggatctgagggaacccccaaaagtttaattgccggctggttcaattgtgtctgtctagacccaattgtggatctgatgaacagaatatgtgccggatagcgctagaaacacatcagcctgacgctggagttcactagcataccagatgggttcagaacttcag

SEQ ID NO: 49132 - DNA, 214 bp, Zea Mays
ctaaaataaaccagcacaaacaaaaggaaaaacatatctcaagtaaacaagttcaaatgagtatttgtacctcggtcgtacacacacccttcctataaaaattttcgtatactactactgtacatgtaaaagaattattcgtctagtttcaactatagaatcgatcatatgaacaatgatgagaaaccaaatcgtttcctcgtctttctcactc

SEQ ID NO: 49133 - DNA, 1260 bp, Zea Mays
agtcgtcctgctggaagaagaggtggagctgctcctctccatggtggtgtcatcggctgcaacgatgagtcggactagttggagagatgatgatgatgatgatgagacgacgtcgcatactcgcatgagagagactatgagagctagctagaagcaaacaaggcaaaataagcaaggcaaacgtacgtgcgtggttcatacatgtagtatatgtgggacgacgacacggcatgcgggagaaagcgtcaaggaatggggtttccgatcgagtagagatattagcgttgctttactttacatgcaagtatgtactccaggagagtaacgagcttagcttagctagtctatagaaataaataagtacaggtgtatgtatatatgtagtatgtgcatcatcatatcgccagcaaaagcaactccaattcgcagacactgcgatcaaggagataaacatgcatgcatgcttcttcacgtttcaaacaacacaagaaaaaggaaaaaaaaaacatgcttcaagaaaaaggaaaaacatgcatgaaaaatgctgcctctatatagcttgcttgaccaatgaccatgtgtggagtgtacatgcacgcatgcatgtaccaaattctcacacactactcaacaagctagtagagaaacacggctactactatcgtgactcagttggatctatctatctatctatctagcttgcggttgtgttgtgtgtgtgcgatgggaacattgctatcgtccattcaaagcacaaaggcaaaactgtacttggatccatgtttgctaagatatataggacggacaatcgaagaagaaccaaagtagcaaaaccataatatagtaagatgaatgcatgatcaaaggcgggcgtgcatggccgtacgctttggtaggaattaattggcttacgagttccaatcccgaaaatggaggtcgacgacgacgatggcaatgacgatgacagagaagaagaagaaggaggcagcgatgacggtctcattttggcggtgctggttcggagaacaaataaaacaaaatcgtgctaccactggatttgtctgatcgatcagtcaacaacctaacataactgtatgtgtgtgtttttgtttttgcacatggaacttgaattatatatagggcactgggatatccgggaatgtgggggcagagaaaatgatgatccaagagaaagctagctcttgcaaggcaagaaagagagcccacaagccacccccacccacgcgccaacagagagag

SEQ ID NO: 49134 - DNA, 1821 bp, Zea Mays
ggctccttagtttgatgaaggagaagacatgagggtggatattgtgagacccgctgctactaggtttcacattgacaagtttgaacaaacatagagctgcattgagaggtctatttatatgtgtggattgtactataaacaagctagcaagtacggaggcagggagaaaggcaactgaaattgttctttccatggcatattcaaccaagtggaggattgcattagagcttcactagcatcttaaaccatgaagatggtgattactcaaggtgctgcgagtggttgatggtgatgagatgcttgctatgctagaggttcaagcattaatgtctcttgcaagacagaaggtgatggaatctttctccactgaaaacaaggctttgatcactcgcatcttaaacatcaaggatgggaattggaataatcaaatgtcaagccctttgtatggtgcagctcacttcttgaaccctggaaagttctatgccctcctcaacaagactgatgaagttgaaaatgaagacatttgcacaaatgagatactgaaggattacattgatggtaaaatcccacactttgagctccctcctggcgtgacaggccctgaggtggactttgaacaaatcgctggatcagaaagtccaactacttcagcagctaatgaatcagttattgatgatctcgatgaagaggatgatgatgcagttgatcctgctgaatcagacatgagagatgtcctagatgaccttgaatcttttgacttgggtaatggagggaagatggtcgctagatttcaaaagaggcatgaggaggggatcaaaggttatgatccattagtgttggatgagtttgattggaataatgaatgggttaatgcatcatccaaacaaaccaatgaaattgcaggccatgatggccttacttgggatcatgttgacgatgttattggtgcatcaagccatcttcaagattgtagcctccccaggagagctcatggtcaaaccattgtactacacaagaagggtgcggcaagtggaggatgaaatttgatgtagaaagaggagatgatcccagtatgggagaaagggatgcgaacaagatagtgaatgatgttgaagatgtttgatagtcaagataaagatcacatcaaccatgaagatggtggtgaatatttccctaccaatacaaacaatgacttgatggatgaatatgcctagaaggagagcacttgagagctgagaatttgaatttaatgttgtcatgtgttcatttgtggacttgttagtttgtgaactatgtattagggtgcaccggtcaaaactatgttattttgtgaattatgctatgcattaggacttgatgtcctatatcatctatgatccatctataattctatctataatctacctattatgacctatatcatttatctattatattccattttttatgcttttatccgccttacttatatgtctatgaagtcgtctcgcctcgtgccttagagggttaaaagggggaaaaggctctagacctccgtaggtacatttactggtcacggtgacctcctatgctgtaaaacttccaagtaaattgaagccaggtctgaatgacgatgctaagccagtaagcaacgcactactatgaaatgcaatctgttcgcacactgatgaatgggtcaattgtatagttagcacactgaatgctaagccaccagaaatggactacagagctcatccataagaacatgacaaggttcacgaaattcatcttgttccacagcctcaaaacaagcaaagtacctgacagagcacatccatgggg

SEQ ID NO: 49135 - DNA, 2074 bp, Zea Mays
cttagtttgatgaaggagaagacatgagggtggatattgtgagacccgctgctactaggtttcacattgacaagtttgaacaaacatagagctgcattgagaggtctatttatatgtgtggattgtactataaacaagctagcaagtacggaggcagggagaaaggcaactgaaattgttctttccatggcatattcaaccaagtggaggattgcattagagcttcactagcatcttaaaccatgaagatggtgattactcaaggtgctgcgagtggttgatggtgatgagatgcttgctatgctagaggttcaagcattaatgtctcttgcaagacagaaggtgatggaatctttctccactgaaaacaaggctttgatcactcgcatcttaaacatcaaggatgggaattggaataatcaaatgtcaagccctttgtatggtgcagctcacttcttgaaccctggaaagttctatgccctcctcaacaagactgatgaagttgaaaatgaagacatttgcacaaatgaggtttgtgctacgtattgtttggttagccttatggtccctttcaatgctatgtagatgccatggttattaaaacggtaaaacgttaaaacgttatgaaccaacttttcaacgtttaaacgtttaaacgaacgttgaaacgtcttttcagacttgacataaaatttcaaatatagaataagttcatacataagttgagttcacaaaccaaatagcatccacgccttgatcatcaccatcgtttccactactgctcgacagatactgaaggattacattgatggtaaaatcccacactttgagctccctcctggcgtgacaggccctgaggtggactttgaacaaatcgctggatcagaaagtccaactacttcagcagctaatgaatcagttattgatgatctcgatgaagaggatgatgatgcagttgatcctgctgaatcagacatgagagatgtcctagatgaccttgaatcttttgacttgggtaatggagggaagatggtcgctagatttcaaaagaggcatgaggaggggatcaaaggttatgatccattagtgttggatgagtttgattggaataatgaatgggttaatgcatcatccaaacaaaccaatgaaattgcaggccatgatggccttacttgggatcatgttgacgatgttattggtgcatcaagccatcttcaagattgtagcctccccaggagagctcatggtcaaaccattgtactacacaagaagggtgcggcaagtggaggatgaaatttgatgtagaaagaggagatgatcccagtatgggagaaagggatgcgaacaagatagtgaatgatgttgaagatgtttgatagtcaagataaagatcacatcaaccatgaagatggtggtgaatatttccctaccaatacaaacaatgacttgatggatgaatatgcctagaaggagagcacttgagagctgagaatttgaatttaatgttgtcatgtgttcatttgtggacttgttagtttgtgaactatgtattagggtgcaccggtcaaaactatgttattttgtgaattatgctatgcattaggacttgatgtcctatatcatctatgatccatctataattctatctataatctacctattatgacctatatcatttatctattatattccattttttatgcttttatccgccttacttatatgtctatgaagtcgtctcgcctcgtgccttagagggttaaaagggggaaaaggctctagacctccgtaggtacatttactggtcacggtgacctcctatgctgtaaaacttccaagtaaattgaagccaggtctgaatgacgatgctaagccagtaagcaacgcactactatgaaatgcaatctgttcgcacactgatgaatgggtcaattgtatagttagcacactgaatgctaagccaccagaaatggactacagagctcatccataagaacatgacaaggttcacgaaattcatcttgttccacagcctcaaaacaagcaaagtacctgacagagcacatccatgggg

SEQ ID NO: 49136 - DNA, 1778 bp, Zea Mays
aaagcgttgaccttgaagcccactcgctgttgcggtctctgaaattctgcccacaaatatacaacccggaacaatttgttgcggagagcccagtgctgtgctgtgcacgccaaccacaactgaaagggagagccgaagagggaagggggagaagcgaccgcgccgccaaaccctagccccgcgcaagcgaccgtgggggagctccactccgccgcgccgccccccgtccccgtttcgcgacatggtactcaaggtccccttcatacagcagggggcacccaaaagggaggtcaagatcacaatctccagctcggtctcagtctaggtcacctgtccctgatcctagatctcaggcgaggtcaagatctagaagccaagagagggaggaggatgctgttaaccgtgggaatactctgtatgtgactgggctctcttcgagggttactgaaagggatgttaaggattatttttctaagcatggaagggtggttggttgccatgttgttcttgaaccccatacacgtgtttcccgtggatttgcctttgtcagcatggacactgttgaagaagcggagcgttgcataaagtatcttaatggttctgtaatggaaggtcgaaacatcacagttgaaaagaagatattgtgcaagctatgtccagcagtcaagatgctgagttcaccaattccagctttagctcatacggctcgatcagtggacagcccaaagggttaccatgcaccacaagattcacaacaacttaacatagcaaattttcaactaaacctgagcattcaccttcaacttccacatcaactaatcaacgagcattgccgacttgttagtcaagcatgtgtggtgccatgtgcggtagcaactttggatgcctgctagttgaagtttgggctcttcgttacttatttccttcattggtgtccgttattgcagggcgtgtattcattgatttcacgccgtggtcgcccaaggacaccaactcctggaagctatcttggccatcggtacgagcgtagggagcgtgggaggttccatagaggctatggtggtgggcgtgatgagtattacggcaatggcggcggcgggtatggctaccgcaggtctccgcctcccatgtactcttcctacagggagagtcgggattattatccctcctacaaggacagccgggactaccctccctacagggacggcagggactactctcctccccacagggaccctcgggactactacgaaagcaggggtggccggggctactcgccgcctccttatggtggtggtaggtcaaggagggaccgatcggtttcaccgtatcggatgccagaaaggggctacggtggaggccgccgggtgggtggcggcggatatgacaggtaatgtagaggttttctctccgccggtggctgctgctgcgatggctgcgtatggctctcgcagctctggtgatatggttagactgctgcctgtagctgtgtacttggtgtactgtcttcccgcgtatgtggatttggtgaaaacttctgtatgagcaccttttatttgtagcctgcaatgattccttcttaagacagactggggactttggctccattgtgtgggatcatcatggccgtacagtgtctacgctgctatcatttgaggctgccataattcgaatccttgaaaggcgagaaggcccggcccgggaatattcacaacaatgaattcaccttgacaggttggtagcaagtactactcctatataaaaaggaaaaaagaaaa

SEQ ID NO: 49137 - DNA, 1375 bp, Zea Mays
aacaatttgttgcggagagcccagtgctgtgctgtgcacgccaaccacaactgaaagggagagccgaagagggaagggggagaagcgaccgcgccgccaaaccctagccccgcgcaagcgaccgtgggggagctccactccgccgcgccgccccccgtccccgtttcgcgacatggccgattccccgcgcaggaggtactcaaggtccccttcatacagcagggggcacccaaaagggaggtcaagatcacaatctccagctcggtctcagtctaggtcacctgtccctgatcctagatctcaggcgagggaggaggatgctgttaaccgtgggaatactctgtatgtgactgggctctcttcgagggttactgaaagggatgttaaggattatttttctaagcatggaagggtggttggttgccatgttgttcttgaaccccatacacgtgtttcccgtggatttgcctttgtcagcatggacactgttgaagaagcggagcgttgcataaagtatcttaatggttctgtaatggaaggtcgaaacatcacagttgaaaagtcacgccgtggtcgcccaaggacaccaactcctggaagctatcttggccatcggtacgagcgtagggagcgtgggaggttccatagaggctatggtggtgggcgtgatgagtattacggcaatggcggcggcgggtatggctaccgcaggtctccgcctcccatgtactcttcctacagggagagtcgggattattatccctcctacaaggacagccgggactaccctccctacagggacggcagggactactctcctccccacagggaccctcgggactactacgaaagcaggggtggccggggctactcgccgcctccttatggtggtggtaggtcaaggagggaccgatcggtttcaccgtatcggatgccagaaaggggctacggtggaggccgccgggtgggtggcggcggatatgacaggtaatgtagaggttttctctccgccggtggctgctgctgcgatggctgcgtatggctctcgcagctctggtgatatggttagactgctgcctgtagctgtgtacttggtgtactgtcttcccgcgtatgtggatttggtgaaaacttctgtatgagcaccttttatttgtagcctgcaatgattccttcttaagacagactggggactttggctccattgtgtgggatcatcatggccgtacagtgtctacgctgctatcatttgaggctgccataattcgaatccttgaaaggcgagaaggcccggcccgggaatattcacaacaatgaattcaccttgacaggttggtagcaagtactactcctatataaaaaggaaaaaagaaaa

SEQ ID NO: 49138 - DNA, 1229 bp, Zea Mays
ggcatatctacgttaatgatgaatggtactcaaggtccccttcatacagcagggggcacccaaaagggaggtcaagatcacaatctccagctcggtctcagtctaggtcacctgtccctgatcctagatctcaggcgaggtcaagatctagaagccaagagagggaggaggatgctgttaaccgtgggaatactctgtatgtgactgggctctcttcgagggttactgaaagggatgttaaggattatttttctaagcatggaagggtggttggttgccatgttgttcttgaaccccatacacgtgtttcccgtggatttgcctttgtcagcatggacactgttgaagaagcggagcgttgcataaagtatcttaatggttctgtaatggaaggtcgaaacatcacagttgaaaagtcacgccgtggtcgcccaaggacaccaactcctggaagctatcttggccatcggtacgagcgtagggagcgtgggaggttccatagaggctatggtggtgggcgtgatgagtattacggcaatggcggcggcgggtatggctaccgcaggtctccgcctcccatgtactcttcctacagggagagtcgggattattatccctcctacaaggacagccgggactaccctccctacagggacggcagggactactctcctccccacagggaccctcgggactactacgaaagcaggggtggccggggctactcgccgcctccttatggtggtggtaggtcaaggagggaccgatcggtttcaccgtatcggatgccagaaaggggctacggtggaggccgccgggtgggtggcggcggatatgacaggtaatgtagaggttttctctccgccggtggctgctgctgcgatggctgcgtatggctctcgcagctctggtgatatggttagactgctgcctgtagctgtgtacttggtgtactgtcttcccgcgtatgtggatttggtgaaaacttctgtatgagcaccttttatttgtagcctgcaatgattccttcttaagacagactggggactttggctccattgtgtgggatcatcatggccgtacagtgtctacgctgctatcatttgaggctgccataattcgaatccttgaaaggcgagaaggcccggcccgggaatattcacaacaatgaattcaccttgacaggttggtagcaagtactactcctatataaaaaggaaaaaagaaaa

SEQ ID NO: 49139 - DNA, 384 bp, Zea Mays
cggcgatcatctccgacctcgtggcgttgaagtactgcacctgcttcgatagcgggatcgtgttgccggcgttctgcatcacgcacgcacgcacgcttccttgtcaaagtttgctatatatggatgctagtacgcacacgtcggagcagacgtaacgaacagtacttataccgtggagtcgaggatgccagctcctccggaagcatagctgacgccgatagtgagagccgtcggaaccagaaggccgccgccgcagcttgctgctcccagcagcgacaggtattctgttgagctacgagcctatacgacgacgacggcgaggcctaccaatgaaatcggcggtgttgtagccgttgctgaaccttccggtgggaaggccgccgg

SEQ ID NO: 49140 - DNA, 194 bp, Zea Mays
taactggccttctctgattatgtcccttttggaacgaaatttgttccagccttccagggtatggttattagaggatcatgattcacaacccctcagtgggacagagactggagctcttgctcttcccttgttgagcggcccggcagtacctagaattctgttgttccacctgatactctggtctttcttttcct

SEQ ID NO: 49141 - DNA, 1829 bp, Zea Mays
ctagagggggggattatcatctaatcgaaaagcttgctcagttcgacagagaacgtatccctgaacgtgttgtgcatgcacggggagccagtgccaagggtttctttgaggtcactcatgatgtctctcaccttacatgtgctgattttctccgtgctcctggggtccagacacctgttattgtccgtttctctacagttgtgcatgagcgtggaagccctgagaccttgagggatccacgtggttttgctgtcaagttctacaccagagagggtaactttgacctcgtgggtaacaacatgcctgtgtttttcatacgagatgggatgaaattccctgacatggtccacgctttcaagccgaatccaaagaccaatttgcaggagaactggagaatagtagatttcttctctcaccacccagagagcctacacatgttcaccttcctctttgacgatgttggcatcccactcaactacaggcacatggagggctttggtgtcaatacctacaccttgatcaacagggatggaaagcctcaccttgtgaaattccattggaagcctacttgtggtgtgaaatgcttgctcgacaatgaagctgtgactgttggaggcacctgccacagccatgcgacgaaggatctatatgattccatcgcagctgggaattaccctgaatggaagctctacatccagactattgatcttgaccatgaggataagtttgactttgacccgctcgatgtcaccaagacctggcctgaggatatcatcccgctgcagcccgttggacggatggtcctgaacaagaacgtcgacaacttctttgcagagaatgaacagattgctttctgcccagcgattattgttcctggaattcactattctgatgataagctgctccagacgagaatcttctcctatgctgatacccagaggcaccgccttggtccaaactatctgatgcttcctgtgaatgcaccaaaatgtgcccaccacaataaccaccatgatgggttcatgaacttcatgcacagggacgaagaggtgaactacttcccttcgaggtttgatcccgcccgtcacgcggagaaggtccccattcctccccgtgttctaacaggctgtcgtgagaagtgcatcattcagaaggagaacaacttcaagcaggctggcgagagatatcgttccttcgaccctgcaaggcaagaccggttcatccagcgatgggttgacgcactgacagaccctcgcgtgacccatgaacaccgtaccatttggatctcctactggtcccagtgcgacgccgctcttggccagaagctggcttctaggctgaacctgaagccgagcatgtaagatcgacgaggaagaaagcaggcaccggtggccaaggatgcaacgcaacatggagcgtgtgatgtttacaccaatataattgaataaacaggggatgtgcgcgttgtcgtacttatgctgatgctgatggtcggtggtcgattatatatactggaacttctggtgtatgctcttctcttctggggagacgtaatgtaacgaagaagaatgtgtcattgtggcctgtggtacaaaccctgctgtgtatgggcctgtctataagaaacagcgatgagttgtgacgttatgtttctgacagtttatttactaatgagcacatctttgatttactagaacgaagagaagttgaggaactgtcggacagatgcagcaaggatcctcattaaataatagaatcactcttgtttgcattcatgaaaactgtactaagggagtgtttgtttgatgaatcactctaagataaggtgg

SEQ ID NO: 49142 - DNA, 1912 bp, Zea Mays
cgttgattcacctgtccgaatatcgtcaatgaatttgagacttgcccaaaggacttattccttgtatcagctgtaaggtccaatcctccttgaggattatcatctaatcgaaaagcttgctcagttcgacagagaacgtatccctgaacgtgttgtgcatgcacggggagccagtgccaagggtttctttgaggtcactcatgatgtctctcaccttacatgtgctgattttctccgtgctcctggggtccagacacctgttattgtccgtttctctacagttgtgcatgagcgtggaagccctgagaccttgagggatccacgtggttttgctgtcaagttctacaccagagagggtaactttgacctcgtgggtaacaacatgcctgtgtttttcatacgagatgggatgaaattccctgacatggtccacgctttcaagccgaatccaaagaccaatttgcaggagaactggagaatagtagatttcttctctcaccacccagagagcctacacatgttcaccttcctctttgacgatgttggcatcccactcaactacaggcacatggagggctttggtgtcaatacctacaccttgatcaacagggatggaaagcctcaccttgtgaaattccattggaagcctacttgtggtgtgaaatgcttgctcgacaatgaagctgtgactgttggaggcacctgccacagccatgcgacgaaggatctatatgattccatcgcagctgggaattaccctgaatggaagctctacatccagactattgatcttgaccatgaggataagtttgactttgacccgctcgatgtcaccaagacctggcctgaggatatcatcccgctgcagcccgttggacggatggtcctgaacaagaacgtcgacaacttctttgcagagaatgaacagattgctttctgcccagcgattattgttcctggaattcactattctgatgataagctgctccagacgagaatcttctcctatgctgatacccagaggcaccgccttggtccaaactatctgatgcttcctgtgaatgcaccaaaatgtgcccaccacaataaccaccatgatgggttcatgaacttcatgcacagggacgaagaggtgaactacttcccttcgaggtttgatcccgcccgtcacgcggagaaggtccccattcctccccgtgttctaacaggctgtcgtgagaagtgcatcattcagaaggagaacaacttcaagcaggctggcgagagatatcgttccttcgaccctgcaaggcaagaccggttcatccagcgatgggttgacgcactgacagaccctcgcgtgacccatgaacaccgtaccatttggatctcctactggtcccagtgcgacgccgctcttggccagaagctggcttctaggctgaacctgaagccgagcatgtaagatcgacgaggaagaaagcaggcaccggtggccaaggatgcaacgcaacatggagcgtgtgatgtttacaccaatataattgaataaacaggggatgtgcgcgttgtcgtacttatgctgatgctgatggtcggtggtcgattatatatactggaacttctggtgtatgctcttctcttctggggagacgtaatgtaacgaagaagaatgtgtcattgtggcctgtggtacaaaccctgctgtgtatgggcctgtctataagaaacagcgatgagttgtgacgttatgtttctgacagtttatttactaatgagcacatctttgatttactagaacgaagagaagttgaggaactgtcggacagatgcagcaaggatcctcattaaataatagaatcactcttgtttgcattcatgaaaactgtactaagggagtgtttgtttgatgaatcactctaagataaggtgg

SEQ ID NO: 49143 - DNA, 2190 bp, Zea Mays
gtttaaatcacatccccatcactccacaccccgtcaatggcgttctccgccgcctcgtcggcggcggccgcggcagcgtaccccagaactacgcttccactgcggcggcggccgggcctcttggccctcctcctccttctcctttgcttcctctccttccaggtcgtgatccatgtgccctccgccagatcagcggtgtcgctgtggctcttctcgggtcaccgagccgaacgcgggactcgcgagaactgccctggctgcagcaagttacaggatgtggataaagctgaaaagactatcgcgtacactgaccagcatggtcggatcaagctattcaaagttaccgccagagaattcggttcgtcctctatctgggagaacccgtggttgcccagagatagccagccggtagccagaacacaagaggttgccggggatcatctactcgccagtggatcagaaaccaccaatctttcaagtgctgaaactctggcaactacaattgtcgatccgattaaattacggcgacaggtatttcgccgtagaagaaaggagcggagggttcaggagctgcttcagatggataagaagattgaacttcagatgcggaatgcagcaataaatagctcaaggaactttaacaataaagttagaggaagctacaacatatggaggcaggagttccgccttgttaatacagactcaacactaaggctcatgaaagatcagataataatggccaagttgtatgccactattgcactctcccagaaagaaccagacatgtacgcgttgctcatgaagcgcataaaagaaagccaaacatctatcggagatgcacttatcgacagtgaactcgattctagtgccttagagagagcaaaagcaatggggcatgtgttatcttcggctagagatgttctgtacagctcgggtgaggtgtcaagaaaattgcgtgttatgttgcagtcgacagaactaaatatcgacgcagtgaagaaacaaaactcatttctggttcagcatgctgcaaagacagtacccatgcccttgcactgcctacatatgcagctgacaactgattattattttcgtgattatgtgaccaaggaacattttgacgatgatgctttgaaggcgggacaatataaagaaaagcttgaggatttgtcactctaccactatgctatattttctgataatgtgcttgcggcctcggtagttgtcaaatcaactgtggcaaatgccaatgaaccagagaagcacgtgttccacattgtcactgatagacttaattttgcagccatgaagatgtggttcattactcatcctcctcaactggcaactgttcatgtggagaacatagacaatttcaaatggcttaattcctcatactgttctgttcttcggcaactggagtcagctcgcctcaaagaatattacttcaaagcacacgatccgtcgtcactctctgatggaaatgagaatctgaaatacaggaaccccaaatatttgtccatgctcaaccatttgaggttctacatgccagagattcacccaaagcttgagaagatactgtttcttgatgatgatgttgttgtacagaaggatttaacacccctttgggatgttgatcttaaagggatggtaaatggcgctgtggaaacctgtaaagagagtttccatcgctttgacacttatctcaacttctcacacccaaagatctcagagaacttcgatccacacgcttgtgggtgggctttcgggatgaacatgtttgacctgaaggagtggaagaagcgaaatatcactggaatataccattattggcaagatttgaatgaggaccgtaagctgtggaagctgggtacgctgcctccaggtttaattactttctacaacctgacatacccgttgaatcgtacttggcatgtcttgggcctgggctatgatccagctgttgacattgctgagatcgacaacgctgcggtagttcattacaacgggaattataagccctggcttgaccttgccatttccaagtacaagccattctggtccaagtatgtagatgttgacaactcgcacgttcggcgttgctatgagggcaaacaatgacatctgcagggtgtcatactgatgaactgaaccgtcattccggacgaaccacagtaaccaggccaagggaag

SEQ ID NO: 49144 - DNA, 2381 bp, Zea Mays
ccccgtcaatggcgttctccgccgcctcgtcggcggcggccgcggcagcgtaccccagaactacgcttccactgcggcggcggccgggcctcttggccctcctcctccttctcctttgcttcctctccttccaggtcgtgatccatgtgccctccgccagatcagcggtgtcgctgtggctcttctcgggtcaccgagccgaacgcgggactcgcgagaactgccctggctgcagcaagttacaggatgtggataaagctgaaaagactatcgcgtacactgaccagcatggtcggatcaagctattcaaagttaccgccagagaattcggttcgtcctctatctgggagaacccgtggttgcccagagatagccagccggtagccagaacaaggttgccggggatcatctactcgccagtggatcagaaaccaccaatctttcaagtgctgaaactctggcaactacaattgtcgatccgattaaattacggcgacaggtatttcgccgtagaagaaaggagcggagggttcaggagctgcttcagatggataagaagattgaacttcagatgcggaatgcagcaataaatagctcaaggaactttaacaataaagttagaggaagctacaacatatggaggcaggagttccgccttgttaatacagactcaacactaaggctcatgaaagatcagataataatggccaagttgtatgccactattgcactctcccagaaagaaccagacatgtacgcgttgctcatgaagcgcataaaagaaagccaaacatctatcggagatgcacttatcgacagtgaactcgattctagtgccttagagagagcaaaagcaatggggcatgtgttatcttcggctagagatgttctgtacagctcgggtgaggtgtcaagaaaattgcgtgttatgttgcagtcgacagaactaaatatcgacgcagtgaagaaacaaaactcatttctggttcagcatgctgcaaagacagtacccatgcccttgcactgcctacatatgcagctgacaactgattattattttcgtgattatgtgaccaaggaacattttgacgatgatgctttgaaggcgggacaatataaagaaaagcttgaggatttgtcactctaccactatgctatattttctgataatgtgcttgcggcctcggtagttgtcaaatcaactgtggcaaatgccaatgaaccagagaagcacgtgttccacattgtcactgatagacttaattttgcagccatgaagatgtggttcattactcatcctcctcaactggcaactgttcatgtggagaacatagacaatttcaaatggcttaattcctcatactgttctgttcttcggcaactggagtcagctcgcctcaaagaatattacttcaaagcacacgatccgtcgtcactctctgatggaaatgagaatctgaaatacaggaaccccaaatatttgtccatgctcaaccatttgaggttctacatgccagagattcacccaaagcttgagaagatactgtttcttgatgatgatgttgttgtacagaaggatttaacacccctttgggatgttgatcttaaagggatggtaaatggcgctgtggaaacctgtaaagagagtttccatcgctttgacacttatctcaacttctcacacccaaagatctcagagaacttcgatccacacgcttgtgggtgggctttcgggatgaacatgtttgacctgaaggagtggaagaagcgaaatatcactggaatataccattattggcaagatttgaatgaggaccgtaagctgtggaagctgggtacgctgcctccaggtttaattactttctacaacctgacatacccgttgaatcgtacttggcatgtcttgggcctgggctatgatccagctgttgacattgctgagatcgacaacgctgcggtagttcattacaacgggaattataagccctggcttgaccttgccatttccaagtacaagccattctggtccaagtatgtagatgttgacaactcgcacgttcggcgttgctatgagggcaaacaatgacatgtaaatcttcatcaagttttcttttttcatttcagagcataagttattccctatgaggatgttaggcagagtagtggtgtgtttagcatagtttaagtcttcttgatcttgtcattattgctccgtagttatctagctattcttaaatgaactggtgcataaggtggtttatacctgacaacaaagtagatattcttttgtttactttagaatttgctgtaccttgaatgaattggcaaaaagatagagaagttcatctgcttacgacctgtggtatgaacactgtgtagtt

SEQ ID NO: 49145 - DNA, 975 bp, Zea Mays
ctgctttcaaaattgggcctacaaaagcagtaggatggtggggtgaaggctcaaagaagatccttggtggcagggatgtgcttggtggaggaacatggatggggtgcaccaaggatggaaggcttgccttcctgaccaatgtgcttgaaccagatgccatgcccggtgcacggactaggggagatctgcctctcaaattcctgcagagcaacaagagcccactcgaagttgcaactgaagtggcagaagaagctgatgaatacaatggcttcaacctcatactagctgatctaacaacaaatatcatggtttatgtgtcaaaccggcctaagggtcagcctgcaacaattcaactcgtgtcaccaggactccatgtgctgtccaatgcaaggctagatagcccttggcagaaggcaattctcctcggtaaaaacttcagggagcttcttagggagcatggtgctgatgaggttgaagtgaaggatatagttgagaggctaatgactgacaccacaaaggctgacaaagatagactgccaaacactggttgtgatcccaactgggagcatggtctgagctccatcttcattgaggtgcaaactgaccaagggccctatgggacacggagcacagccgttttatcagtgaactatgatggcgaagctagcttgtacgagaagtatcttgagagtggtatatggaaggatcacacagtgagttaccagatagagtagtaggcattgcacaggaaaagttggcgacctcaaataaatagaaatatgaagcagacacaattgtgaatttcattatttccctgatctctagtcatcttcgtgattatctaagatcctaccataatgccaattacattattcactgtaagcagatttttcacttgacgataaaatgtcaaccaaaactttggttttcttcgtcatctttactcgagaaatcttagcaaggtattgtatgttg

SEQ ID NO: 49146 - DNA, 2263 bp, Zea Mays
agcttattcgagctaacgagacaaggtgaaattattttgtcgaaccaaactgattatgaatcgagcgagttcacggaccacgattattttgtccagcactaactactcctataaaactgtgttgtgacagaatgctgatctgttccttccgtcgcaaatgtgctgtgtccctcttcatcctcctcctttctcagtcacatacacgggagctgtccacgccggccttcccccctaccaccacataaatccgcgcctactccgcaccatcttctctgctcaccacgcgcctccaaggatgggcgcacggatttagctgatcccgtcgctgctcgcgcccgatctcgcggcgccccgccccatcagctccgcgagatgatctgagccccgcgatctggtggagaaatggagccgccgccggatctgaacacccacctgccgccgcggaagcgcctgctcgccgggctcaggacggcagccaccgccgccgagccgctaccgccgccgcccgcccacgccgacctcgccgcccgcctccgcgagatggcgctcgccgccaacgcgtcggcgtcctcgcccgaggagacgatcgaggcggcgagggcggccgcgcaggccgccgcggacgccgccgttgctgcgcgcgccgtggccgccgagaaggccgccgtcgccgcgaaggctagggcggccgcgcgcgccgccatggagttcatcgactccttctctaccagggccggcgcgtccaggaacgggagcggcctccagttcaagatcaggtctaggaagaagcatgtccaggtcaagatgctgtacaggcccaatggaaccctagggccagcggaggctcccaagcctaggagacgcaagcagtcggatgaagaggtcccgcacaatttgcaccgcctcatgaatagctcgccgaggatctctcacgctggactgcccaagaggcctcgcacgaccgctgctggggatgccaaaaatggagctgtagcacccggtggaggtaacggcgctggtgtttgtaacggttcttcagttcaggtgccgacggaggctggcggttggttgggtaatggatgctctgaggcgaaatctcatgagagaaccgttccattgctcaaccacgaggtctctggtgaagactcatccaggcacgccgcgaagagtagcggcggcattgctgacaacggagtcggggttgggaactcgagtgctggtcagaaagtgaaggtcaagaggaaggagctgctcctgaatcaaaataccggtaaagaaagagaagaaccagaagaggccacacaaacagagccctttgtacgttctatcacgctcgatgaatcgaaaccaaactcaaaaggaaaaggaaggtcaaacccaaatgggaatggaacagaaaggcttgcaggccctgcagatacgaagggccgtggcgaaggcgtgacgccaccgaagataacttccgtatggaagatcaagaagctgaagacatctcactgctcttccgacagcaaggtgctgcacaaggtctgcgtgccgcctcctacggcggctgagacctctgcttcggtgaaagctgattagcgaggcaccatagcgtatagttcggcggatgcatgtcttagctacgcttgttgtgaggtttttgtatgttcaagttgctactcggacgaggagggaaagcggagatcgttttttataccgatcacaatattcatgggtggctgaacatggaagggccattggaattgcaagatgttagatcctatttgttttcacatgtgagtatattttgtgatggtgatgagtgatgactactgtcttgagggcgccctgcatgttgtggcacctgcaccatgtgtaaccagattaccagaattcagttgagtgtttgtctgtgtttgatgccagcaccatggtgtggctggagaagacaccatgcctagcttagctagtaccagaattcagttgacttgtgataacctggtggtgataggaaagttgggagcagcatgggtactgttgctggtatggcaagcatgagtgatggtggtggacctggtggccacaggtgcacctagattttttctctcttctgctgctgctgctggtggatctagcacagatgatgcatactcctacatgattgctactccctctgtctgaacaaaatgacgttctagttttctccaggaaattacagattatctcatgtttgacaaaaaaaacaagacaaattatcttatgtttgaccaagtattac

SEQ ID NO: 49147 - DNA, 2292 bp, Zea Mays
agcttattcgagctaacgagacaaggtgaaattattttgtcgaaccaaactgattatgaatcgagcgagttcacggaccacgattattttgtccagcactaactactcctataaaactgtgttgtgacagaatgctgatctgttccttccgtcgcaaatgtgctgtgtccctcttcatcctcctcctttctcagtcacatacacgggagctgtccacgccggccttcccccctaccaccacataaatccgcgcctactccgcaccatcttctctgctcaccacgcgcctccaagggcctcgcctcgcccgcccgccggtccaggatgggcgcacggatttagctgatcccgtcgctgctcgcgcccgatctcgcggcgccccgccccatcagctccgcgagatgatctgagccccgcgatctggtggagaaatggagccgccgccggatctgaacacccacctgccgccgcggaagcgcctgctcgccgggctcaggacggcagccaccgccgccgagccgctaccgccgccgcccgcccacgccgacctcgccgcccgcctccgcgagatggcgctcgccgccaacgcgtcggcgtcctcgcccgaggagacgatcgaggcggcgagggcggccgcgcaggccgccgcggacgccgccgttgctgcgcgcgccgtggccgccgagaaggccgccgtcgccgcgaaggctagggcggccgcgcgcgccgccatggagttcatcgactccttctctaccagggccggcgcgtccaggaacgggagcggcctccagttcaagatcaggtctaggaagaagcatgtccaggtcaagatgctgtacaggcccaatggaaccctagggccagcggaggctcccaagcctaggagacgcaagcagtcggatgaagaggtcccgcacaatttgcaccgcctcatgaatagctcgccgaggatctctcacgctggactgcccaagaggcctcgcacgaccgctgctggggatgccaaaaatggagctgtagcacccggtggaggtaacggcgctggtgtttgtaacggttcttcagttcaggtgccgacggaggctggcggttggttgggtaatggatgctctgaggcgaaatctcatgagagaaccgttccattgctcaaccacgaggtctctggtgaagactcatccaggcacgccgcgaagagtagcggcggcattgctgacaacggagtcggggttgggaactcgagtgctggtcagaaagtgaaggtcaagaggaaggagctgctcctgaatcaaaataccggtaaagaaagagaagaaccagaagaggccacacaaacagagccctttgtacgttctatcacgctcgatgaatcgaaaccaaactcaaaaggaaaaggaaggtcaaacccaaatgggaatggaacagaaaggcttgcaggccctgcagatacgaagggccgtggcgaaggcgtgacgccaccgaagataacttccgtatggaagatcaagaagctgaagacatctcactgctcttccgacagcaaggtgctgcacaaggtctgcgtgccgcctcctacggcggctgagacctctgcttcggtgaaagctgattagcgaggcaccatagcgtatagttcggcggatgcatgtcttagctacgcttgttgtgaggtttttgtatgttcaagttgctactcggacgaggagggaaagcggagatcgttttttataccgatcacaatattcatgggtggctgaacatggaagggccattggaattgcaagatgttagatcctatttgttttcacatgtgagtatattttgtgatggtgatgagtgatgactactgtcttgagggcgccctgcatgttgtggcacctgcaccatgtgtaaccagattaccagaattcagttgagtgtttgtctgtgtttgatgccagcaccatggtgtggctggagaagacaccatgcctagcttagctagtaccagaattcagttgacttgtgataacctggtggtgataggaaagttgggagcagcatgggtactgttgctggtatggcaagcatgagtgatggtggtggacctggtggccacaggtgcacctagattttttctctcttctgctgctgctgctggtggatctagcacagatgatgcatactcctacatgattgctactccctctgtctgaacaaaatgacgttctagttttctccaggaaattacagattatctcatgtttgacaaaaaaaacaagacaaattatcttatgtttgaccaagtattac

SEQ ID NO: 49148 - DNA, 2488 bp, Zea Mays
gttccttccgtcgcaaatgtgctgtgtccctcttcatcctcctcctttctcagtcacatacacgggagctgtccacgccggccttcccccctaccaccacataaatccgcgcctactccgcaccatcttctctgctcaccacgcgcctccaagggcctcgcctcgcccgcccgccggtccaggatgggcgcacggatttagctgatcccgtcgctgctcgcgcccgatctcgcggcgccccgccccatcagctccgcgagatgatctgagccccgcgatctggtggagaaatggagccgccgccggatctgaacacccacctgccgccgcggaagcgcctgctcgccgggctcaggacggcagccaccgccgccgagccgctaccgccgccgcccgcccacgccgacctcgccgcccgcctccgcgagatggcgctcgccgccaacgcgtcggcgtcctcgcccgaggagacgatcgaggcggcgagggcggccgcgcaggccgccgcggacgccgccgttgctgcgcgcgccgtggccgccgagaaggccgccgtcgccgcgaaggctagggcggccgcgcgcgccgccatggagttcatcgactccttctctaccagggccggcgcgtccaggaacgggagcggcctccagttcaagatcaggtctaggaagaagcatgtccaggtcaagatgctgtacaggcccaatggaaccctagggccagcggaggctcccaagcctaggagacgcaagcagtcggatgaagaggtcccgcacaatttgcaccgcctcatgaatagctcgccgaggatctctcacgctggactgcccaagaggcctcgcacgaccgctgctggggatgccaaaaatggagctgtagcacccggtggaggtaacggcgctggtgtttgtaacggttcttcagttcaggtgccgacggaggctggcggttggttgggtaatggatgctctgaggcgaaatctcatgagagaaccgttccattgctcaaccacgaggtctctggtgaagactcatccaggcacgccgcgaagagtagcggcggcattgctgacaacggagtcggggttgggaactcgagtgctggtcagaaagtgaaggtcaagaggaaggagctgctcctgaatcaaaataccggtaaagaaagagaagaaccagaagaggccacacaaacagagccctttgtacgttctatcacgctcgatgaatcgaaaccaaactcaaaaggaaaaggaaggtcaaacccaaatgggaatggaacagaaaggcttgcaggccctgcagatacgaagggccgtggcgaaggcgtgacgccaccgaagataacttccgtatggaagatcaagaagctgaagacatctcactgctcttccgacagcaaggtgctgcacaaggtctgcgtgccgcctcctacggcggctgagacctctgcttcggtgaaagctgattagcgaggcaccatagcgtatagttcggcggatgcatgtcttagctacgcttgttgtgaggtttttgtatgttcaagttgctactcggacgaggagggaaagcggaggtaaatctctcttggtagatctcacgtttgctttgatttttcatacgaatgtgcttgttttatggtatatagattattgggtatttctactgtactgtttctgcccctgcttccatttgatgtcactagtggtagggagtgtggcataatcatgtagatgtacctgctatgcatacatcgttttaataaatggcaccattgctctcagatactattttttttgcctgtgtttcttggtgtcctttacactatcatggttagtgcagatatctgttaaattatcaggggattatgacaacaggtaagaagtcctatttgcctgtaactactagtcgagatcgttttttataccgatcacaatattcatgggtggctgaacatggaagggccattggaattgcaagatgttagatcctatttgttttcacatgtgagtatattttgtgatggtgatgagtgatgactactgtcttgagggcgccctgcatgttgtggcacctgcaccatgtgtaaccagattaccagaattcagttgagtgtttgtctgtgtttgatgccagcaccatggtgtggctggagaagacaccatgcctagcttagctagtaccagaattcagttgacttgtgataacctggtggtgataggaaagttgggagcagcatgggtactgttgctggtatggcaagcatgagtgatggtggtggacctggtggccacaggtgcacctagattttttctctcttctgctgctgctgctggtggatctagcacagatgatgcatactcctacatgattgctactccctctgtctgaacaaaatgacgttctagttttctccaggaaattacagattatctcatgtttgacaaaaaaaacaagacaaattatcttatgtttgaccaagtattac

SEQ ID NO: 49149 - DNA, 2674 bp, Zea Mays
gttccttccgtcgcaaatgtgctgtgtccctcttcatcctcctcctttctcagtcacatacacgggagctgtccacgccggccttcccccctaccaccacataaatccgcgcctactccgcaccatcttctctgctcaccacgcgcctccaagggcctcgcctcgcccgcccgccggtccaggatgggcgcacggatttagctgatcccgtcgctgctcgcgcccgatctcgcggcgccccgccccatcagctccgcgagatgatctgagccccgcgatctggtggagaaatggagccgccgccggatctgaacacccacctgccgccgcggaagcgcctgctcgccgggctcaggacggcagccaccgccgccgagccgctaccgccgccgcccgcccacgccgacctcgccgcccgcctccgcgagatggcgctcgccgccaacgcgtcggcgtcctcgcccgaggagacgatcgaggcggcgagggcggccgcgcaggccgccgcggacgccgccgttgctgcgcgcgccgtggccgccgagaaggccgccgtcgccgcgaaggctagggcggccgcgcgcgccgccatggagttcatcgactccttctctaccagggccggcgcgtccaggaacgggagcggcctccagttcaagatcaggtctaggaagaagcatgtccaggtcaagatgctgtacaggcccaatggaaccctagggccagcggaggctcccaagcctaggagacgcaagcagtcggatgaagaggtcccgcacaatttgcaccgcctcatgaatagctcgccgaggatctctcacgctggactgcccaagaggcctcgcacgaccgctgctggggatgccaaaaatggagctgtagcacccggtggaggtaacggcgctggtgtttgtaacggttcttcagttcaggtgccgacggaggctggcggttggttgggtaatggatgctctgaggcgaaatctcatgagagaaccgttccattgctcaaccacgaggtctctggtgaagactcatccaggcacgccgcgaagagtagcggcggcattgctgacaacggagtcggggttgggaactcgagtgctggtcagaaagtgaagaaagagaagaaccagaagaggccacacaaacagagccctttgtacgttctatcacgctcgatgaatcgaaaccaaactcaaaaggaaaaggaaggtcaaacccaaatgggaatggaacagaaaggcttgcaggccctgcagatacgaagggccgtggcgaaggcgtgacgccaccgaagataacttccgtatggaagatcaagaagctgaagacatctcactgctcttccgacagcaaggtgctgcacaaggtctgcgtgccgcctcctacggcggctgagacctctgcttcggtgaaagctgattagcgaggcaccatagcgtatagttcggcggatgcatgtcttagctacgcttgttgtgaggtttttgtatgttcaagttgctactcggacgaggagggaaagcggaggtaaatctctcttggtagatctcacgtttgctttgatttttcatacgaatgtgcttgttttatggtatatagattattgggtatttctactgtactgtttctgcccctgcttccatttgatgtcactagtggtagggagtgtggcataatcatgtagatgtacctgctatgcatacatcgttttaataaatggcaccattgctctcagatactattttttttgcctgtgtttcttggtgtcctttacactatcatggttagtgcagatatctgttaaattatcaggggattatgacaacaggtaagaagtcctatttgcctgtaactactagtcgaggtaattgctcttttcatgtacgagctagaaagaaattgttgtataattaatgttattaataagaccgaacatgactgatgtgtgagcctctgttttcgctgcttctgagtagattcccaactccagcatatgatgttagcatgcatgcttctgatttggttcactagattttatgcccaaaatatgatggactagcattcaggttctttggatgatgttacttttccagatcgttttttataccgatcacaatattcatgggtggctgaacatggaagggccattggaattgcaagatgttagatcctatttgttttcacatgtgagtatattttgtgatggtgatgagtgatgactactgtcttgagggcgccctgcatgttgtggcacctgcaccatgtgtaaccagattaccagaattcagttgagtgtttgtctgtgtttgatgccagcaccatggtgtggctggagaagacaccatgcctagcttagctagtaccagaattcagttgacttgtgataacctggtggtgataggaaagttgggagcagcatgggtactgttgctggtatggcaagcatgagtgatggtggtggacctggtggccacaggtgcacctagattttttctctcttctgctgctgctgctggtggatctagcacagatgatgcatactcctacatgattgctactccctctgtctgaacaaaatgacgttctagttttctccaggaaattacagattatctcatgtttgacaaaaaaaacaagacaaattatcttatgtttgaccaagtattac

SEQ ID NO: 49150 - DNA, 2451 bp, Zea Mays
gttccttccgtcgcaaatgtgctgtgtccctcttcatcctcctcctttctcagtcacatacacgggagctgtccacgccggccttcccccctaccaccacataaatccgcgcctactccgcaccatcttctctgctcaccacgcgcctccaagggcctcgcctcgcccgcccgccggtccaggatgggcgcacggatttagctgatcccgtcgctgctcgcgcccgatctcgcggcgccccgccccatcagctccgcgagatgatctgagccccgcgatctggtggagaaatggagccgccgccggatctgaacacccacctgccgccgcggaagcgcctgctcgccgggctcaggacggcagccaccgccgccgagccgctaccgccgccgcccgcccacgccgacctcgccgcccgcctccgcgagatggcgctcgccgccaacgcgtcggcgtcctcgcccgaggagacgatcgaggcggcgagggcggccgcgcaggccgccgcggacgccgccgttgctgcgcgcgccgtggccgccgagaaggccgccgtcgccgcgaaggctagggcggccgcgcgcgccgccatggagttcatcgactccttctctaccagggccggcgcgtccaggaacgggagcggcctccagttcaagatcaggtctaggaagaagcatgtccaggtcaagatgctgtacaggcccaatggaaccctagggccagcggaggctcccaagcctaggagacgcaagcagtcggatgaagaggtcccgcacaatttgcaccgcctcatgaatagctcgccgaggatctctcacgctggactgcccaagaggcctcgcacgaccgctgctggggatgccaaaaatggagctgtagcacccggtggaggtaacggcgctggtgtttgtaacggttcttcagttcaggtgccgacggaggctggcggttggttgggtaatggatgctctgaggcgaaatctcatgagagaaccgttccattgctcaaccacgaggtctctggtgaagactcatccaggcacgccgcgaagagtagcggcggcattgctgacaacggagtcggggttgggaactcgagtgctggtcagaaagtgaaggtcaagaggaaggagctgctcctgaatcaaaataccggtaaagaaagagaagaaccagaagaggccacacaaacagagccctttgtacgttctatcacgctcgatgaatcgaaaccaaactcaaaaggaaaaggaaggtcaaacccaaatgggaatggaacagaaaggcttgcaggccctgcagatacgaagggccgtggcgaaggcgtgacgccaccgaagataacttccgtatggaagatcaagaagctgaagacatctcactgctcttccgacagcaaggtgctgcacaaggtctgcgtgccgcctcctacggcggctgagacctctgcttcggtgaaagctgattagcgaggcaccatagcgtatagttcggcggatgcatgtcttagctacgcttgttgtgaggtttttgtatgttcaagttgctactcggacgaggagggaaagcggagatatctgttaaattatcaggggattatgacaacaggtaagaagtcctatttgcctgtaactactagtcgaggtaattgctcttttcatgtacgagctagaaagaaattgttgtataattaatgttattaataagaccgaacatgactgatgtgtgagcctctgttttcgctgcttctgagtagattcccaactccagcatatgatgttagcatgcatgcttctgatttggttcactagattttatgcccaaaatatgatggactagcattcaggttctttggatgatgttacttttccagatcgttttttataccgatcacaatattcatgggtggctgaacatggaagggccattggaattgcaagatgttagatcctatttgttttcacatgtgagtatattttgtgatggtgatgagtgatgactactgtcttgagggcgccctgcatgttgtggcacctgcaccatgtgtaaccagattaccagaattcagttgagtgtttgtctgtgtttgatgccagcaccatggtgtggctggagaagacaccatgcctagcttagctagtaccagaattcagttgacttgtgataacctggtggtgataggaaagttgggagcagcatgggtactgttgctggtatggcaagcatgagtgatggtggtggacctggtggccacaggtgcacctagattttttctctcttctgctgctgctgctggtggatctagcacagatgatgcatactcctacatgattgctactccctctgtctgaacaaaatgacgttctagttttctccaggaaattacagattatctcatgtttgacaaaaaaaacaagacaaattatcttatgtttgaccaagtattac

SEQ ID NO: 49151 - DNA, 2645 bp, Zea Mays
gttccttccgtcgcaaatgtgctgtgtccctcttcatcctcctcctttctcagtcacatacacgggagctgtccacgccggccttcccccctaccaccacataaatccgcgcctactccgcaccatcttctctgctcaccacgcgcctccaaggatgggcgcacggatttagctgatcccgtcgctgctcgcgcccgatctcgcggcgccccgccccatcagctccgcgagatgatctgagccccgcgatctggtggagaaatggagccgccgccggatctgaacacccacctgccgccgcggaagcgcctgctcgccgggctcaggacggcagccaccgccgccgagccgctaccgccgccgcccgcccacgccgacctcgccgcccgcctccgcgagatggcgctcgccgccaacgcgtcggcgtcctcgcccgaggagacgatcgaggcggcgagggcggccgcgcaggccgccgcggacgccgccgttgctgcgcgcgccgtggccgccgagaaggccgccgtcgccgcgaaggctagggcggccgcgcgcgccgccatggagttcatcgactccttctctaccagggccggcgcgtccaggaacgggagcggcctccagttcaagatcaggtctaggaagaagcatgtccaggtcaagatgctgtacaggcccaatggaaccctagggccagcggaggctcccaagcctaggagacgcaagcagtcggatgaagaggtcccgcacaatttgcaccgcctcatgaatagctcgccgaggatctctcacgctggactgcccaagaggcctcgcacgaccgctgctggggatgccaaaaatggagctgtagcacccggtggaggtaacggcgctggtgtttgtaacggttcttcagttcaggtgccgacggaggctggcggttggttgggtaatggatgctctgaggcgaaatctcatgagagaaccgttccattgctcaaccacgaggtctctggtgaagactcatccaggcacgccgcgaagagtagcggcggcattgctgacaacggagtcggggttgggaactcgagtgctggtcagaaagtgaagaaagagaagaaccagaagaggccacacaaacagagccctttgtacgttctatcacgctcgatgaatcgaaaccaaactcaaaaggaaaaggaaggtcaaacccaaatgggaatggaacagaaaggcttgcaggccctgcagatacgaagggccgtggcgaaggcgtgacgccaccgaagataacttccgtatggaagatcaagaagctgaagacatctcactgctcttccgacagcaaggtgctgcacaaggtctgcgtgccgcctcctacggcggctgagacctctgcttcggtgaaagctgattagcgaggcaccatagcgtatagttcggcggatgcatgtcttagctacgcttgttgtgaggtttttgtatgttcaagttgctactcggacgaggagggaaagcggaggtaaatctctcttggtagatctcacgtttgctttgatttttcatacgaatgtgcttgttttatggtatatagattattgggtatttctactgtactgtttctgcccctgcttccatttgatgtcactagtggtagggagtgtggcataatcatgtagatgtacctgctatgcatacatcgttttaataaatggcaccattgctctcagatactattttttttgcctgtgtttcttggtgtcctttacactatcatggttagtgcagatatctgttaaattatcaggggattatgacaacaggtaagaagtcctatttgcctgtaactactagtcgaggtaattgctcttttcatgtacgagctagaaagaaattgttgtataattaatgttattaataagaccgaacatgactgatgtgtgagcctctgttttcgctgcttctgagtagattcccaactccagcatatgatgttagcatgcatgcttctgatttggttcactagattttatgcccaaaatatgatggactagcattcaggttctttggatgatgttacttttccagatcgttttttataccgatcacaatattcatgggtggctgaacatggaagggccattggaattgcaagatgttagatcctatttgttttcacatgtgagtatattttgtgatggtgatgagtgatgactactgtcttgagggcgccctgcatgttgtggcacctgcaccatgtgtaaccagattaccagaattcagttgagtgtttgtctgtgtttgatgccagcaccatggtgtggctggagaagacaccatgcctagcttagctagtaccagaattcagttgacttgtgataacctggtggtgataggaaagttgggagcagcatgggtactgttgctggtatggcaagcatgagtgatggtggtggacctggtggccacaggtgcacctagattttttctctcttctgctgctgctgctggtggatctagcacagatgatgcatactcctacatgattgctactccctctgtctgaacaaaatgacgttctagttttctccaggaaattacagattatctcatgtttgacaaaaaaaacaagacaaattatcttatgtttgaccaagtattac

SEQ ID NO: 49152 - DNA, 4205 bp, Zea Mays
caaccatcggagtcggaggcacccgcaccgcacgccgacccgcgcacactcccccgcggccgcgcccccgatctcgccgggccggtggccctcgccgccggcgacacccaccgcccaatcgcccacgcccggggggcgatggaggcggccttcgacgcctacttccgcgccgcagatctggaccgcgacggccggatcagcggccaggaggccgtcgccttcttcaagggctccggcctgccccagcccgtcctcgcgcagatttggacgtatgctgataaaaaccggtctggttttcttgggcgtgaagacttcttcaatgcactcaaacttgtcacagtagctcagagcggccgagaattgacacctgatattgttagatcagcattattcggcccagctgctgcgaaaatccctgctcctcggataaatgtttctacagctgctcctcaggcaagtagcgtagctaacctcccgaatgccactcaagcaccaggtcctgttcagcagactcctgtcgtaagagggacacaagggcttcctggtatatcgtcaaatccacaagtcaggccaccacaacctccaaatgcaaacactgcgccccctgctcatggtcagggagttgcctcaaggccacccgtaggaagtggtcccactgggataaaccatactagctcaaccacaccaagtctagcaactgattggttcagtggtaagagaagtgcaagtccgttgggtgcaacttcacaaactccaacaagaggtatttctccacaggccaaccttagcagtgcgggaatctcagtgcagaattcagctcctgtaccaggctacaattctcatacaccaggtgtcaatgcaatttcaacaaatttgaacgtgatgtcttcccaaccatcagtcaatgactccaaggcgttggtgccattgggtaatggattgtcgtcaaactcaacttttggtgctgaccctttctctgcaactccacgaccagaacagggttcaccttttccccccaacgttccaaacaatctgctcagctctacccctcctgcctcagctgctggacatcatcaccctcctaagccaatgcaggctggtcctgtgcagagtatatcctcgctttctcctcatactagccagttgccacacaatcagccacctccgaggcaacaacaatttaatgctacaccaagtgctccaggaccagtgagttcaaatattcccactggacaaattccttcaagcccaagccagcctcaggcaccatggccgaaaatcactcaagtagatgtcagaaaatacatgattgtatttatcaaggtagacagggatcgtgatgggaaaatcactggtgaagaggcaaggaatctatttttaagttggaggcttccaagagatgtcttaaggaaggtgtgggatttgtccgaccaggataaggatgggatgctatctttcaaggaattttgtattgctgtgtacttaatggagagacatcgagagcaccgtcctcttcctgacacagtaacagatgctatttgggctgagggcaccgcactaccctctactggacagtttgcagaaaatcctagtgcccccgctcctcaagcaagtgccggatatacaagtagaacaatgcaaggaccacatcatgggatgcttccctcatccatgaagccaccatctcggaggcctcttcctttagatgctgacgatactattaagccagagcaacaaaagccaaaggtccctgtcttggaggaacatctagttggccaactaagcaaggaggaacaagatacactggatgcaaagtttaatgaagcttcagtcgctgataagaaagtccaagagttggagaaggagatccttgattctagagagaagaccgagttttatcgcacgaagatgcaggagcttattctttacaaaagtaggtgcgacaataggtttaatgaagtctcagaaagtatgtctgctgataaacgtccaatctctttctgcaaaatatgatgagagatgcaagaaggttggagatgtggcatcaaagctaacaatggatgaggctactttccgtgagatccaggagaagaagttggaaatttataacgccatagttaagctgcaaaaaggggatgatagcgatgagaagtttcaggagcgggctaataagatacagtcagatcttgaggagcttgtgaaatcattgaatgagcaatgcaagagatatgggttgagagctaagccaactactttagtggagcttccttttggttggcaacctggaattcaagagacagcttatgcatgggatgaagaatgggataattttggagatgaaggattctctataataaaggaactaacagttgaagtggagcctcccgttgtagcaaagagtcagcctactgaggatgttaaagcatcttcaaatggggcatcaacagaaaaagaagacaacaagggtgataaatctgctgctgctgtggagcaggttgtcaaacctgaaacagcaccttcgaatatcaaaccagagtcagcaaaaagtcctccagttagtcctgtcaagaacaaagaggatggtcccgatgaacatgataaaaagcaatctggaacaaatgatgtctcaccacgtgagagtatcagcaaccgtggagcaatggattcccctactcatggagataaaacccatgatggacactcatggggcatggataatgactccctatggaactttgatcataaggagggtgagaatggtgattcagatctcttctttgggccacaaggccttcccccgataagaactggaggttcctcatctggtaattcagttgtcaaggaacagaagccgttctttgattctgttcctggtaccccagtggagaaatccgtctttgattccatcccaggcacgccatttcagaaatccgtctttgattctatcccaggcacgccagttcagaaatccgtgtttgattactctgtccctagcacaccgatgcagaactcagtctttgattattctgtcccaagcacgccgatgcagaagtcactctttgattctgtccctggtacaccggtgcagagatcagttttcgattctgttccgagcacaccaatgcagagatcagtttttgactctgttccgagcacgccgacgcagaaaccattcttcgactcctttccaagcacaccaatgcagagatcactgttcgattctgggccaagcagagcagaatctcctaccgccagcagcatgtatggcaaagagcagaagggattcttcgattcttcagtcccgagtactccaatgtacaactcaagcttcacgccaaggtatagcgaagcaggagacgattcattcgacaccatgtcccaatacagctcatttggcatgcacgagagcaattcctttggacagcgcgacagcttatcgagattcgattctttcagcagcaatgctgacaacggtgggaatgacacttttgcgaggtttgattctttccgcagcacttcagatcagggtgggggcaacagcttcatgaggtacgattccatgaacagcagcagcgaccatgacgggatcggcacgtttgcgaggtttgattcgatgaagagcagtaactacaacagccggggctactcgttcgacgacgaggacccctttgggacagggccgtttaaatcgacagagaccacgagccacagcccgacaaaacatgggacggacacatggagcgcgttttgacaggcaggggctgtatcatatattcaatagaggtcatgcgcttgtgcaccttactgcagatatatacacacgtacaggggcaagacaattttttgttgtgtgcatgggcctctgctccaacacacctggggaaggggaagggatgggacggggatttgcttgtgtgcttgctttgtgtttaattttgtacgtaggctgggaacatgtgtttggtgggatgatgatgatgatgctgctgctgctgcttataaactcaacattctttataccttgtattgtacaagtgcatgtacaagatgtgagtcgacccgtttgggttgagtaactctcgagtgttttttcttccatggtgtagcgttttcctgtttctccagaattttctgagcaatgtacagacagacaaacttttgtgtgaaacacctgttgtccaatactgagacccttccattcgttg

SEQ ID NO: 49153 - DNA, 4162 bp, Zea Mays
gcgcacactcccccgcggccgcgcccccgatctcgccgggccggtggccctcgccgccggcgacacccaccgcccaatcgcccacgcccggggggcgatggaggcggccttcgacgcctacttccgcgccgcagatctggaccgcgacggccggatcagcggccaggaggccgtcgccttcttcaagggctccggcctgccccagcccgtcctcgcgcagatttggacgtatgctgataaaaaccggtctggttttcttgggcgtgaagacttcttcaatgcactcaaacttgtcacagtagctcagagcggccgagaattgacacctgatattgttagatcagcattattcggcccagctgctgcgaaaatccctgctcctcggataaatgtttctacagctgctcctcaggcaagtagcgtagctaacctcccgaatgccactcaagcaccaggtcctgttcagcagactcctgtcgtaagagggacacaagggcttcctggtatatcgtcaaatccacaagtcaggccaccacaacctccaaatgcaaacactgcgccccctgctcatggtcagggagttgcctcaaggccacccgtaggaagtggtcccactgggataaaccatactagctcaaccacaccaagtctagcaactgattggttcagtggtaagagaagtgcaagtccgttgggtgcaacttcacaaactccaacaagaggtatttctccacaggccaaccttagcagtgcgggaatctcagtgcagaattcagctcctgtaccaggctacaattctcatacaccaggtgtcaatgcaatttcaacaaatttgaacgtgatgtcttcccaaccatcagtcaatgactccaaggcgttggtgccattgggtaatggattgtcgtcaaactcaacttttggtgctgaccctttctctgcaactccacgaccagaacagggttcaccttttccccccaacgttccaaacaatctgctcagctctacccctcctgcctcagctgctggacatcatcaccctcctaagccaatgcaggctggtcctgtgcagagtatatcctcgctttctcctcatactagccagttgccacacaatcagccacctccgaggcaacaacaatttaatgctacaccaagtgctccaggaccagtgagttcaaatattcccactggacaaattccttcaagcccaagccagcctcaggcaccatggccgaaaatcactcaagtagatgtcagaaaatacatgattgtatttatcaaggtagacagggatcgtgatgggaaaatcactggtgaagaggcaaggaatctatttttaagttggaggcttccaagagatgtcttaaggaaggtgtgggatttgtccgaccaggataaggatgggatgctatctttcaaggaattttgtattgctgtgtacttaatggagagacatcgagagcaccgtcctcttcctgacacagtaacagatgctatttgggctgagggcaccgcactaccctctactggacagtttgcagaaaatcctagtgcccccgctcctcaagcaagtgccggatatacaagtagaacaatgcaaggaccacatcatgggatgcttccctcatccatgaagccaccatctcggaggcctcttcctttagatgctgacgatactattaagccagagcaacaaaagccaaaggtccctgtcttggaggaacatctagttggccaactaagcaaggaggaacaagatacactggatgcaaagtttaatgaagcttcagtcgctgataagaaaagttggagaaggagatccttgattctagagagaagaccgagttttatcgcacgaagatgcaggagcttattctttacaaaagtaggtgcgacaataggtttaatgaagtctcagaaagtatgtctgctgataaacgtgaggtccaatctctttctgcaaaatatgatgagagatgcaagaaggttggagatgtggcatcaaagctaacaatggatgaggctactttccgtgagatccaggagaagaagttggaaatttataacgccatagttaagctgcaaaaaggggatgatagcgatgagaagtttcaggagcgggctaataagatacagtcagatcttgaggagcttgtgaaatcattgaatgagcaatgcaagagatatgggttgagagctaagccaactactttagtggagcttccttttggttggcaacctggaattcaagagacagcttatgcatgggatgaagaatgggataattttggagatgaaggattctctataataaaggaactaacagttgaagtggagcctcccgttgtagcaaagagtcagcctactgaggatgttaaagcatcttcaaatggggcatcaacagaaaaagaagacaacaagggtgataaatctgctgctgctgtggagcaggttgtcaaacctgaaacagcaccttcgaatatcaaaccagagtcagcaaaaagtcctccagttagtcctgtcaagaacaaagaggatggtcccgatgaacatgataaaaagcaatctggaacaaatgatgtctcaccacgtgagagtatcagcaaccgtggagcaatggattcccctactcatggagataaaacccatgatggacactcatggggcatggataatgactccctatggaactttgatcataaggagggtgagaatggtgattcagatctcttctttgggccacaaggccttcccccgataagaactggaggttcctcatctggtaattcagttgtcaaggaacagaagccgttctttgattctgttcctggtaccccagtggagaaatccgtctttgattccatcccaggcacgccatttcagaaatccgtctttgattctatcccaggcacgccagttcagaaatccgtgtttgattactctgtccctagcacaccgatgcagaactcagtctttgattattctgtcccaagcacgccgatgcagaagtcactctttgattctgtccctggtacaccggtgcagagatcagttttcgattctgttccgagcacaccaatgcagagatcagtttttgactctgttccgagcacgccgacgcagaaaccattcttcgactcctttccaagcacaccaatgcagagatcactgttcgattctgggccaagcagagcagaatctcctaccgccagcagcatgtatggcaaagagcagaagggattcttcgattcttcagtcccgagtactccaatgtacaactcaagcttcacgccaaggtatagcgaagcaggagacgattcattcgacaccatgtcccaatacagctcatttggcatgcacgagagcaattcctttggacagcgcgacagcttatcgagattcgattctttcagcagcaatgctgacaacggtgggaatgacacttttgcgaggtttgattctttccgcagcacttcagatcagggtgggggcaacagcttcatgaggtacgattccatgaacagcagcagcgaccatgacgggatcggcacgtttgcgaggtttgattcgatgaagagcagtaactacaacagccggggctactcgttcgacgacgaggacccctttgggacagggccgtttaaatcgacagagaccacgagccacagcccgacaaaacatgggacggacacatggagcgcgttttgacaggcaggggctgtatcatatattcaatagaggtcatgcgcttgtgcaccttactgcagatatatacacacgtacaggggcaagacaattttttgttgtgtgcatgggcctctgctccaacacacctggggaaggggaagggatgggacggggatttgcttgtgtgcttgctttgtgtttaattttgtacgtaggctgggaacatgtgtttggtgggatgatgatgatgatgctgctgctgctgcttataaactcaacattctttataccttgtattgtacaagtgcatgtacaagatgtgagtcgacccgtttgggttgagtaactctcgagtgttttttcttccatggtgtagcgttttcctgtttctccagaattttctgagcaatgtacagacagacaaacttttgtgtgaaacacctgttgtccaatactgagacccttccattcgttg

SEQ ID NO: 49154 - DNA, 3971 bp, Zea Mays
gcgcacactcccccgcggccgcgcccccgatctcgccgggccggtggccctcgccgccggcgacacccaccgcccaatcgcccacgcccggggggcgatggaggcggccttcgacgcctacttccgcgccgcagatctggaccgcgacggccggatcagcggccaggaggccgtcgccttcttcaagggctccggcctgccccagcccgtcctcgcgcagatttggacgtatgctgataaaaaccggtctggttttcttgggcgtgaagacttcttcaatgcactcaaacttgtcacagtagctcagagcggccgagaattgacacctgatattgttagatcagcattattcggcccagctgctgcgaaaatccctgctcctcggataaatgtttctacagctgctcctcaggcaagtagcgtagctaacctcccgaatgccactcaagcaccaggtcctgttcagcagactcctgtcgtaagagggacacaagggcttcctggtatatcgtcaaatccacaagtcaggccaccacaacctccaaatgcaaacactgcgccccctgctcatggtcagggagttgcctcaaggccacccgtaggaagtggtcccactgggataaaccatactagctcaaccacaccaagtctagcaactgattggttcagtggtaagagaagtgcaagtccgttgggtgcaacttcacaaactccaacaagaggtatttctccacaggccaaccttagcagtgcgggaatctcagtgcagaattcagctcctgtaccaggctacaattctcatacaccaggtgtcaatgcaatttcaacaaatttgaacgtgatgtcttcccaaccatcagtcaatgactccaaggcgttggtgccattgggtaatggattgtcgtcaaactcaacttttggtgctgaccctttctctgcaactccacgaccagaacagggttcaccttttccccccaacgttccaaacaatctgctcagctctacccctcctgcctcagctgctggacatcatcaccctcctaagccaatgcaggctggtcctgtgcagagtatatcctcgctttctcctcatactagccagttgccacacaatcagccacctccgaggcaacaacaatttaatgctacaccaagtgctccaggaccagtgagttcaaatattcccactggacaaattccttcaagcccaagccagcctcaggcaccatggccgaaaatcactcaagtagatgtcagaaaatacatgattgtatttatcaaggtagacagggatcgtgatgggaaaatcactggtgaagaggcaaggaatctatttttaagttggaggcttccaagagatgtcttaaggaaggtgtgggatttgtccgaccaggataaggatgggatgctatctttcaaggaattttgtattgctgtgtacttaatggagagacatcgagagcaccgtcctcttcctgacacagtaacagatgctatttgggctgagggcaccgcactaccctctactggacagtttgcagaaaatcctagtgcccccgctcctcaagcaagtgccggatatacaagtagaacaatgcaaggaccacatcatgggatgcttccctcatccatgaagccaccatctcggaggcctcttcctttagatgctgacgatactattaagccagagcaacaaaagccaaaggtccctgtcttggaggaacatctagttggccaactaagcaaggaggaacaagatacactggatgcaaagtttaatgaagcttcagtcgctgataagaaagtccaagagttggagaaggagatccttgattctagagagaagaccgagttttatcgcacgaagatgcaggagcttattctttacaaaagtaggtgcgacaataggtttaatgaagtctcagaaagtatgtctgctgataaacgtgaggtccaatctctttctgcaaaatatgatgagagatgcaagaaggttggagatgtggcatcaaagctaacaatggatgaggctactttccgtgagatccaggagaagaagttggaaatttataacgccatagttaagctgcaaaaaggggatgatagcgatgagaagtttcaggagcgggctaataagatacagtcagatcttgaggagcttgtgaaatcattgaatgagcaatgcaagagatatgggttgagagctaagccaactactttagtggagcttccttttggttggcaacctggaattcaagagacagcttatgcatgggatgaagaatgggataattttggagatgaaggattctctataataaaggaactaacagttgaagtggagcctcccgttgtagcaaagagtcagcctactgaggatgttaaagcatcttcaaatggggcatcaacagaaaaagaagacaacaagggtgataaatctgctgctgctgtggagcaggttgtcaaacctgaaacagcaccttcgaatatcaaaccagagtcagcaaaaagtcctccagttagtcctgtcaagaacaaagaggatggtcccgatgaacatgataaaaagcaatctggaacaaatgatgtctcaccacgtgagagtatcagcaaccgtggagcaatggattcccctactcatggagataaaacccatgatggacactcatggggcatggataatgactccctatggaactttgatcataaggagggtgagaatggtgattcagatctcttctttgggccacaaggccttcccccgataagaactggaggttcctcatctggcacgccagttcagaaatccgtgtttgattactctgtccctagcacaccgatgcagaactcagtctttgattattctgtcccaagcacgccgatgcagaagtcactctttgattctgtccctggtacaccggtgcagagatcagttttcgattctgttccgagcacaccaatgcagagatcagtttttgactctgttccgagcacgccgacgcagaaaccattcttcgactcctttccaagcacaccaatgcagagatcactgttcgattctgggccaagcagagcagaatctcctaccgccagcagcatgtatggcaaagagcagaagggattcttcgattcttcagtcccgagtactccaatgtacaactcaagcttcacgccaaggtatagcgaagcaggagacgattcattcgacaccatgtcccaatacagctcatttggcatgcacgagagcaattcctttggacagcgcgacagcttatcgagattcgattctttcagcagcaatgctgacaacggtgggaatgacacttttgcgagcagcagcgaccatgacgggatcggcacgtttgcgaggtttgattcgatgaagagcagtaactacaacagccggggctactcgttcgacgacgaggacccctttgggacagggccgtttaaatcgacagagaccacgagccacagcccgacaaaacatgggacggacacatggagcgcgttttgacaggcaggggctgtatcatatattcaatagaggtcatgcgcttgtgcaccttactgcagatatatacacacgtacaggggcaagacaattttttgttgtgtgcatgggcctctgctccaacacacctggggaaggggaagggatgggacggggatttgcttgtgtgcttgctttgtgtttaattttgtacgtaggctgggaacatgtgtttggtgggatgatgatgatgatgctgctgctgctgcttataaactcaacattctttataccttgtattgtacaagtgcatgtacaagatgtgagtcgacccgtttgggttgagtaactctcgagtgttttttcttccatggtgtagcgttttcctgtttctccagaattttctgagcaatgtacagacagacaaacttttgtgtgaaacacctgttgtccaatactgagacccttccattcgttg

SEQ ID NO: 49155 - DNA, 1954 bp, Zea Mays
cagcccccttgggccctgacaggttggcaacctggaattcaagagacagcttatgcatgggatgaagaatgggataattttggagatgaaggattctctataataaaggaactaacagttgaagtggagcctcccgttgtagcaaagagtcagcctactgaggatgttaaagcatcttcaaatggggcatcaacagaaaaagaagacaacaagggtgataaatctgctgctgctgtggagcaggttgtcaaacctgaaacagcaccttcgaatatcaaaccagagtcagcaaaaagtcctccagttagtcctgtcaagaacaaagaggatggtcccgatgaacatgataaaaagcaatctggaacaaatgatgtctcaccacgtgagagtatcagcaaccgtggagcaatggattcccctactcatggagataaaacccatgatggacactcatggggcatggataatgactccctatggaactttgatcataaggagggtgagaatggtgattcagatctcttctttgggccacaaggccttcccccgataagaactggaggttcctcatctggtaattcagttgtcaaggaacagaagccgttctttgattctgttcctggtaccccagtggagaaatccgtctttgattccatcccaggcacgccatttcagaaatccgtctttgattctatcccaggcacgccagttcagaaatccgtgtttgattactctgtccctagcacaccgatgcagaactcagtctttgattattctgtcccaagcacgccgatgcagaagtcactctttgattctgtccctggtacaccggtgcagagatcagttttcgattctgttccgagcacaccaatgcagagatcagtttttgactctgttccgagcacgccgacgcagaaaccattcttcgactcctttccaagcacaccaatgcagagatcactgttcgattctgggccaagcagagcagaatctcctaccgccagcagcatgtatggcaaagagcagaagggattcttcgattcttcagtcccgagtactccaatgtacaactcaagcttcacgccaaggtatagcgaagcaggagacgattcattcgacaccatgtcccaatacagctcatttggcatgcacgagagcaattcctttggacagcgcgacagcttatcgagattcgattctttcagcagcaatgctgacaacggtgggaatgacacttttgcgaggtttgattctttccgcagcacttcagatcagggtgggggcaacagcttcatgaggtacgattccatgaacagcagcagcgaccatgacgggatcggcacgtttgcgaggtttgattcgatgaagagcagtaactacaacagccggggctactcgttcgacgacgaggacccctttgggacagggccgtttaaatcgacagagaccacgagccacagcccgacaaaacatgggacggacacatggagcgcgttttgacaggcaggggctgtatcatatattcaatagaggtcatgcgcttgtgcaccttactgcagatatatacacacgtacaggggcaagacaattttttgttgtgtgcatgggcctctgctccaacacacctggggaaggggaagggatgggacggggatttgcttgtgtgcttgctttgtgtttaattttgtacgtaggctgggaacatgtgtttggtgggatgatgatgatgatgctgctgctgctgcttataaactcaacattctttataccttgtattgtacaagtgcatgtacaagatgtgagtcgacccgtttgggttgagtaactctcgagtgttttttcttccatggtgtagcgttttcctgtttctccagaattttctgagcaatgtacagacagacaaacttttgtgtgaaacacctgttgtccaatactgagacccttccattcgttg

SEQ ID NO: 49156 - DNA, 3899 bp, Zea Mays
aaaaaatcaacctcgaatatttgagctcctcacggatgtagtaaaacaaactttgatggtatttttctaatcttcaatctagttgttttttgagtaatctaacatggagctacgacaatgaagaaatctataactaagcaactaatcttcaatcttatggaacttttaatggtacagatccaactcttctttgaaagaagggaaataatctgtgcagtgtttaatattacttttattttgccgttcagcccctcgattcgtggtgctcctcctcctcccgcaatgccgcccccttccgcttccgccatcgccacccgcttcgcaacccactggatagctgacgccctcgccgacgacgagtccttcgacttctccgtgctccagggtgaggctccaaaccctaaactcctccgccgttcgcctgaacgctttcggtctctcacctgggtcccctggttaattggctttgttggcggtttgcagatctggtgcgggcctcgtcgaagcccctcgcgggcgccccggaggccacgcgcgagcgggtcgcgctccggtgcctccaggaggcgtcatccgtgatagccgctgggggtgatgccgcggccacggcgggcgtgcttagggttgatggcgcccggtcatgcgaggatgtgctgttgcggcttatcagagaggttgggagttccagagaattggagaaggatttgcttccacctttcagtcaagacatccaggaaactatatgtaccaagaaatctacactaccagaaacttctttccagttgctaaaaggacttgagccatggatcacatctatgaccccacaatcccaaatggagcacaatgacactgaacaatgtgacattgatcagtccctgcgcagcagccatggatgtgtaaatatagagaagcctatgttccctacagacaatgctgaggttcagcaagagactatggcagatgtagtcaatggaagtgaaacgggaaatgtccaaaaggatccacctgcaccaacttctgtttttcaccaaccgtgtatgcacgaaagcaggtcttacatccctccgcaagaagatactatagatgttgttggtctaggcgataggtccttagaaaggagtcctattgtggaggggaacatgtccattggatctgtgcttgcttcagctggctgtgatgcacctttgcagggaagaattactgagcccttttcccagcaggataaacatgatcatactgctacagttgaaccaaaatcttgtaggcaaaaatctccaaatctatctcactgtgccgatggagagggggcagatgatggtggctccagcaatcagtcatctaaggtttccattcatgaaggaccgagtgctcatgccccagtaacttcaggttttgacagaatcagcggtgtcttatcaacagatgcatctgaacctgagcatttgtctgagtgcataccagcacaggatacatccatgatttcacagcttgacagcaggaaagctcatctgagtgctctgcaacaggaaagggttgagaaagtaaaccaaggtccggaagatatctctgcaaatattgggccagtggaaaaggaacatgttcatggggatctgactttgcaatctgctagtgttttactttctattagctgcaatggttctaatcaaggaactaaatctgaaaccaatcttcaaccagggactgctacagaggataggatggcttttgaagagcagaatgcggagaagtctcacttagaactcagtggtaccaacaaggctaatcaagctctgttcgatgatggcagcgtcatgaaaaataatacggttcatggtgggctgactgcgcatactgctccagtgtctcaaagctgcagtgtaaccttacatgataaaacttcagaagccaattgtttttctgagtggaaaaatgaaaagaacggtcaaaaagataattgccatacttctattccaggctcttctcaggatgggggtggagaaagtgcaaagaagacatcaaatgaggtaaactctggggacacttcttcaaaaatatgtgtccattctaaggataaagacattaatgatactcttgagggcttgtctcaacaagatttgtgtataaaatgtggtaaagttggtcagttgcttgaatgcagcagttgttctttagctgctcataatagctgttttggttcatcggtgacatttgaagagaccaacttattctactgcccagtatgcttctataagagagccaccgaagcatataaaaaggcaaagaaaacatatggggaagctaggaagaacgttgctgctttccttggcacaatacaggtcaccaagcaacataatgaacaactaaatggagttcaaccaggaggtgccaacagagaggatcattctgacacatcaaaaaggactcatgaaaatgaagtatataatcttgctcatcaggatgaagagcctcatcagcagatgaagaagcagaaaataaatgctataggtattgattatcgtaaggaggtactcactgagaaggttcctttccagaactctggtcctgcatccattaataaacattcagtgctccagaataacggtaaaacacgagttaaggatccagagaaaaagcagcaagcgggagacgaagaagctcgcaaagaagctggtaatgaaaaatctcatgaaacaggagcttcatctcagagaagatgtgatcctccttcgaatcatgacgttgaggctgaccaggaaggtagtcttacaacttctatccaatctagtggttctgatgaattagaagctaaaggattgcaagagaagaaggcagctgtatcaagtaaatctagaaaaggtatttcaaagcgggatcaacatatgcctacttcaccaagaaaaagaaattctgtacacctgcaaaagcgctattccaatcctcttgcaccacctggaagacgcaaaaaactcttttggacagaagaagaagaagctgttttgagggaagggatggcaaaattcactccacagaataatgcgcaaattccatggattctgatactagaacatggccgtggtgtgtttcacaggacgcgcctgccatctgatttgagggtcaagtggaggagcatgcagaggaagaagtggatctgatgccgttgacatggaacactgacgtggtacttgtacatagcgaatgtgcaagtaggaatggaggagggtttcttctaattacttttgcagcccttaatcctgtagcactgacgtggattggttgtgggattcggtgaacctaggcctcctctaatatgcacgtagatgatggtagagagattggtagattcaaacctacgcgaagaattgccaatagatgactttggctgcttcgttcgttcaaatcgcacatatatgttgctgccgtgactccataccgtgaagaagcttgcccaaagtctgcagttttctaaacccctggtcaaaaaaggcaccgataaaatcatatctccaagttgtcagttgactgcaaaacaaattagattttgtttggatactctagtattgacctcaatccatatatgttgagatccatgtatgttgaggtggattgggttgtaaattagtttaagttgtactccaatttacctcaacatatgtggatttgggtcaatactagagtatctaaactaagttaaggtgcatgtagagataaatacggatggaaaacctccttctgtttacgtttcttgactcggtgtaggtacatcctagtgactttaatagtagcctaaggctctatttgtttgagcttctcgtcatctttttagtgtaaaaagccagaagctaaaacaaagagtttatatagatgatgttatatagaaagctaagaagcttgattttatg

SEQ ID NO: 49157 - DNA, 3724 bp, Zea Mays
ctttgatggtatttttctaatcttcaatctagttgttttttgagtaatctaacatggagctacgacaatgaagaaatctataactaagcaactaatcttcaatcttatggaacttttaatggtacagatccaactcttctttgaaagaagggaaataatctgtgcagtgtttaatattacttttattttgccgttcagcccctcgattcgtggtgctcctcctcctcccgcaatgccgcccccttccgcttccgccatcgccacccgcttcgcaacccactggatagctgacgccctcgccgacgacgagtccttcgacttctccgtgctccaggcccctcgcgggcgccccggaggccacgcgcgagcgggtcgcgctccggtgcctccaggaggcgtcatccgtgatagccgctgggggtgatgccgcggccacggcgggcgtgcttagggttgatggcgcccggtcatgcgaggatgtgctgttgcggcttatcagagaggttgggagttccagagaattggagaaggatttgcttccacctttcagtcaagacatccaggaaactatatgtaccaagaaatctacactaccagaaacttctttccagttgctaaaaggacttgagccatggatcacatctatgaccccacaatcccaaatggagcacaatgacactgaacaatgtgacattgatcagtccctgcgcagcagccatggatgtgtaaatatagagaagcctatgttccctacagacaatgctgaggttcagcaagagactatggcagatgtagtcaatggaagtgaaacgggaaatgtccaaaaggatccacctgcaccaacttctgtttttcaccaaccgtgtatgcacgaaagcaggtcttacatccctccgcaagaagatactatagatgttgttggtctaggcgataggtccttagaaaggagtcctattgtggaggggaacatgtccattggatctgtgcttgcttcagctggctgtgatgcacctttgcagggaagaattactgagcccttttcccagcaggataaacatgatcatactgctacagttgaaccaaaatcttgtaggcaaaaatctccaaatctatctcactgtgccgatggagagggggcagatgatggtggctccagcaatcagtcatctaaggtttccattcatgaaggaccgagtgctcatgccccagtaacttcaggttttgacagaatcagcggtgtcttatcaacagatgcatctgaacctgagcatttgtctgagtgcataccagcacaggatacatccatgatttcacagcttgacagcaggaaagctcatctgagtgctctgcaacaggaaagggttgagaaagtaaaccaaggtccggaagatatctctgcaaatattgggccagtggaaaaggaacatgttcatggggatctgactttgcaatctgctagtgttttactttctattagctgcaatggttctaatcaaggaactaaatctgaaaccaatcttcaaccagggactgctacagaggataggatggcttttgaagagcagaatgcggagaagtctcacttagaactcagtggtaccaacaaggctaatcaagctctgttcgatgatggcagcgtcatgaaaaataatacggttcatggtgggctgactgcgcatactgctccagtgtctcaaagctgcagtgtaaccttacatgataaaacttcagaagccaattgtttttctgagtggaaaaatgaaaagaacggtcaaaaagataattgccatacttctattccaggctcttctcaggatgggggtggagaaagtgcaaagaagacatcaaatgaggtaaactctggggacacttcttcaaaaatatgtgtccattctaaggataaagacattaatgatactcttgagggcttgtctcaacaagatttgtgtataaaatgtggtaaagttggtcagttgcttgaatgcagcagttgttctttagctgctcataatagctgttttggttcatcggtgacatttgaagagaccaacttattctactgcccagtatgcttctataagagagccaccgaagcatataaaaaggcaaagaaaacatatggggaagctaggaagaacgttgctgctttccttggcacaatacaggtcaccaagcaacataatgaacaactaaatggagttcaaccaggaggtgccaacagagaggatcattctgacacatcaaaaaggactcatgaaaatgaagtatataatcttgctcatcaggatgaagagcctcatcagcagatgaagaagcagaaaataaatgctataggtattgattatcgtaaggaggtactcactgagaaggttcctttccagaactctggtcctgcatccattaataaacattcagtgctccagaataacggtaaaacacgagttaaggatccagagaaaaagcagcaagcgggagacgaagaagctcgcaaagaagctggtaatgaaaaatctcatgaaacaggagcttcatctcagagaagatgtgatcctccttcgaatcatgacgttgaggctgaccaggaaggtagtcttacaacttctatccaatctagtggttctgatgaattagaagctaaaggattgcaagagaagaaggcagctgtatcaagtaaatctagaaaaggtatttcaaagcgggatcaacatatgcctacttcaccaagaaaaagaaattctgtacacctgcaaaagcgctattccaatcctcttgcaccacctggaagacgcaaaaaactcttttggacagaagaagaagaagctgttttgagggaagggatggcaaaattcactccacagaataatgcgcaaattccatggattctgatactagaacatggccgtggtgtgtttcacaggacgcgcctgccatctgatttgagggtcaagtggaggagcatgcagaggaagaaatctgatgccgttgacatggaacactgacgtggtacttgtacatagcgaatgtgcaagtaggaatggaggagggtttcttctaattacttttgcagcccttaatcctgtagcactgacgtggattggttgtgggattcggtgaacctaggcctcctctaatatgcacgtagatgatggtagagagattggtagattcaaacctacgcgaagaattgccaatagatgactttggctgcttcgttcgttcaaatcgcacatatatgttgctgccgtgactccataccgtgaagaagcttgcccaaagtctgcagttttctaaacccctggtcaaaaaaggcaccgataaaatcatatctccaagttgtcagttgactgcaaaacaaattagattttgtttggatactctagtattgacctcaatccatatatgttgagatccatgtatgttgaggtggattgggttgtaaattagtttaagttgtactccaatttacctcaacatatgtggatttgggtcaatactagagtatctaaactaagttaaggtgcatgtagagataaatacggatggaaaacctccttctgtttacgtttcttgactcggtgtaggtacatcctagtgactttaatagtagcctaaggctctatttgtttgagcttctcgtcatctttttagtgtaaaaagccagaagctaaaacaaagagtttatatagatgatgttatatagaaagctaagaagcttgattttatg

SEQ ID NO: 49158 - DNA, 3546 bp, Zea Mays
gctcctcctcctcccgcaatgccgcccccttccgcttccgccatcgccacccgcttcgcaacccactggatagctgacgccctcgccgacgacgagtccttcgacttctccgtgctccaggatctggtgcgggcctcgtcgaagcccctcgcgggcgccccggaggccacgcgcgagcgggtcgcgctccggtgcctccaggaggcgtcatccgtgatagccgctgggggtgatgccgcggccacggcgggcgtgcttagggttgatggcgcccggtcatgcgaggatgtgctgttgcggcttatcagagaggttgggagttccagagaattggagaaggatttgcttccacctttcagtcaagacatccaggaaactatatgtaccaagaaatctacactaccagaaacttctttccagttgctaaaaggacttgagccatggatcacatctatgaccccacaatcccaaatggagcacaatgacactgaacaatgtgacattgatcagtccctgcgcagcagccatggatgtgtaaatatagagaagcctatgttccctacagacaatgctgaggttcagcaagagactatggcagatgtagtcaatggaagtgaaacgggaaatgtccaaaaggatccacctgcaccaacttctgtttttcaccaaccgtgtatgcacgaaagcaggtcttacatccctccgcaagaagatactatagatgttgttggtctaggcgataggtccttagaaaggagtcctattgtggaggggaacatgtccattggatctgtgcttgcttcagctggctgtgatgcacctttgcagggaagaattactgagcccttttcccagcaggataaacatgatcatactgctacagttgaaccaaaatcttgtaggcaaaaatctccaaatctatctcactgtgccgatggagagggggcagatgatggtggctccagcaatcagtcatctaaggtttccattcatgaaggaccgagtgctcatgccccagtaacttcaggttttgacagaatcagcggtgtcttatcaacagatgcatctgaacctgagcatttgtctgagtgcataccagcacaggatacatccatgatttcacagcttgacagcaggaaagctcatctgagtgctctgcaacaggaaagggttgagaaagtaaaccaaggtccggaagatatctctgcaaatattgggccagtggaaaaggaacatgttcatggggatctgactttgcaatctgctagtgttttactttctattagctgcaatggttctaatcaaggaactaaatctgaaaccaatcttcaaccagggactgctacagaggataggatggcttttgaagagcagaatgcggagaagtctcacttagaactcagtggtaccaacaaggctaatcaagctctgttcgatgatggcagcgtcatgaaaaataatacggttcatggtgggctgactgcgcatactgctccagtgtctcaaagctgcagtgtaaccttacatgataaaacttcagaagccaattgtttttctgagtggaaaaatgaaaagaacggtcaaaaagataattgccatacttctattccaggctcttctcaggatgggggtggagaaagtgcaaagaagacatcaaatgaggtaaactctggggacacttcttcaaaaatatgtgtccattctaaggataaagacattaatgatactcttgagggcttgtctcaacaagatttgtgtataaaatgtggtaaagttggtcagttgcttgaatgcagcagttgttctttagctgctcataatagctgttttggttcatcggtgacatttgaagagaccaacttattctactgcccagtatgcttctataagagagccaccgaagcatataaaaaggcaaagaaaacatatggggaagctaggaagaacgttgctgctttccttggcacaatacaggtcaccaagcaacataatgaacaactaaatggagttcaaccaggaggtgccaacagagaggatcattctgacacatcaaaaaggactcatgaaaatgaagtatataatcttgctcatcaggatgaagagcctcatcagcagatgaagaagcagaaaataaatgctataggtattgattatcgtaaggaggtactcactgagaaggttcctttccagaactctggtcctgcatccattaataaacattcagtgctccagaataacggtaaaacacgagttaaggatccagagaaaaagcagcaagcgggagacgaagaagctcgcaaagaagctggtaatgaaaaatctcatgaaacaggagcttcatctcagagaagatgtgatcctccttcgaatcatgacgttgaggctgaccaggaaggtagtcttacaacttctatccaatctagtggttctgatgaattagaagctaaaggattgcaagagaagaaggcagctgtatcaagtaaatctagaaaaggtatttcaaagcgggatcaacatatgcctacttcaccaagaaaaagaaattctgtacacctgcaaaagcgctattccaatcctcttgcaccacctggaagacgcaaaaaactcttttggacagaagaagaagaagctgttttgagggacgcgcctgccatctgatttgagggtcaagtggaggagcatgcagaggaagaagtgggcaggctactgatcttacacgcccccgcgcacgtagctgttgtgtctcatgctaaattactaaccataccttcatttctctgtgtccatctgcagatctgatgccgttgacatggaacactgacgtggtacttgtacatagcgaatgtgcaagtaggaatggaggagggtttcttctaattacttttgcagcccttaatcctgtagcactgacgtggattggttgtgggattcggtgaacctaggcctcctctaatatgcacgtagatgatggtagagagattggtagattcaaacctacgcgaagaattgccaatagatgactttggctgcttcgttcgttcaaatcgcacatatatgttgctgccgtgactccataccgtgaagaagcttgcccaaagtctgcagttttctaaacccctggtcaaaaaaggcaccgataaaatcatatctccaagttgtcagttgactgcaaaacaaattagattttgtttggatactctagtattgacctcaatccatatatgttgagatccatgtatgttgaggtggattgggttgtaaattagtttaagttgtactccaatttacctcaacatatgtggatttgggtcaatactagagtatctaaactaagttaaggtgcatgtagagataaatacggatggaaaacctccttctgtttacgtttcttgactcggtgtaggtacatcctagtgactttaatagtagcctaaggctctatttgtttgagcttctcgtcatctttttagtgtaaaaagccagaagctaaaacaaagagtttatatagatgatgttatatagaaagctaagaagcttgattttatg

SEQ ID NO: 49159 - DNA, 3474 bp, Zea Mays
cccgcaatgccgcccccttccgcttccgccatcgccacccgcttcgcaacccactggatagctgacgccctcgccgacgacgagtccttcgacttctccgtgctccagggtgaggctccaaaccctaaactcctccgccgttcgcctgaacgctttcggtctctcacctggcccctcgcgggcgccccggaggccacgcgcgagcgggtcgcgctccggtgcctccaggaggcgtcatccgtgatagccgctgggggtgatgccgcggccacggcgggcgtgcttagggttgatggcgcccggtcatgcgaggatgtgctgttgcggcttatcagagaggttgggagttccagagaattggagaaggatttgcttccacctttcagtcaagacatccaggaaactatatgtaccaagaaatctacactaccagaaacttctttccagttgctaaaaggacttgagccatggatcacatctatgaccccacaatcccaaatggagcacaatgacactgaacaatgtgacattgatcagtccctgcgcagcagccatggatgtgtaaatatagagaagcctatgttccctacagacaatgctgaggttcagcaagagactatggcagatgtagtcaatggaagtgaaacgggaaatgtccaaaaggatccacctgcaccaacttctgtttttcaccaaccgtgtatgcacgaaagcaggtcttacatccctccgcaagaagatactatagatgttgttggtctaggcgataggtccttagaaaggagtcctattgtggaggggaacatgtccattggatctgtgcttgcttcagctggctgtgatgcacctttgcagggaagaattactgagcccttttcccagcaggataaacatgatcatactgctacagttgaaccaaaatcttgtaggcaaaaatctccaaatctatctcactgtgccgatggagagggggcagatgatggtggctccagcaatcagtcatctaaggtttccattcatgaaggaccgagtgctcatgccccagtaacttcaggttttgacagaatcagcggtgtcttatcaacagatgcatctgaacctgagcatttgtctgagtgcataccagcacaggatacatccatgatttcacagcttgacagcaggaaagctcatctgagtgctctgcaacaggaaagggttgagaaagtaaaccaaggtccggaagatatctctgcaaatattgggccagtggaaaaggaacatgttcatggggatctgactttgcaatctgctagtgttttactttctattagctgcaatggttctaatcaaggaactaaatctgaaaccaatcttcaaccagggactgctacagaggataggatggcttttgaagagcagaatgcggagaagtctcacttagaactcagtggtaccaacaaggctaatcaagctctgttcgatgatggcagcgtcatgaaaaataatacggttcatggtgggctgactgcgcatactgctccagtgtctcaaagctgcagtgtaaccttacatgataaaacttcagaagccaattgtttttctgagtggaaaaatgaaaagaacggtcaaaaagataattgccatacttctattccaggctcttctcaggatgggggtggagaaagtgcaaagaagacatcaaatgaggtaaactctggggacacttcttcaaaaatatgtgtccattctaaggataaagacattaatgatactcttgagggcttgtctcaacaagatttgtgtataaaatgtggtaaagttggtcagttgcttgaatgcagcagttgttctttagctgctcataatagctgttttggttcatcggtgacatttgaagagaccaacttattctactgcccagtatgcttctataagagagccaccgaagcatataaaaaggcaaagaaaacatatggggaagctaggaagaacgttgctgctttccttggcacaatacaggtcaccaagcaacataatgaacaactaaatggagttcaaccaggaggtgccaacagagaggatcattctgacacatcaaaaaggactcatgaaaatgaagtatataatcttgctcatcaggatgaagagcctcatcagcagatgaagaagcagaaaataaatgctataggtattgattatcgtaaggaggtactcactgagaaggttcctttccagaactctggtcctgcatccattaataaacattcagtgctccagaataacggtaaaacacgagttaaggatccagagaaaaagcagcaagcgggagacgaagaagctcgcaaagaagctggtaatgaaaaatctcatgaaacaggagcttcatctcagagaagatgtgatcctccttcgaatcatgacgttgaggctgaccaggaaggtagtcttacaacttctatccaatctagtggttctgatgaattagaagctaaaggattgcaagagaagaaggcagctgtatcaagtaaatctagaaaaggtatttcaaagcgggatcaacatatgcctacttcaccaagaaaaagaaattctgtacacctgcaaaagcgctattccaatcctcttgcaccacctggaagacgcaaaaaactcttttggacagaagaagaagaagctgttttgagggacgcgcctgccatctgatttgagggtcaagtggaggagcatgcagaggaagaaatctgatgccgttgacatggaacactgacgtggtacttgtacatagcgaatgtgcaagtaggaatggaggagggtttcttctaattacttttgcagcccttaatcctgtagcactgacgtggattggttgtgggattcggtgaacctaggcctcctctaatatgcacgtagatgatggtagagagattggtagattcaaacctacgcgaagaattgccaatagatgactttggctgcttcgttcgttcaaatcgcacatatatgttgctgccgtgactccataccgtgaagaagcttgcccaaagtctgcagttttctaaacccctggtcaaaaaaggcaccgataaaatcatatctccaagttgtcagttgactgcaaaacaaattagattttgtttggatactctagtattgacctcaatccatatatgttgagatccatgtatgttgaggtggattgggttgtaaattagtttaagttgtactccaatttacctcaacatatgtggatttgggtcaatactagagtatctaaactaagttaaggtgcatgtagagataaatacggatggaaaacctccttctgtttacgtttcttgactcggtgtaggtacatcctagtgactttaatagtagcctaaggctctatttgtttgagcttctcgtcatctttttagtgtaaaaagccagaagctaaaacaaagagtttatatagatgatgttatatagaaagctaagaagcttgattttatg

SEQ ID NO: 49160 - DNA, 3649 bp, Zea Mays
atgccgcccccttccgcttccgccatcgccacccgcttcgcaacccactggatagctgacgccctcgccgacgacgagtccttcgacttctccgtgctccagggtgaggctccaaaccctaaactcctccgccgttcgcctgaacgctttcggtctctcacctggcccctcgcgggcgccccggaggccacgcgcgagcgggtcgcgctccggtgcctccaggaggcgtcatccgtgatagccgctgggggtgatgccgcggccacggcgggcgtgcttagggttgatggcgcccggtcatgcgaggatgtgctgttgcggcttatcagagaggttgggagttccagagaattggagaaggatttgcttccacctttcagtcaagacatccaggaaactatatgtaccaagaaatctacactaccagaaacttctttccagttgctaaaaggacttgagccatggatcacatctatgaccccacaatcccaaatggagcacaatgacactgaacaatgtgacattgatcagtccctgcgcagcagccatggatgtgtaaatatagagaagcctatgttccctacagacaatgctgaggttcagcaagagactatggcagatgtagtcaatggaagtgaaacgggaaatgtccaaaaggatccacctgcaccaacttctgtttttcaccaaccgtgtatgcacgaaagcaggtcttacatccctccgcaagaagatactatagatgttgttggtctaggcgataggtccttagaaaggagtcctattgtggaggggaacatgtccattggatctgtgcttgcttcagctggctgtgatgcacctttgcagggaagaattactgagcccttttcccagcaggataaacatgatcatactgctacagttgaaccaaaatcttgtaggcaaaaatctccaaatctatctcactgtgccgatggagagggggcagatgatggtggctccagcaatcagtcatctaaggtttccattcatgaaggaccgagtgctcatgccccagtaacttcaggttttgacagaatcagcggtgtcttatcaacagatgcatctgaacctgagcatttgtctgagtgcataccagcacaggatacatccatgatttcacagcttgacagcaggaaagctcatctgagtgctctgcaacaggaaagggttgagaaagtaaaccaaggtccggaagatatctctgcaaatattgggccagtggaaaaggaacatgttcatggggatctgactttgcaatctgctagtgttttactttctattagctgcaatggttctaatcaaggaactaaatctgaaaccaatcttcaaccagggactgctacagaggataggatggcttttgaagagcagaatgcggagaagtctcacttagaactcagtggtaccaacaaggctaatcaagctctgttcgatgatggcagcgtcatgaaaaataatacggttcatggtgggctgactgcgcatactgctccagtgtctcaaagctgcagtgtaaccttacatgataaaacttcagaagccaattgtttttctgagtggaaaaatgaaaagaacggtcaaaaagataattgccatacttctattccaggctcttctcaggatgggggtggagaaagtgcaaagaagacatcaaatgaggtaaactctggggacacttcttcaaaaatatgtgtccattctaaggataaagacattaatgatactcttgagggcttgtctcaacaagatttgtgtataaaatgtggtaaagttggtcagttgcttgaatgcagcagttgttctttagctgctcataatagctgttttggttcatcggtgacatttgaagagaccaacttattctactgcccagtatgcttctataagagagccaccgaagcatataaaaaggcaaagaaaacatatggggaagctaggaagaacgttgctgctttccttggcacaatacaggtcaccaagcaacataatgaacaactaaatggagttcaaccaggaggtgccaacagagaggatcattctgacacatcaaaaaggactcatgaaaatgaagtatataatcttgctcatcaggatgaagagcctcatcagcagatgaagaagcagaaaataaatgctataggtattgattatcgtaaggaggtactcactgagaaggttcctttccagaactctggtcctgcatccattaataaacattcagtgctccagaataacggtaaaacacgagttaaggatccagagaaaaagcagcaagcgggagacgaagaagctcgcaaagaagctggtaatgaaaaatctcatgaaacaggagcttcatctcagagaagatgtgatcctccttcgaatcatgacgttgaggctgaccaggaaggtagtcttacaacttctatccaatctagtggttctgatgaattagaagctaaaggattgcaagagaagaaggcagctgtatcaagtaaatctagaaaaggtatttcaaagcgggatcaacatatgcctacttcaccaagaaaaagaaattctgtacacctgcaaaagcgctattccaatcctcttgcaccacctggaagacgcaaaaaactcttttggacagaagaagaagaagctgttttgaggggatggcaaaattcactccacagaataatgcgcaaattccatggattctgatactagaacatggccgtggtgtgtttcacaggacgcgcctgccatctgatttgagggtcaagtggaggagcatgcagaggaagaagtgggcaggctactgatcttacacgcccccgcgcacgtagctgttgtgtctcatgctaaattactaaccataccttcatttctctgtgtccatctgcagatctgatgccgttgacatggaacactgacgtggtacttgtacatagcgaatgtgcaagtaggaatggaggagggtttcttctaattacttttgcagcccttaatcctgtagcactgacgtggattggttgtgggattcggtgaacctaggcctcctctaatatgcacgtagatgatggtagagagattggtagattcaaacctacgcgaagaattgccaatagatgactttggctgcttcgttcgttcaaatcgcacatatatgttgctgccgtgactccataccgtgaagaagcttgcccaaagtctgcagttttctaaacccctggtcaaaaaaggcaccgataaaatcatatctccaagttgtcagttgactgcaaaacaaattagattttgtttggatactctagtattgacctcaatccatatatgttgagatccatgtatgttgaggtggattgggttgtaaattagtttaagttgtactccaatttacctcaacatatgtggatttgggtcaatactagagtatctaaactaagttaaggtgcatgtagagataaatacggatggaaaacctccttctgtttacgtttcttgactcggtgtaggtacatcctagtgactttaatagtagcctaaggctctatttgtttgagcttctcgtcatctttttagtgtaaaaagccagaagctaaaacaaagagtttatatagatgatgttatatagaaagctaagaagcttgattttatg

SEQ ID NO: 49161 - DNA, 2251 bp, Zea Mays
ccgaacatgagctgacaaggtgatccagaagatggtgttggatcccaagggcctcaagatcaatagaagactccctgtcactgctgctaccaatcagctccgtaaaataattgagcagcacctccgctttatcatcatgactagtaaccaaggtcgctaccgtcttttgtaataaatggccgtaacctcatttgaggccaaggtcggatgatttttccattatctaaaatatatctcatgttagctgtgaacctcccaaaatgggttatcaagggacaggagaaggctcaaggaggtaactgtcttgtgtcttgggaaaatgtgcataggcctctggaatatggtggcctaggtattttgaatcttgagaagctgggatgggctctaaaaatcagatggctctgggctcaaaaaactgaccggcctcagccttgggctggtttccctattgagatcccccgaaatgttaaggctcgtttcaactcagtagacagtagttacctcaattgttggcaacggtgagaaaattctattctggaagaacaggtggctgaatgaaactgcattgctcattttgctccccatctgattcagattatccctaaaagagtggctaacaggagaacagtagcagcagctttactcctctgttccatgagtaatatcggatccttttactcctctgtaacctttttgtttttccttttcttttgtttctttttctgttttgaatatggatgtaagtcctgtttttctctctctaatataaagatgtgcagctctcctgcgcgtactagaaaaaaaactttaaataatcgtcaatgggtggctgacattcgtggggtactaacagtacaggtgctagaagaatatgtccaggtttgggaccaagtgaaaggaacaatcctacatcatgatttgactgatacatataagtggaggttatctcagactggcgattacagtagcaagtcagcctacgctgctttcttcaatggatccatcaagtttgcaccttggaagcggatatggaagagttgggctcccctccgttgcaaactcttcatttggttggtgttcaaaaatcgctgctggatagcggataggctagctaaaagagagctatctcatcctgaggcctgccctctttgtgatcagggcgaggaaaccatccaccaccttctggttagctgtgttttcactagacagttctggtcgcatattttccaggctctgaaactaccagatttggctcctacattgattgagtctagcttccccaattggtggagaaaaatgtctagacttgtgccaaaagaaagacaaaagggtctgaattcgttaatcatcttgacagcctgggagacatggaaacacaggaattcatgcgtctttgaattcctgcattcctgacctccttacacagattgggggggatgcaaaaagtggggtgggctggagcttcaaagcttctggacttcattgcctgggccctgtccaggaattgatgactctctacagtgcctttctggaggtttatcccggattttttgtgctccctgttggtcgtgcagttagatttgcagcaggtctttttcttcagagtttgttgctggtctagtttcaggcttttctgtctgttttatctaatttttcaggttggtttgtaagggtgtgtacagttgttgtgttctctgtccggccatgctggacaattctatttctactcttcttaatgaaatgacatgcagatctctggcatcgttcgagaaaaaaaaagtaatgtggcctgaacactttgcatcaccatgttacattactaacacctacagttattgggtgaatggcaatcattaaaaaagttcactttagtttcatcataggtcaaacttcttgagcaggtttttcgaaaaaatatactaaaatctagaagttcaaataaatgcattatcaagagtttaatgaaacaataatttgatatcacagatgttggtgcatttatctataaattcagttgaagttataaaagtttgacttaggaaaaaaggtaaagagaactataaattgaaatagagggagtataaaaataaagagtggacttggtgtagtaggtaactattgattgagcaaatagattgcaagcaaatattgaaattaactattgattgatccattgctaactactaacaattcccagtctagattgttctaacccaataagcatactaagtaggttgcaagcaaaagcaac

SEQ ID NO: 49162 - DNA, 1648 bp, Zea Mays
ctttcccatctcccgcccaagatgaccaaaattcccctcctaccttatcctctcggctgcccaccaccgcagacaagtccagtcctctccctccccttaatctagcgccgccactcacgcccaccacgccgctggtgaacggatccgtccatcccgtacaccgcccaaccgctgttccagtacccgcctcgtcgagttgagctgagtttagggcctgcgggagctgagccggtggcccatgcttcgcgaagggtagggttgtctgtctagctagctgctgcttggtctgatgagctcagttccggcgtcccgcctcggcttccccgcacgcttgctccgtcggctgcccagaacccagcttgcccgctccggcgcttctcttcgcttcttcgggaaagggtggagctttgaggtggtgcgggtgctcagccgaggactccgggcgatgacgcccgcagtggcgcgcgtttgtcgcgacagtcctgggttcggatagcgagttcctcgagcggatttggctgctgctgcatcctgcgtgggaaggggaggcggcggcagcaacagaggaaggggaggggttgctctgaagcggagggggagcgggctgacattgctgctgggagcatggcgagcttctaaggacgctcagctcccgtagcccagccattctcatcgcagaggagcaaagatatatggtcttttgtgctttctcttcgagtccgtgtgctatttgacaatgcaaaatgggcatatccttgtggattctcggaagaaaagcagaaagttcgaaggcagaaaactacttcatggctaagagagcaagtattacagcttggcccaacgtttattaagctcgggcagtgatcctccactagatctgatttatttcctagagaatttgtggacgagcttgctactgaaatgtaaagttaccatgtgctcctgaaatgtaaagttaccatgtgctccaattacttctgtgctaaatgagaggactaagtacaacaacatggagccggatgctgttgatttctttggggaatgtatgaatagtccccgaaatggtcgtactccgcttgcaaatgagatatatgagcaaatggttgcagagaaggaaagagagctagaagaaggagaagcacaaaagtcaccctccaagctcaacaggccacacttgaagaaaaccaaagtttgctgcgccagacccaagaggaagtgaaggggttgcataccaagtttgaagagaccaatgcactgctacgagctgtcctgaaacttcagaaagattgaggtagggatgcataccaagtctgaggatgatgcctttgcttaaggtttttctaccttgctagaacatattttgtggttagaactttgtcagaactacgtgcaatctgtttgaatgcttcgaacctttgtggtggaacctttgtatgtttgaacctctgttgtggaagaactagtgtgctggaattgtgtatgacttgtgatgagaatgttgtgtatgatggcttttctgtgtattatgattctgtgagctatcatgagagcttagtgtgtcgtcactgtatggtcattgtatgtgggtgccatattaaactaaacaaaacaaagctgtcacattatctcaacattaggtgacgcgttg

SEQ ID NO: 49163 - DNA, 1931 bp, Zea Mays
cccatctcccgcccaagatgaccaaaattcccctcctaccttatcctctcggctgcccaccaccgcagacaagtccagtcctctccctccccttaatctagcgccgccactcacgcccaccacgccgctggtgaacggatccgtccatcccgtacaccgcccaaccgctgttccagtacccgcctcgtcgagttgagctgagtttagggcctgcgggagctgagccggtggcccatgcttcgcgaagggtagggttgtctgtctagctagctgctgcttggtctgatgagctcagttccggcgtcccgcctcggcttccccgcacgcttgctccgtcggctgcccagaacccagcttgcccgctccggcgcttctcttcgcttcttcgggaaagggtggagctttgaggtggtgcgggtgctcagccgaggactccgggcgatgacgcccgcagtggcgcgcgtttgtcgcgacagtcctgggttcggatagcgagttcctcgagcggatttggctgctgctgcatcctgcgtgggaaggggaggcggcggcagcaacagaggaaggggaggggttgctctgaagcggagggggagcgggctgacattgctgctgggagcatggcgagcttctaaggacgctcagctcccgtagcccagccattctcatcgcagaggagcaaagatatatggtcttttgtgctttctcttcgagtccgtgtgctatttgacaatgcaaaatgggcatatccttgtggattctcggaagaaaagcaggtatgtgtttaagatatagataaaacctgagtcatgttctttcaagaaaaaaatattgagtctccaacattgtgattccaaagaagtcattataggaaattttctgtgctaagtagccacctccagttccaaatgagtgttctatctttaggtggagttaagtctgttaatctgtttgttgttatgaatggaagcatgatgatttatatcacttggggctgcaaagagaaaggattcactttctactatacatgtgagtgggctaaaaggtggcttacatgttgcagaaagttcgaaggcagaaaactacttcatggctaagagagcaagtattacagcttggcccaacgtttattaagctcgggcagtgatcctccactagatctgatttatttcctagagaatttgtggacgagcttgctactgaaatgtaaagttaccatgtgctcctgaaatgtaaagttaccatgtgctccaattacttctgtgctaaatgagaggactaagtacaacaacatggagccggatgctgttgatttctttggggaatgtatgaatagtccccgaaatggtcgtactccgcttgcaaatgagatatatgagcaaatggttgcagagaaggaaagagagctagaagaaggagaagcacaaaagtcaccctccaagctcaacaggccacacttgaagaaaaccaaagtttgctgcgccagacccaagaggaagtgaaggggttgcataccaagtttgaagagaccaatgcactgctacgagctgtcctgaaacttcagaaagattgaggtagggatgcataccaagtctgaggatgatgcctttgcttaaggtttttctaccttgctagaacatattttgtggttagaactttgtcagaactacgtgcaatctgtttgaatgcttcgaacctttgtggtggaacctttgtatgtttgaacctctgttgtggaagaactagtgtgctggaattgtgtatgacttgtgatgagaatgttgtgtatgatggcttttctgtgtattatgattctgtgagctatcatgagagcttagtgtgtcgtcactgtatggtcattgtatgtgggtgccatattaaactaaacaaaacaaagctgtcacattatctcaacattaggtgacgcgttg

SEQ ID NO: 49164 - DNA, 2164 bp, Zea Mays
cctctcggctgcccaccaccgcagacaagtccagtcctctccctccccttaatctagcgccgccactcacgcccaccacgccgctggtgaacggatccgtccatcccgtacaccgcccaaccgctgttccagtacccgcctcgtcgagttgagctgagtttagggcctgcgggagctgagccggtggcccatgcttcgcgaagggtagggttgtctgtctagctagctgctgcttggtctgatgagctcagttccggcgtcccgcctcggcttccccgcacgcttgctccgtcggctgcccagaacccagcttgcccgctccggcgcttctcttcgcttcttcgggaaagggtggagctttgaggtggtgcgggtgctcagccgaggactccgggcgatgacgcccgcagtggcgcgcgtttgtcgcgacagtcctgggttcggatagcgagttcctcgagcggatttggctgctgctgcatcctgcgtgggaaggggaggcggcggcagcaacagaggaaggggaggggttgctctgaagcggagggggagcgggctgacattgctgctgggagcatggcgagcttctaaggacgctcagctcccgtagcccagccattctcatcgcagaggagcaaagatatatggtcttttgtgctttctcttcgagtccgtgtgctatttgacaatgcaaaatgggcatatccttgtggattctcggaagaaaagcaggtatgtgtttaagatatagataaaacctgagtcatgttctttcaagaaaaaaatattgagtctccaacattgtgattccaaagaagtcattataggaaattttctgtgctaagtagccacctccagttccaaatgagtgttctatctttaggtggagttaagtctgttaatctgtttgttgttatgaatggaagcatgatgatttatatcacttggggctgcaaagagaaaggattcactttctactatacatgtgagtgggctaaaaggtggcttacatgttgcagaaagttcgaaggcagaaaactacttcatggctaagagagcaagtattacagcttggcccaacgtttattaagctcgggcagtgatcctccactagatctgatttatttcctagagaatttgtggacgagcttgctactgaaatgtaaagttaccatgtgctcctgaaatgtaaagttaccatgtgctccaattacttctgtgctaaatgaggtataatcaataggtgcttatgctccaattcttttatggtgaccatctaaaatagaaaacagcatgacaattgctatgtcatcaaacatgatcatcatcaatactagggtttctttaggccatgttattagtcttgacctgtctaggcagcattgatgcatgttcatgtgttctttttcttaaactataagtcattatttgactatgttgtattgttgttggcatgtaccaatatttcatggcaaatcttatatcccaagttttgtatatgccgcagaggactaagtacaacaacatggagccggatgctgttgatttctttggggaatgtatgaatagtccccgaaatggtcgtactccgcttgcaaatgagatatatgagcaaatggttgcagagaaggaaagagagctagaagaaggagaagcacaaaagtcaccctccaagctcaacaggccacacttgaagaaaaccaaagtttgctgcgccagacccaagaggaagtgaaggggttgcataccaagtttgaagagaccaatgcactgctacgagctgtcctgaaacttcagaaagattgaggtagggatgcataccaagtctgaggatgatgcctttgcttaaggtttttctaccttgctagaacatattttgtggttagaactttgtcagaactacgtgcaatctgtttgaatgcttcgaacctttgtggtggaacctttgtatgtttgaacctctgttgtggaagaactagtgtgctggaattgtgtatgacttgtgatgagaatgttgtgtatgatggcttttctgtgtattatgattctgtgagctatcatgagagcttagtgtgtcgtcactgtatggtcattgtatgtgggtgccatattaaactaaacaaaacaaagctgtcacattatctcaacattaggtgacgcgttg

SEQ ID NO: 49165 - DNA, 1877 bp, Zea Mays
cctctcggctgcccaccaccgcagacaagtccagtcctctccctccccttaatctagcgccgccactcacgcccaccacgccgctggtgaacggatccgtccatcccgtacaccgcccaaccgctgttccagtacccgcctcgtcgagttgagctgagtttagggcctgcgggagctgagccggtggcccatgcttcgcgaagggtagggttgtctgtctagctagctgctgcttggtctgatgagctcagttccggcgtcccgcctcggcttccccgcacgcttgctccgtcggctgcccagaacccagcttgcccgctccggcgcttctcttcgcttcttcgggaaagggtggagctttgaggtggtgcgggtgctcagccgaggactccgggcgatgacgcccgcagtggcgcgcgtttgtcgcgacagtcctgggttcggatagcgagttcctcgagcggatttggctgctgctgcatcctgcgtgggaaggggaggcggcggcagcaacagaggaaggggaggggttgctctgaagcggagggggagcgggctgacattgctgctgggagcatggcgagcttctaaggacgctcagctcccgtagcccagccattctcatcgcagaggagcaaagatatatggtcttttgtgctttctcttcgagtccgtgtgctatttgacaatgcaaaatgggcatatccttgtggattctcggaagaaaagcagaaagttcgaaggcagaaaactacttcatggctaagagagcaagtattacagcttggcccaacgtttattaagctcgggcagtgatcctccactagatctgatttatttcctagagaatttgtggacgagcttgctactgaaatgtaaagttaccatgtgctcctgaaatgtaaagttaccatgtgctccaattacttctgtgctaaatgaggtataatcaataggtgcttatgctccaattcttttatggtgaccatctaaaatagaaaacagcatgacaattgctatgtcatcaaacatgatcatcatcaatactagggtttctttaggccatgttattagtcttgacctgtctaggcagcattgatgcatgttcatgtgttctttttcttaaactataagtcattatttgactatgttgtattgttgttggcatgtaccaatatttcatggcaaatcttatatcccaagttttgtatatgccgcagaggactaagtacaacaacatggagccggatgctgttgatttctttggggaatgtatgaatagtccccgaaatggtcgtactccgcttgcaaatgagatatatgagcaaatggttgcagagaaggaaagagagctagaagaaggagaagcacaaaagtcaccctccaagctcaacaggccacacttgaagaaaaccaaagtttgctgcgccagacccaagaggaagtgaaggggttgcataccaagtttgaagagaccaatgcactgctacgagctgtcctgaaacttcagaaagattgaggtagggatgcataccaagtctgaggatgatgcctttgcttaaggtttttctaccttgctagaacatattttgtggttagaactttgtcagaactacgtgcaatctgtttgaatgcttcgaacctttgtggtggaacctttgtatgtttgaacctctgttgtggaagaactagtgtgctggaattgtgtatgacttgtgatgagaatgttgtgtatgatggcttttctgtgtattatgattctgtgagctatcatgagagcttagtgtgtcgtcactgtatggtcattgtatgtgggtgccatattaaactaaacaaaacaaagctgtcacattatctcaacattaggtgacgcgttg

SEQ ID NO: 49166 - DNA, 3673 bp, Zea Mays
aatcaatagcacatcattactctactatacccaagtgagtgaaggcatttctgcactattgcaaaaaggtaccaccatgtatattactcaaccaaaaaaaaaggtaaatgaacacttgaaaaatatatacccagagttaactgcagagtattatatagtatctcctgagcaaccaacgcaatagtcatccaaccaaccccaagtgcactcacatttattctgctgcgccccgacccactgaaagaaagaaagaaagaaagaaagaaagaaagaaagaacaggctcccctagctccgcctgcccaaggcgcattgagtttgtcagtttcactgcccacggcatgggatcttggagacaaaaactgcctgggttaggcgagggctcaggctcaggctcacaggctgctgaggccggcggtggtgggagaggtttccgtggccgtggtggcttctaccatcaacagcagtccccacaaggtggtcgtggtcgtggaactggctactacagtggtggtggtggtggtagaggtggacgtggggcagtcccgtccgccatagctcccgagctgcgccaagcaatgcaaacttcaaatgaacctgataacatcccagcgccagaggcaggctcccagtcccaggatgcgccgtcaccaagcgaagaggctgtggatcagctgaaaggcttgtctgtacaggacattgtgcaggcgtttccagtgtcgagcaagttccctcaccgcccaggaaatggaagcgttggcaccaggtgtttggtgaaggcaaatcacttctttgctgaattattacctgccaagaaggatcttcatcagtatgatgtttcagttaccccggaagtgacatcgcgaattgtgaaccgttctgtcatggaggagctggtgaggctgcacaagctgtcatatttgggaggtcggcttccagcctatgatggtagaaagagcctgtacacggctggacccctgccattcacttcgaaagaatttcacatcactctactcgaggaagacgatggttctggagtagagaggcgtaagaagacatacaaggtagtgattaaatttgccgcaagggctgacctccggcgtctggagcagtttttagctggaaggcaggcagaggctcctcaagaagccttgcaagttcttgatattgttctgcgggagctgccgacaacaagatatgcaccgtttgggcgatcgtttttctctcctgacctggggaggaggcgttcccttggtgagggaatagaaagctggcgtgggttttaccagagcattcgccctactcaaatgggcttgtcattgaatattgatatgtctgcaactgctttctttgagccattacctgtcatagattttgttgcacagcttttaaacaccgacgacatctactcgaggcccctcttagacgctgaacgtgtcaagataaagaaggccttaagaggcgtgaaggtggaagttacgcaccgtggtaacatgcgacgcaagtatcgaatagctggtttaacatctcaggaaactcgggagctaacttttcctgttgatcaaggtggcacagtgaagtcagttgtacagtattttcaagagacctatggctttgccatccagcacacctacctgccctgtctgcaggttggcaaccagcagcacccaaattaccttccaatggaggtctgcaagatagtggagggacagaggtactctaagagattaaaccagagtcagataagagctcttttagaggagacatgccaacgcccacatgatcgtgagcgcgacattattcagatgatgaatcataactcttaccatgaggatccttatgctaaagagtttggcattaagatcagcgagcgtttggcttcgattgaggcacggattttacctgctcctcggctcaaatataatgaaaccggcagagagaaggactgtttgcctagagttgggcagtggaatatgatgaacaagaaaatggtaaacggtggcagagtgaggagctggacctgtgtgaattttgctcggaatgtgcaagagaatgttgctattggattctgccgtgaacttgctcggatgtgccaggcctcgggaatggcaagacttcgcgctggagcctatccttccgcctatatacgcgcatcctgataaagtggagagagctctgaaagccaggttccatgacgcgatgaacttgctcggaccacagcgcagagaacaactcgacttgctgctcattggaatactccctgataacaacggttctctttatggtgatctgaagcgtatctgtgaaatcgaccttggattagtttcccagtgctgctgcgcaaagcaagtctttaagatgaacaagcagatactggcaaaccttgcgctgaagataaatgtcaaggtcggaggaaggaacacggtgctggctgatgcggtgtcaagacgcattcccttggtgactgacaggcctaccatcatattcggtgccgatgtgacccatcctcatcctggagaagatagcagcccttccattgctgctgttgtggcttcccaagactggcctgaggtgacaaagtatgctggtctagtttctgctcagtctcataggcaagagctgatagaggatctctacaacgtcacacacgatcctcagaaaggaaccgtttgtggtggcatggtcagggagcttcttatatccttcaaaaaatcaactggtcaaaagcctcagaggatactattctacagggatggtgtgagtgaagggcagttctaccaagttctactgcatgaactggatgctatccgaaaggcgtgtgcatcgctggaagcaaactaccaaccgcaggtgactttcatcgtcgtccagaaacgccaccataccaggctgttcgcgcacaaccacaacgaccagaattcggtcgacaggagcggcaacatacttcctggaactgtcgtggactcgaagatctgccaccctacagagttcgacttcttcctgtgcagccatgctggcatcaagggcaccagccgtcctgctcactaccatgtcttgtgggacgagaacaacttcacagccgacgcactgcagaccctcaccaacaacctttgctacacctacgcgaggtgcacgcgctctgtgtccattgtcccgccggcgtactacgctcacctggccgcattccgcgcccggttctacatggagcctgacagctcagacagcgggtcgctggcgagtggcgcccgtggaggcggagcgccctccagctcgtcaacgtcccgcagcacccgcgccaccgccggcggagccgttagacccctccccgcgctcaaggacagcgtcaagaaggtcatgttctactgctgatgaaccggagcatgaagatagtaggcagccctgcctgaaatctgatccgcttggtgctgttgtttggtcagtaataatctgcttgctattgacaaagccgtgctcagaagacatttgcttggtgtttgtttgatgaagggtggctagagtggtggattcgcttcctgcttgtactgagggacgaccgtacgtgaaagaatctaggtctttatttgtgtttggacgattaatagtaaaacacaagagtattttgttaagataaattatgagtttgtgtggtatttatggtcttattaatggagatt

SEQ ID NO: 49167 - DNA, 3492 bp, Zea Mays
atgtatattactcaaccaaaaaaaaagcgcattgagtttgtcagtttcactgcccacggcatgggatcttggagacaaaaactgcctgggttaggcgagggctcaggctcaggctcacaggctgctgaggccggcggtggtgggagaggtttccgtggccgtggtggcttctaccatcaacagcagtccccacaaggtggtcgtggtcgtggaactggctactacagtggtggtggtggtggtagaggtggacgtggggcagtcccgtccgccatagctcccgagctgcgccaagcaatgcaaacttcaaatgaacctgataacatcccagcgccagaggcaggctcccagtcccaggatgcgccgtcaccaagcgaagaggctgtggatcagctgaaaggcttgtctgtacaggacattgtgcaggcgtttccagtgtcgagcaagttccctcaccgcccaggaaatggaagcgttggcaccaggtgtttggtgaaggcaaatcacttctttgctgaattattacctgccaagaaggatcttcatcagtatgatgtttcagttaccccggaagtgacatcgcgaattgtgaaccgttctgtcatggaggagctggtgaggctgcacaagctgtcatatttgggaggtcggcttccagcctatgatggtagaaagagcctgtacacggctggacccctgccattcacttcgaaagaatttcacatcactctactcgaggaagacgatggttctggagtagagaggcgtaagaagacatacaaggtagtgattaaatttgccgcaagggctgacctccggcgtctggagcagtttttagctggaaggcaggcagaggctcctcaagaagccttgcaagttcttgatattgttctgcgggagctgccgacaacaagatatgcaccgtttgggcgatcgtttttctctcctgacctggggaggaggcgttcccttggtgagggaatagaaagctggcgtgggttttaccagagcattcgccctactcaaatgggcttgtcattgaatattgatatgtctgcaactgctttctttgagccattacctgtcatagattttgttgcacagcttttaaacaccgacgacatctactcgaggcccctcttagacgctgaacgtgtcaagataaagaaggccttaagaggcgtgaaggtggaagttacgcaccgtggtaacatgcgacgcaagtatcgaatagctggtttaacatctcaggaaactcgggagctaacttttcctgttgatcaaggtggcacagtgaagtcagttgtacagtattttcaagagacctatggctttgccatccagcacacctacctgccctgtctgcaggttggcaaccagcagcacccaaattaccttccaatggaggtctgcaagatagtggagggacagaggtactctaagagattaaaccagagtcagataagagctcttttagaggagacatgccaacgcccacatgatcgtgagcgcgacattattcagatgatgaatcataactcttaccatgaggatccttatgctaaagagtttggcattaagatcagcgagcgtttggcttcgattgaggcacggattttacctgctcctcggctcaaatataatgaaaccggcagagagaaggactgtttgcctagagttgggcagtggaatatgatgaacaagaaaatggtaaacggtggcagagtgaggagctggacctgtgtgaattttgctcggaatgtgcaagagaatgttgctattggattctgccgtgaacttgctcggatgtgccaggcctcgggaatggacttcgcgctggagcctatccttccgcctatatacgcgcatcctgataaagtggagagagctctgaaagccaggttccatgacgcgatgaacttgctcggaccacagcgcagagaacaactcgacttgctgctcattggaatactccctgataacaacggttctctttatggtgatctgaagcgtatctgtgaaatcgaccttggattagtttcccagtgctgctgcgcaaagcaagtctttaagatgaacaagcagatactggcaaaccttgcgctgaagataaatgtcaaggtcggaggaaggaacacggtgctggctgatgcggtgtcaagacgcattcccttggtgactgacaggcctaccatcatattcggtgccgatgtgacccatcctcatcctggagaagatagcagcccttccattgctgctgttgtggcttcccaagactggcctgaggtgacaaagtatgctggtctagtttctgctcagtctcataggcaagagctgatagaggatctctacaacgtcacacacgatcctcagaaaggaaccgtttgtggtggcatggtcagggagcttcttatatccttcaaaaaatcaactggtcaaaagcctcagaggatactattctacaggtgagtgtgtgtgcgcgcgcgcgcgtgatttcttacaatactttgcatgccgccggctagttaccttacctctgtctgacagggatggtgtgagtgaagggcagttctaccaagttctactgcatgaactggatgctatccgaaaggcgtgtgcatcgctggaagcaaactaccaaccgcaggtgactttcatcgtcgtccagaaacgccaccataccaggctgttcgcgcacaaccacaacgaccagaattcggtcgacaggagcggcaacatacttcctggaactgtcgtggactcgaagatctgccaccctacagagttcgacttcttcctgtgcagccatgctggcatcaagggcaccagccgtcctgctcactaccatgtcttgtgggacgagaacaacttcacagccgacgcactgcagaccctcaccaacaacctttgctacaccttgtcaaattgccgctgcagctacgcgaggtgcacgcgctctgtgtccattgtcccgccggcgtactacgctcacctggccgcattccgcgcccggttctacatggagcctgacagctcagacagcgggtcgctggcgagtggcgcccgtggaggcggagcgccctccagctcgtcaacgtcccgcagcacccgcgccaccgccggcggagccgttagacccctccccgcgctcaaggacagcgtcaagaaggtcatgttctactgctgatgaaccggagcatgaagatagtaggcagccctgcctgaaatctgatccgcttggtgctgttgtttggtcagtaataatctgcttgctattgacaaagccgtgctcagaagacatttgcttggtgtttgtttgatgaagggtggctagagtggtggattcgcttcctgcttgtactgagggacgaccgtacgtgaaagaatctaggtctttatttgtgtttggacgattaatagtaaaacacaagagtattttgttaagataaattatgagtttgtgtggtatttatggtcttattaatggagatt

SEQ ID NO: 49168 - DNA, 1322 bp, Zea Mays
ggcagactataaaatttcccaacactgcgttcacccctgccgctctcttctcccactctctcgcctcctgtagcccggccaggtctcagtgctcattctcactcctttcaaattaccggcgacgagtatccactacgacgatggtgggcctctctgaaggggagaaacacttcatccgcggcggcattgcacaagaccttcgcactgatggacgtaggcggctgcagttccggtccctctccgtccaaaccggagtcattccacaggcgaatggctcagcgcgtgttaggttgggggccactgatataatcgctagtgtcaaggctgaactaggaaaaccaagcattcttcaccctgacaaaggaaaagttgccatttttgtcgactgtagtccaaccgctgagcctctgtttgagggtagaggctctgaagaattgtctgctgagctctctgtttccctgcaaagatgcttgttgggtggtaaaagtggtgctggtgctgcaattgatctgtcatccctaattgttgttgatggaaaggtctgctgggatctgtacattgatgggcttgtggtcagttctgatggtaatttgctagatgcgctagctgttgcgataaaggttgctttgagtgatacaggtataccaaaagttaatgtttctgttagtgctgcatctgatgaggaacctgaagttgatgtaagtgatgaggaatttctgcagtttgacacatccggtgtgcctgttattattacattaaccaaggtgggtcggcactacatcgttgatgccacctcagaggaagaatcccagatgagttctgcagtgtcggtgtcagtcaacaggcatggccagatatgcgggcttaccaagaggggaggggcagggctggatccaagcgtcatcttcgacatgatatctgtcgccaagcatgtgagccagcagttcatctccctcttggattcagagattgccgccgccgaagctgaagaagaggctcagtgattgatgaaaaggaaaaaggactggttgcgtaaatgctcgtgtgttccaacttcaaccaaatgctgtagaaatcttcaggaatttggttccatttttatgttattattagtagtagtaaacaccgaggatttggatcctgggaacgaacgacgtcgtgttggctttggctgggctcagaggaacgaatactgaatcttgggtctgatgatctgatcctcttgtgcccccaatccgatgataaatttggcccctctcataccaaaccaaacactatggatttcctccgtccgttttcaaacaatttcgcacgcaattttg

SEQ ID NO: 49169 - DNA, 718 bp, Zea Mays
atgtgtgatccagcaagaatccattattgcaagctcgggcttaacagcaagagcgcccgattccttatacacacacacatacaaccaggtgtctgtctacacggtgagttccgtcctggagacaagaatgccatcgggatcggcgtagagccactcgccgtcgcaaatcctggttccagcgatgttgacggggacgtgcttctcgcccatccccttcttgttggccttcatagggtgcgagctgagagcccggacaccgatgtcgcagccgttgatctcatccacgtccctgatgcagccgttgaccaggataccagcccacccgttgttctgcgcctgctggacggggttgccgccaaggatggcgcagcgcatgctgccgccgccgtcgaccacgaggaccctaccgtggcctttctcctcgaggaactcgcggaccaggacgttgtcctcgtagaccttgagcgtgacgatggggccggcgaagacctggcgccgtccgtagatctggaagattggctggagcgcgcggagctcgccgttcatgatcaggtgagggttagcgtcgcatacttcggcggtggccagtggcagggcagccatatttttttacttctcactccagcacaagcacaaacggatcggatcggatcggatcagatctccggcggcggcgaggggaggggagcggcgccaatggagtgcgggtggaggggac

SEQ ID NO: 49170 - DNA, 3366 bp, Zea Mays
gtcggtttttattatagtgattgacgttcgaaaagatgtcaacagctgtgacacaatatagagtttttttatacaactgagagagagagtgtgcgagtgagttaaatggcaacaaacaaaaacgaaagcaaattaaaaaaaaggaaaaaaactatgagatgtcatcaccggtcacgagaaatatgacggtaaataaatatggatggtagcaaggactaaaacgaaaagtggcaaaacctttgcttccggacgggtgtcgccgagtgcagccgctttttaaaacccccaccgatgtcctgagattggaaagagggaagccgcaggcagcatctgcatctctcgcccacctccgctccgcctactgctgctggtggtagggaggcggagaaggaggcccttgcgcccgcccgccggccggatcagagccgtagcaaccaccacccatggcggacgtgcacgaacctttggtgcgccgtaagaggaagaaggttttggtggactacttggtgaagttccgatggatcctcgtgatcttcgtggtccttcctatttcaactctgatctacttcaacatcttcctgggcgacatgtggtccgccatgaagtcggagaagaagcgccagaagcagcacgacgagaacgtgcagaaggtcgtgaagcggctcaagcagaggaacccgaagaaggacggtcttgtttgcacggccaggaagccctggatcgctgttggcatgcgcaacgtggactacaagcgtgcgaggcatttcgaggtcgacctttcttccttcaggaacatccttgagatcgacaaagagaggatggttgccaaggtcgagccccttgtcaacatgggtcagataaccagagctacctgcccaatgaaccttgcccttgcggtcgtcgccgagctcgacgacctcactgttggtgggctgatcaacggttacggcatcgaggggagctctcacctctatggccttttctccgacacggttgtcgcgatggaggttgttctcgcagatggccgggtcgtcagagccaccaaggacaacgagtactctgaccttttctatggcattccctggtcccagggaacactggggttccttgtctctgcggagatcaagctgatccccatcaaggagtacatgaagctcacctacactccagtcaaggggggtctaaaggagatcgcgcaggcctacgcggattctttcgcgccgagggacggtgacccggcaaaggtccctgactttgttgaagggatggtgtacacagagagcgagggtgtcatgatgacgggcgtgtacgcttccaaagaagaggcgaagaagaagggcaacaagatcaactgcgtggggtggtggtttaagccctggttctaccagcacgctcagacggcgctgaagaggggcgagtttgtggagtacatcccgacgagggagtactaccaccggcacacccggtgcctgtactgggaggggaagctgatcctgcccttcggcgaccagttctggttcaggttcctgctgggctggctgatgccaccgaaggtgtccctgctgaaggcgacccagggcgaggctatcaggaactactaccacgacaaccatgtgatccaggacatgctggtgccgctgtacaaggttggggatgcgctggagttcgtgcaccgcgagatggaggtgtatcctctgtggctgtgccctcaccggctgtacaagctgccggtgaagacgatggtgtacccggagcctgggttcgagcaccagcacaggcagggcgacacgagctacgcacagatgttcacggacgtgggcgtgtactacgcccccggggcggtgctgaggggggaggagttcaacggcgcggaggctgtgcacaggctggagcagtggctgatcgagaaccacagctaccagccgcagtacgcggtgtcggagctgaacgagaaggacttctggcgcatgttcgacgcgtcgcactacgagcactgccgccaaaagtacggggcggtgggcacgttcatgagcgtgtactacaagtccaagaaggggcgcaagacggagaaggaggtgcaggaggcggaggcggccatactggagccggcctacgcggacgaggaggcctaaaagctcgtggtcgttttgcttagcccattttaattagaacttgatggatgtagtgtgtgtctgtctcaagtcattttaattagaactcttaaagctcgtggtcggtcggtcagtcagtcagtcattgtcgttgatgtccagcgttgtgttttttttatattctctaatggaatctctcagattgattcgggacttgctatggctctgctctttgttatgttttttttttaaagttctccaggcgctgctgctgcgtcttgcaaggagcccggagctgatgactagcagcagcagcagcttggaacggtgggaggcagcaccaccatggcaccatgtggctgagctgggctggcaggcacagtgagaaaaagaaagacaccagccatctactccccagtccccccacaagagcaaaagcaaagaaagatgcatgtgcatgtgcagtgcagcaactctgccatgctgtcatgtgggacggcacgggcaccagctgcactgcactgcaccgccccacagttatattgtttactgctgctgtgcccactccttgtatatttgcatcactgcctgcttctggaatcaggaaaggagatcaccacttcactcaagaaggcaccctcccttgccactccttttccttgagatgacgatgacgacgatgaagaagcagcagcagctcctcctcctcctttctctcatgtttctcgttgctgtgacagcagccgctgttgctgccgatccacatccacagcaggtgcaggtgcagcagcagcagcaagcacagatgaggattaacagggccaccagatcccttcttcctcagccgccgccgaaactagactgcccgtccacctgctccgtgcgctgcggcaacaactggaagaaccagatgtgcaacaagatgtgcaacgtctgctgcaacaagtgcagctgcgtgccgccggggaccggccaggacacccgccacctctgcccctgctacgacaccatgctcaatccacacaccggcaagcttaagtgcccctaggccttcgccactcatgttatgtacaataacgtgagatgctacactgcactgcggctctcctgaactcagaatcggatttgcacatctcaaaccaccactctgcctgcattacgagaggagagttaaggtacaagagtttccagaacgcgttgcattgattgatctagagaaccaactactacgtgtttaacaatgaacaataaaaca

SEQ ID NO: 49171 - DNA, 3134 bp, Zea Mays
agaaacaaactgtaggaggttgctgcggtggtccctgtggggttctactgctttaggattattttctgggatctgttttttttccagcccgagtatgcatgccgtcgagtagcaaccaccacccatggcggacgtgcacgaacctttggtgcgccgtaagaggaagaaggttttggtggactacttggtgaagttccgatggatcctcgtgatcttcgtggtccttcctatttcaactctgatctacttcaacatcttcctgggcgacatgtggtccgccatgaagtcggagaagaagcgccagaagcagcacgacgagaacgtgcagaaggtcgtgaagcggctcaagcagaggaacccgaagaaggacggtcttgtttgcacggccaggaagccctggatcgctgttggcatgcgcaacgtggactacaagcgtgcgaggcatttcgaggtcgacctttcttccttcaggaacatccttgagatcgacaaagagaggatggttgccaaggtcgagccccttgtcaacatgggtcagataaccagagctacctgcccaatgaaccttgcccttgcggtcgtcgccgagctcgacgacctcactgttggtgggctgatcaacggttacggcatcgaggggagctctcacctctatggccttttctccgacacggttgtcgcgatggaggttgttctcgcagatggccgggtcgtcagagccaccaaggacaacgagtactctgaccttttctatggcattccctggtcccagggaacactggggttccttgtctctgcggagatcaagctgatccccatcaaggagtacatgaagctcacctacactccagtcaaggggggtctaaaggagatcgcgcaggcctacgcggattctttcgcgccgagggacggtgacccggcaaaggtccctgactttgttgaagggatggtgtacacagagagcgagggtgtcatgatgacgggcgtgtacgcttccaaagaagaggcgaagaagaagggcaacaagatcaactgcgtggggtggtggtttaagccctggttctaccagcacgctcagacggcgctgaagaggggcgagtttgtggagtacatcccgacgagggagtactaccaccggcacacccggtgcctgtactgggaggggaagctgatcctgcccttcggcgaccagttctggttcaggttcctgctgggctggctgatgccaccgaaggtgtccctgctgaaggcgacccagggcgaggctatcaggaactactaccacgacaaccatgtgatccaggacatgctggtgccgctgtacaaggttggggatgcgctggagttcgtgcaccgcgagatggaggtgtatcctctgtggctgtgccctcaccggctgtacaagctgccggtgaagacgatggtgtacccggagcctgggttcgagcaccagcacaggcagggcgacacgagctacgcacagatgttcacggacgtgggcgtgtactacgcccccggggcggtgctgaggggggaggagttcaacggcgcggaggctgtgcacaggctggagcagtggctgatcgagaaccacagctaccagccgcagtacgcggtgtcggagctgaacgagaaggacttctggcgcatgttcgacgcgtcgcactacgagcactgccgccaaaagtacggggcggtgggcacgttcatgagcgtgtactacaagtccaagaaggggcgcaagacggagaaggaggtgcaggaggcggaggcggccatactggagccggcctacgcggacgaggaggcctaaaagctcgtggtcgttttgcttagcccattttaattagaacttgatggatgtagtgtgtgtctgtctcaagtcattttaattagaactcttaaagctcgtggtcggtcggtcagtcagtcagtcattgtcgttgatgtccagcgttgtgttttttttatattctctaatggaatctctcagattgattcgggacttgctatggctctgctctttgttatgttttttttttaaagttctccaggcgctgctgctgcgtcttgcaaggagcccggagctgatgactagcagcagcagcagcttggaacggtgggaggcagcaccaccatggcaccatgtggctgagctgggctggcaggcacagtgagaaaaagaaagacaccagccatctactccccagtccccccacaagagcaaaagcaaagaaagatgcatgtgcatgtgcagtgcagcaactctgccatgctgtcatgtgggacggcacgggcaccagctgcactgcactgcaccgccccacagttatattgtttactgctgctgtgcccactccttgtatatttgcatcactgcctgcttctggaatcaggaaaggagatcaccacttcactcaagaaggcaccctcccttgccactccttttccttgagatgacgatgacgacgatgaagaagcagcagcagctcctcctcctcctttctctcatgtttctcgttgctgtgacagcagccgctgttgctgccgatccacatccacagcagcaggtgcaggtgcagcagcagcagcaagcacagatgaggattaacagggccaccagatcccttcttcctcagccgccgccgaaactagactgcccgtccacctgctccgtgcgctgcggcaacaactggaagaaccagatgtgcaacaagatgtgcaacgtctgctgcaacaagtgcagctgcgtgccgccggggaccggccaggacacccgccacctctgcccctgctacgacaccatgctcaatccacacaccggcaagcttaagtgcccctaggccttcgccactcatgttatgtacaatgtactatcatcacttcaataaataaataaaaaaacttctggttctggatgcctgtttctactcattctgcccattctccttcagaacgtgagatgctacactgcactgcggctctcctgaactcagaatcggatttgcacatctcaaaccaccactctgcctgcattacgagaggagagttaaggtacaagagtttccagaacgcgttgcattgattgatctagagaaccaactactacgtgtttaacaatgaacaataaaaca

SEQ ID NO: 49172 - DNA, 3131 bp, Zea Mays
agaaacaaactgtaggaggttgctgcggtggtccctgtggggttctactgctttaggattattttctgggatctgttttttttccagcccgagtatgcatgccgtcgagtagcaaccaccacccatggcggacgtgcacgaacctttggtgcgccgtaagaggaagaaggttttggtggactacttggtgaagttccgatggatcctcgtgatcttcgtggtccttcctatttcaactctgatctacttcaacatcttcctgggcgacatgtggtccgccatgaagtcggagaagaagcgccagaagcagcacgacgagaacgtgcagaaggtcgtgaagcggctcaagcagaggaacccgaagaaggacggtcttgtttgcacggccaggaagccctggatcgctgttggcatgcgcaacgtggactacaagcgtgcgaggcatttcgaggtcgacctttcttccttcaggaacatccttgagatcgacaaagagaggatggttgccaaggtcgagccccttgtcaacatgggtcagataaccagagctacctgcccaatgaaccttgcccttgcggtcgtcgccgagctcgacgacctcactgttggtgggctgatcaacggttacggcatcgaggggagctctcacctctatggccttttctccgacacggttgtcgcgatggaggttgttctcgcagatggccgggtcgtcagagccaccaaggacaacgagtactctgaccttttctatggcattccctggtcccagggaacactggggttccttgtctctgcggagatcaagctgatccccatcaaggagtacatgaagctcacctacactccagtcaaggggggtctaaaggagatcgcgcaggcctacgcggattctttcgcgccgagggacggtgacccggcaaaggtccctgactttgttgaagggatggtgtacacagagagcgagggtgtcatgatgacgggcgtgtacgcttccaaagaagaggcgaagaagaagggcaacaagatcaactgcgtggggtggtggtttaagccctggttctaccagcacgctcagacggcgctgaagaggggcgagtttgtggagtacatcccgacgagggagtactaccaccggcacacccggtgcctgtactgggaggggaagctgatcctgcccttcggcgaccagttctggttcaggttcctgctgggctggctgatgccaccgaaggtgtccctgctgaaggcgacccagggcgaggctatcaggaactactaccacgacaaccatgtgatccaggacatgctggtgccgctgtacaaggttggggatgcgctggagttcgtgcaccgcgagatggaggtgtatcctctgtggctgtgccctcaccggctgtacaagctgccggtgaagacgatggtgtacccggagcctgggttcgagcaccagcacaggcagggcgacacgagctacgcacagatgttcacggacgtgggcgtgtactacgcccccggggcggtgctgaggggggaggagttcaacggcgcggaggctgtgcacaggctggagcagtggctgatcgagaaccacagctaccagccgcagtacgcggtgtcggagctgaacgagaaggacttctggcgcatgttcgacgcgtcgcactacgagcactgccgccaaaagtacggggcggtgggcacgttcatgagcgtgtactacaagtccaagaaggggcgcaagacggagaaggaggtgcaggaggcggaggcggccatactggagccggcctacgcggacgaggaggcctaaaagctcgtggtcgttttgcttagcccattttaattagaacttgatggatgtagtgtgtgtctgtctcaagtcattttaattagaactcttaaagctcgtggtcggtcggtcagtcagtcagtcattgtcgttgatgtccagcgttgtgttttttttatattctctaatggaatctctcagattgattcgggacttgctatggctctgctctttgttatgttttttttttaaagttctccaggcgctgctgctgcgtcttgcaaggagcccggagctgatgactagcagcagcagcagcttggaacggtgggaggcagcaccaccatggcaccatgtggctgagctgggctggcaggcacagtgagaaaaagaaagacaccagccatctactccccagtccccccacaagagcaaaagcaaagaaagatgcatgtgcatgtgcagtgcagcaactctgccatgctgtcatgtgggacggcacgggcaccagctgcactgcactgcaccgccccacagttatattgtttactgctgctgtgcccactccttgtatatttgcatcactgcctgcttctggaatcaggaaaggagatcaccacttcactcaagaaggcaccctcccttgccactccttttccttgagatgacgatgacgacgatgaagaagcagcagcagctcctcctcctcctttctctcatgtttctcgttgctgtgacagcagccgctgttgctgccgatccacatccacagcaggtgcaggtgcagcagcagcagcaagcacagatgaggattaacagggccaccagatcccttcttcctcagccgccgccgaaactagactgcccgtccacctgctccgtgcgctgcggcaacaactggaagaaccagatgtgcaacaagatgtgcaacgtctgctgcaacaagtgcagctgcgtgccgccggggaccggccaggacacccgccacctctgcccctgctacgacaccatgctcaatccacacaccggcaagcttaagtgcccctaggccttcgccactcatgttatgtacaatgtactatcatcacttcaataaataaataaaaaaacttctggttctggatgcctgtttctactcattctgcccattctccttcagaacgtgagatgctacactgcactgcggctctcctgaactcagaatcggatttgcacatctcaaaccaccactctgcctgcattacgagaggagagttaaggtacaagagtttccagaacgcgttgcattgattgatctagagaaccaactactacgtgtttaacaatgaacaataaaaca

SEQ ID NO: 49173 - DNA, 3302 bp, Zea Mays
ggccccagccgcctcccctctcgttttctctgaccctttccttcccttcccttgttttgatggcgccaccgcgagccgccgccggcgtgtcaattcctgctgatcctgccgccgacagtccagaggcagagtcggagagcaagctgcggcaaggtgcagcagacgcgcggtggctcgaaaccctctccgagccggagctcgatgtgctggtgagcctgagggaagtggccgtcacgcgggcttccgatgccggccatcctggcctcgccgacaccgtcttccatctccgcgcgctgcgggctctcggggttgtgttgctggaagagttgaaagagcggctcaggcaaagctcagctgatgcaaacgtgttggacaggagtgcgttgctagatgatcctgaggccagccaagatcatcagatgccagcgccgaatggtatccacaagaaaaggaagaatcagacgcaggatgggtaagcatgcataatgctgctgcttgtattctgtgttgttcaatttcggcagctttttgttcaatttctagtggagtaaaaaacttctcatcagtacgagtcaaagaatcagatgaccaaatgctgctgcttgtattcacaagatcaccagtacatgcataatgctcgtattctttgattagataataaactaaactaaaccgtcgcctgaacagttgagttcagctggtgttgagatccaaagtctggcattcaaatgcaggtgggatggagacggtgcccaaagtccaaagagacgaaaaacgacctgaaaactctgaggacgactttacgaggccggtggttgatattgcagctgatccatcactggagaagccagcctcctcttctttgccatccagtcgtctcatcatgtactgtagcgtcagcccgccgtagcatgacaccggtttgatgaataggtttagcttcatcgattgatgatacggcatgccaaccttgatcctgttctgatgtgcagttggttcaaattggaatttttacactttacgatactacgcctcactaaaacatgcgtacggaggagtatatatggttcactcttttttttacacatgttgccaatcacagccacacactttcttctttttttatagttaatttcagacaggtacagtttgtatccaaataaagcatctggttccgacatgctaacagtcgactctctaaacctgcaatctgcatgcaacatgattcgctagttaaactaaaccacgacaaataaaaaagaacaaagtacaaaacctggatgcgcagcttcaaacaatgacatatatacaatatagttgatcacagtacaacttgcaccaacactggaaaaataaagatagataaaaagggatgcatttcatctatgagttatacgatgatgatttacataatttagctccctagagagcaatttggctatattatgtcaactaaaacaaagctaatacattcacaaagaaccagatctacacgaggtggtttccagcagctaacaatgtccttgccatgtcaacatctgtcaaatctacctgtagctgatctcttattcagttctccgtgtatgtcttcagacctagtagaactgggcccgtgccaaagaaataccctaaaatacaatgtccaaggtgccgccataaacggagcattgaacatatcctttttaagagagtgggacaaaatcgattgcgactgcaacaaaccttcaggctcacgctcaacgacgtgggtacaaatcccaacctgactctggctcttttcgcttcagcaccaacccagaagtaccatcctgtgatacattcctcatgcgttcatccacaaacattgtctgaccctggtaggacatgggccagtagctccctgcttccctacgtgcgccttcagatgacactccataactgaaatccacgctaggatggaagtaactcagttcattagatgagggctgtgttgctctggtgttgaaagatggatgagaaatgccgaggcttagacctgacagcggtggtatgactggtgcaccttttgcatccaccaagtatggactgccccctggggcaaagaacgctggggtaaaaggcatggcaggttgagatggataactgagaacactataatcaggagtatgtgcaaaagattgagtgggtcttgcaaaaactcttgattcagcacttggtcccagaaagttatgctggtattgctgtccatcatctctctgtcctacaactatcctcttacccataattgtgacggcagaatggtccgacatatcccttggccttgaaggagtcttgacagaagacccgtccattcctcgcacagaaacatcagcgatcgacatgttgtcattcaagtcaaagtttctggctgcaggttgctttgaagatgagaaagaaggctgactccagttgccattaaattgttggtgattccacaatgacggcacattgcttgcagtgatagcatcttcctcatcaccacatgagaaattaaggtcaagtttcagtcctccgctcacatcaactgctttggaagcaacctcggaaggtagttcagaagaagctggcaggattgctgtcgaaagtggttcaccagaagtagcactgccgttgtcagctacatttaaatcaaataatatgttgcttgttttatgtgaagaagctgaaagtgacttctctgcatcaggagtcctccgaggtggagctggtcgaaaggcgctggttgcagcagagcctttccacccaagtccaccttcaaagtggagccgagctggaaacacagatgagcctcttgatgcagccacagctataggcattgacaaattgacagaattactaaggatcgacttcggattaaagtcagtttcctcggcacactgattttcattaaggtctaagttccccagatcgacactgtgtgtatgttttctactcaacggaccgctgccatctgtgatgcctgatccatcctccttatgagatgaggagcttcctgacttagcctctgtactggaagatttattatcattcagttcactggcaatggctacaggctgccgtggtccttccaggtcaggactgtcagcattcctggaattagtatcaggagaactacaaaagggttctctgtagtcaatgacttcccgctccacctcaatagctaccagacgtgcaacttctagtgcatctgtatcatcaaagtctgccattcgtgttgatttctccccttccaatgcagtggattttgtgtctgctgccttggaggagcccccaaagctcgacat

SEQ ID NO: 49174 - DNA, 1703 bp, Zea Mays
aataagcccaaaggcccatcaaccgagagccttcgtcttccttctctcatcctttgctcctcttcaaacgctcgagaaagagagagagactaaatcctccctcgaaaccctagcatagccactgccttcccgcacgctaggaaggggaagatatgggcgccgaggaggacgccgctgcacgccgcgagcgtctccgcgccctccgtgccgccaaggacctcctctccacccccgacggcgccccaaccccttccaccgacggagaacaccatgagcttccagccatgaagttcagaaactaccttccccatgatgaacaacttcgaggaggcaagctggctccagtgtctcttcccaagtttgaagacccaattagtgccgaaactgcagagccaaaggaagtggagaacctttttggaaacatagcaccaaagaatccaaattgggatctgaaacgtgatgtgcagaagagaattgataaactggaaaggcgcacgcagaaagcgttggctgagattgcattggaacagcagagggagaaggaagccttggaggaatctcaagattgaccgacctgtataagtgaccagtgactcatgctggttggtccctcgagcagacgtcattatcttatttagataatgtaatgtactttgggatgctctgtgtatctaccatcttgggatgtactgaattgagtttgggacgtgtatctacctaccatcttgtattgtcagctcaaggatgtagcaaactagtagcaacttcaaaaaatgagatgtagcagtcctgttctgttagacggacctggtcaaactaccgtactaaatacaaacaaagcacaccttcatgctgtgttggactcggtattctcaggcaatggacgaataatgacttcttttgttgtgttaattcagtgggtgagatgagagatgcatacatccatctgtgtggtacaatcatatctcataagctttttctttctttcttttacataatacaagtgctcctaattaggagctgttgctaggcgctgcaactgattaattttcattttgtcgagtaacatccttaaaatgcctaactaggagcaggagcaggaggggtggtggcctgctccaagtccggcaatagcaagcggttgttcctcgcgttctcccgcatcttcccgacgaaacgcttgcccttctcttccagcttgtcgcccatcctccttcctagatccatcacccgtgcacgcctcttcctcttcttcgcatctccctcctcctcagcagcagaaggtgatgcttgctgctcctccacagggcctgctctctcgtctccgctgctgctcagcagtggcatcctcagctgttcccttgttgcatcaccatttgctgaaaccagccaagactgcgagctcgttgatgcttctgcctgctcttgctcttgcccatcaacacgtatctttgtcttgttccaggaaccgttggtgattctttttgtagacggcagcggactcgacttgttctttgcaatggccttggatgtggaagcttcccctggcatcatctctctagttgtgtctgcagcacgcctatcagcgggctcacggttcagccatataaaaggtgcaattctgcggggcacccagtcatccgtatctgctatcatccaggaaataggaaagctttcacagttgggcatcaccaagatctgac

SEQ ID NO: 49175 - DNA, 751 bp, Zea Mays
aataagcccaaaggcccatcaaccgagagccttcgtcttccttctctcatcctttgctcctcttcaaacgctcgagaaagagagagagactaaatcctccctcgaaaccctagcatagccactgccttcccgcacgctaggaaggggaagatatgggcgccgaggaggacgccgctgcacgccgcgagcgtctccgcgccctccgtgccgccaaggacctcctctccacccccgacggcgccccaaccccttccaccgacggagaacaccaaaatggcaaccatgagatggcagaagagccagaattaccaggtcatcaggatgcacctggtgaggctgctaaagaggatggtagccccactgaggaggccgaagaggttgaagatgatggtgagcttccagccatgaagttcagaaactaccttccccatgatgaacaacttcgaggaggcaagctggctccagtgtctcttcccaagtttgaagacccaattagtgccgaaactgcagagccaaaggaagtggagaacctttttggaaacatagcaccaaagaatccaaattgggatctgaaacgtgatgtgcagaagagaattgataaactggaaaggcgcacgcagaaagcgttggctgagattgcattggaacagcagagggagaaggaagccttggaggaatctcaagattgaccgacctgtataagtgaccagtgactcatgctgaagcaacaatatgaaacctgtcggttgag

SEQ ID NO: 49176 - DNA, 994 bp, Zea Mays
gtgatctactcaaaattcagtgcgtaggatacaaaatgctattcaccttgaggaaaaagagaagaaggagaaggagctgaggagccaaatcatcgttgatgctgaagagtttaagaaagcttttgttgagaagagaaagctcaatgctgagacaagcaagggccaaaaccgtgacagggagaagcttttcctagcaaaccaggaaaagttccatgctggtgcagataagcaatactggaaggcgatatctgaacttatcccacatgagattgctaacatcgagaagagaggggcaaggaaagacaaggagaagaagcctgggatcgtggtgatccagggaccgaagcctgggaagccaacggacatggcacggatgcggcagatattgctgaagctgaagcacactcccccaccacacatgaagccacctccgccacctgccgcagctaccggaaaggatggagcaccagctgccgccgggaaggatggagctaagccagcaaccgttgccaacggcagtgtccctgagatggaaaaggctgctgcggaggcatcagtgccagcggcagcaccaccagcagcaactgagccgatcgcagctgcttaatctaatcatctgtggtaggaggatgtgaaaaatctcttattggagttgttgcagaggcggtggtggtgagtgaaactgaaaacgtgtgaatttccggcatggtggaggcatgcactgtgtatttgttacctcgattcatttacattactgctactatatattgttattgcattttgtagagaaggggcgggcgtatcctggttcatggtaataataaggttgtattaggaggatgtttggctgtattatgtttcttcttccaagtgtttgtaaatttcccttttgttattaaaactgattgtattgttaaatttttctttgttattaaaactgattgtattgttaagctactatctgctgcatatacggagtatattttatgatcta

SEQ ID NO: 49177 - DNA, 833 bp, Zea Mays
tatttcgtcaagaccaggatcctcttttcctagcaaaccaggaaaagttccatgctggtgcagataagcaatactggaaggcgatatctgaacttatcccacatgagattgctaacatcgagaagagaggggcaaggaaagacaaggagaagaagcctgggatcgtggtgatccagggaccgaagcctgggaagccaacggacatggcacggatgcggcagatattgctgaagctgaagcacactcccccaccacacatgaagccacctccgccacctgccgcagctaccggaaaggatggagcaccagctgccgccgggaaggatggagctaagccagcaaccgttgccaacggcagtgtccctgagatggaaaaggctgctgcggaggcatcagtgccagcggcagcaccaccagcagcaactgagccgatcgcagctgcttaatctaatcatctgtggtaggaggatgtgaaaaatctcttattggagttgttgcagaggcggtggtggtgagtgaaactgaaaacgtgtgaatttccggcatggtggaggcatgcactgtgtatttgttacctcgattcatttacattactgctactatatattgttattgcattttgtagagaaggggcgggcgtatcctggttcatggtaataataaggttgtattaggaggatgtttggctgtattatgtttcttcttccaagtgtttgtaaatttcccttttgttattaaaactgattgtattgttaaatttttctttgttattaaaactgattgtattgttaagctactatctgctgcatatacggagtatattttatgatcta

SEQ ID NO: 49178 - DNA, 2186 bp, Zea Mays
gttggattggaggagcagtagcagatggtctttcacttggagcctggtgtgcatgtgcatccccgtcctctccagtcctatcctcctgtccgatggctgcaagttcctccccttctagccggagcctcctcgccacacggcccctcttcttgccgttgaggacgaggaggtcgcttccacccacgtccatcccgcctcgcctcagctgtctccgatctccttctgcgtcctcctccccgtcggcgtcggcatcggcgtacaacggctgggccgacctcgccgcggcgcccgacaccccttttcccttccccctatccttcccgctgcagcccaccacgcatggcctcctcgtcctcctccccgccgccgccatcgccctctccctctccctcgcccgcctacctcccctccccctcctcgcggccgcctttaccgctggattcgcagccaggcacctgtcctcctcagcgcaggcacagtcccccggccgcctctccgccctcctcgccgatctcgacgcccatgcccgcgccttgagggagcagctggtctccgacgcccacccgggtctcctcgtccaggccgtcgatcgcctgcgggatgctgtcgccgacgccgccacagtggccgccgaacagggcgacaccggccgcaccatgtcagacgcgctcggaccgctcggggaggtcgccgactatctcggtgcctgggctcgccacgccgtgcgggacctcagcctcagcccgccaaggaagaagcctgcaaaaggcaacaacagttcagatgttcaagccgcggccaatcccaacaaccgggctgctcaacagcaacaggaaattgggagcaataagcccgtggactctactctgcaacagcagccttttgcatttgatccatctgcagtcgatgatgcaaatggaaggccgcttggcatgttgcagtttgacgaggatgacaatggatccaaggatgcagggaccggtgctcaggccacgctggagagactggtgtccaagcacaggcatcggcgtgaccctgatggccccccgtttgaaggcaggttttccgacgagtcatcatctttgctggagaggacgcttgaaatccgggacaggtcctacaggctcaagatcggtgtgatgagcgaagcgcatcctcctgtatatggtgacgatgaaagcgccgccagtgctgctgattcagatggcgaggagtttagccgaaacgtcaaggaagctgcggagatcctgaggaaggccagggcatccatggctgacgaagagaccgcagacgcactgctgtacaaatcagctaggctcctttccacagctgtggctttgaggccaacaagcctggtagcagtgggtcagctagggaacacgtacctcctccacggagagctcaagctcaaggttagtcgcgagctgaggacactcttggccagcagcggcgcctttctgaacggaagagagcgtgctccacggtccaggaaggtagacaggaggatggtaagcagagagagcatctcatccgctcttgtggatgtatgcgaggaatgcgagagcctccttgtcgaggccggcagaagctacaggatggccctctccatcgattcaggtgacgccaaggcattgtacaactgggggctggcacttattttccgggcacaattgctcgctgacatcggaccggaagcagcagccgacgctgaccgggtgtatctagctgcaatcgacaagttcgacgccatgttgtcgaggagcaacacttatgctccagaagatggggcactgcgttgcagcagcgctcccatctgcggcctcggagcaacggtgagaagataaggcttctggagcaggcgaagagcttgttcgaagatgtgctgtatgtggaagcagacaacaagatggtgagggaggcgctgtcatcgtgcatatcagagctcaactaccatggccgctggttataaccgtgaggagctttgtagcaactagcaagcgaggggaggagggctaatgataacttttgagttttgaatgatgtattagcttctagctttttatgctgacaagaagctcaaacaatatcttgcaatacaatgcaatatgacctttttttttcttgtatggaacgtgtggttgaatcgattaatacaagtgaatgaaaaagagcaagcatctttcttg

SEQ ID NO: 49179 - DNA, 2056 bp, Zea Mays
cctctccagtcctatcctcctgtccgatggctgcaagttcctccccttctagccggagcctcctcgccacacggcccctcttcttgccgttgaggacgaggaggtcgcttccacccacgtccatcccgcctcgcctcagctgtctccgatctccttctgcgtcctcctccccgtcggcgtcggcatcggcgtacaacggctgggccgacctcgccgcggcgcccgacaccccttttcccttccccctatccttcccgctgcagcccaccacgcatggcctcctcgtcctcctccccgccgccgccatcgccctctccctctccctcgcccgcctacctcccctccccctcctcgcggccgcctttaccgctggattcgcagccaggcacctgtcctcctcagcgcaggcacagtcccccggccgcctctccgccctcctcgccgatctcgacgcccatgcccgcgccttgagggagcagctggtctccgacgcccacccgggtctcctcgtccaggccgtcgatcgcctgcgggatgctgtcgccgacgccgccacagtggccgccgaacagggcgacaccggccgcaccatgtcagacgcgctcggaccgctcggggaggtcgccgactatctcggtgcctgggctcgccacgccgtgcgggacctcagcctcagcccgccaaggaagaagcctgcaaaaggcaacaacagttcagatgttcaagccgcggccaatcccaacaaccgggctgctcaacagcaacaggaaattgggagcaataagcccgtggactctactctgcaacagcagccttttgcatttgatccatctgcagtcgatgatgcaaatggaaggccgcttggcatgttgcagtttgacgaggatgacaatggatccaaggatgcagggaccggtgctcaggccacgctggagagactggtgtccaagcacaggcatcggcgtgaccctgatggccccccgtttgaaggcaggttttccgacgagtcatcatctttgctggagaggacgcttgaaatccgggacaggtcctacaggctcaagatcggtgtgatgagcgaagcgcatcctcctgtatatggtgacgatgaaagcgccgccagtgctgctgattcagatggcgaggagtttagccgaaacgtcaaggaagctgcggagatcctgaggaaggccagggcatccatggctgacgaagagaccgcagacgcactgctgtacaaatcagctaggctcctttccacagctgtggctttgaggccaacaagcctggtagcagtgggtcagctagggaacacgtacctcctccacggagagctcaagctcaaggttagtcgcgagctgaggacactcttggccagcagcggcgcctttctgaacggaagagagcgtgctccacggtccaggaaggtagacaggaggatggtaagcagagagagcatctcatccgctcttgtggatgtatgcgaggaatgcgagagcctccttgtcgaggccggcagaagctacaggatggccctctccatcgattcaggaagcagcagccgacgctgaccgggtgtatctagctgcaatcgacaagttcgacgccatgttgtcgaggagcaacacttatgctccagaagctctctacagatggggcactgcgttgcagcagcgctcccatctgcggcctcggagcaacggtgagaagataaggcttctggagcaggcgaagagcttgttcgaagatgtgctgtatgtggaagcagacaacaagatggtgagggaggcgctgtcatcgtgcatatcagagctcaactaccatggccgctggttataaccgtgaggagctttgtagcaactagcaagcgaggggaggagggctaatgataacttttgagttttgaatgatgtattagcttctagctttttatgctgacaagaagctcaaacaatatcttgcaatacaatgcaatatgacctttttttttcttgtatggaacgtgtggttgaatcgattaatacaagtgaatgaaaaagagcaagcatctttcttg

SEQ ID NO: 49180 - DNA, 6456 bp, Zea Mays
gtataagcgagtatacttggaattgttttaggcagcccaaaccgctatccccaccttcttcctcacttgccattcttcgctgacctctaaacctaaccgcccatgggcaaaggggcccctcctgccgttgccacagccacctccgtccctgaggcgccggtcttccaccccacagacgaggagttcgccgaccccctcgcctacgtcgcccgtatccgccccctcgccgagccctacggcatctgccgcatcgtcccgccgtcctcatggtccccgccttacgccctcgacttcaaggctctctccttccccaccaagaggcagcccatccaccgcctcctcgcccgccccgcccccgctgaccccgacaccttcctcctcgactatcgccgtttcctcggggcttcctccgcacatcgccgtggccgcaggaagggccttcccaagtcgccctctctctcggatggtcgcccgctcgacctctgccgcctgttccatgctgtcaagcgcttcggcggttactacggtgcctgtgaggggaagcgctggggcgacgtcgtccgcctcgttgatgataaggcgccaatgcacatatcagagtgcgccaagcacgtgcttgcgcagctatattacgagcatctctatggctatgagaagttcgccaacccacagcatgggaacaagggaaggaagcagccacggcccggatctgatgatcgaccatcggtttctcgttcacaggacgaagagagcaacatatctgttactggggagatggttgaggaggttacaggccggaaaaggagaaatttctcacgcaaggaattaggcagagggacatctcatggtcgttatggccgtgttgttaacatcactggaaataatgtggcatctgctgttgcccagaagcggacgaggaggaactctgatgctgtggttaccacagtcgatgaggtgtctgctggtgtccggaagcggaaaaggagaaagtctgatgccgcgtctaccgtgtttaatgatgaagtggatcaagtttgtgagcagtgtagtagtgggttacatggggatgtcatgctcctatgcgatcgctgtgataaaggctggcatttgtactgtttgtcgccgccgctcgagcgagtgcctccagggaattggtattgctcagattgcctcaactccgatagagattgttttgggtttatccaaaggaggaagtcctgcttgcttgagactttccggcggtttgacgacagggtgagaaagagatggtttgggcagaggaatcccagccgtattcaaattgagaagcagttctgggagattgtggaggggaaggcaggggaacttgaggttatgtatgggagtgacttggacacttcaatttatgggagcgggtttcctcgtcttggtgatacagtgccatcatctatggacctagagacgtggcagaaatactgttcaagcccgtggaatttgaacaattttccgaatctgcctggctcagttcttaggacagtcaaggataaaattcctggtgtcatggtcccatggctctacatagggatgctgttttcgtcattttgttggcatgttgaggaccattgtttctattcaataaattatttgcattggggtgagccaaaatgttgggtatggggtgcctggagcaaaagcaaatgcctttgagcaggttatgcgccaggccttacctgatctgtttgatgcacaaccggatctgctttttcaccttgtcacaatgctgaatccatctattttacaagcaaatagcgttccagtatatagcgtgatgcaggaacctggaaacttcatcatcaccttccccaggtcattccatggtggcttcaatttaggtttgaactgtgccgaggctgtaaattttgcccctgctgattggttacctcatggtggaattggggctaatctatatcgtttataccgcaaagcgcctgtcttgtcacatgaggagcttctgtatgtggttgcaaagaatggtgtggatgctgagtcacttacccatttgaagggagaaataaaaaggctttttataaatgagagaagacgtcgagtagagctttggattaatgggactgtcaaatctagcctaatgttgccaaggattaatccaaactttatcggaagtgaagaggatcctacatgcattatttgtcgacagtatctgtatctttcagcagtctcctgtaactgtaggctgtcttcttatgtttgccttgagcactggaagcacctttgtgaatgcagtccgaagaagcattgcttactttatcgacacacccttgcagagttgggggatttagtgtgcgaggtctctttggttagcccccaaagggacaatgttatgcagaatccacacttgctcaatgatgtttatgtgccgtctaaaaaggtcaaagatcactatatattatatagacagcttgcagaagattgggtttcaaactctgaacatattctccagatgccatttgtggaaaggtcttatgccactgctttggaagaagctgaacaatttctttggggtgatcatgccatggattctgtccggaacataacagtaagactaacaaaggctatgaagtgggccttgggtgttagaaaatgtctctccaaaattcaggactttctgaaagatggctgctctgaaaaagtaaattatgtggaaatagaagaactagttgctacgaaatgtgccccgtgctgtgagcctagtcttacaaaattgcaggcgtatgcagaggaagcgaaattgctgattaatgaagtaaacaatgcactatcatctttcttaacagtagacaaattggaaacattatactcaagggtttcagaattcccagttaagctaacagaatcatcgactttgttttgggagttatcttctgcaaagtcctggttgaagaaagcaagtgattgccttgaacagaataaactgggcattatcgacatagatgtcctcaataaactaaaatcagagataatacaacttcgagttctacttccagagattgatcttatctcaaagctgtggaaagatgtggaatcatggcaaacccgttgtcaattatatctccaagacttccctgatctaaaggagctggagggttttctccttgctgcggatggtgccaactttagcattccagagctgaacattcttaagcaacattactcaaattgttgctcttgggtgagtcgtgctaagaacatactcagaaaactttatgctacgagtgactatcacaatgctgttgaggagttgacaggcattctgaaggaagcagaattactaggagtaaaagttgatgaattgcctattgtggagaaagaactaaagaggtccttatgtaggaagcaagcatctgaggcacttgcaacagtaatgccaatggaggtggttgaagaaattttaaaagaagcttcgatactacatattgaagaggagcaaccatttgatgatctgtctcggatgctcaaagaggccacttcctgggaagagaaggctagacttattcttgaacgatcagcttctctctctgagtttgaagaccatatgaggtgttcagagggaataagagttatccttccgtctaaactgcatatgaaagcagaggttgatattgctaaattgtggatagacaaatgtcaggcctatttgagaccaggctgcaataaacttgcatttggagactttcttaaagttgatgatatcaaggatttaatcaatcagcctgcaaatttgaaagtcattcttgacacttcagaacttaattctgttctcaacaatattgaaaaatgggaacacagttcactaagtctactcaataattttagagccttacttcatttgaatagtattggctctacagttgacacacttcaaagaaaattggaggagctgcaaggtaaaatgaacacagaaatagaagttggattatctcttggttttgagttcaaggttctttgggaactgaaggattcttcgttgatgctaagatggatattgaatgcactgtctctgtgctgtatgattcctttattgcaggatgttgatagattaattgaagaagcagtccaccttcctgcttccttagcagattgttctttggttacattgttgatgagggcattgtcttgtctaagaaaatcacttattttgcttcctggttctggaacatctgcaaaatccaaattggaagatgttgaaaatattctagcagaattcaaggaggttgatgttccttatcctatcatgactgccaagctggaggatgctgtaaacaatcataattcatggatagagcaatgcaataccttcttcatgctgtctgatggccagtcgtgggctatgctgcaaaatctcagggacaatgggcagtctgttgcatttgattgccctgagatggataaagttgttgatgaggttaaaaacgttgaagagtggctcaatcagtgccactgtactctacttctagatggaaataatagttctttgctctccatacttgtaaagataagaggattattggatgatgtttgcacgttatatgctgaggattgtatgaagttaagattatgtgctgtatgctcatgtgacatcggagataggctggcatctagatgtgtgacttgtcaagactggtaccatggctcctgcgtggaaaacctgtctgctactacacaaacgacaattgaatggatgtgttcattttgttcacttttacagagtgaggaccaattgaagaaccaactatctgtaaagatgtctaaaggaaactgccctgcacttgccgcacttgatgaactcatctcttctgcaaagggtttatacactgggattgaggaaattaatttgctaaaagaaattgttgataaggctcgtaacttgaatgcctacttgatgcaaattctggatgattcagactgttatcatggagaagatcttactgtcatattcaaatctcttttagttgctctcaaggtgataattatcaaacttctcattctgaaaagcccttgttctttgtctgtttaaaaaggcgaggcctaggtgctgggcagtgctttgtctaacttttttccgtttagagatgttttggacttgatgtatgtaaaaacgggacaaattatagacgaggaaagataaacttcgatcatattatttatggatgcatgttgatatcttccttttttctgttctgacatgatactctaacagtccacagaaagtacaaacactctgcaacgcctaggcacaaggtggaggcccaaccacctgtatagcacctatagagctttttttaacattgatgctacatggttccaattgtgaattgatttccgtgtgaaagtaactaataaatgtgctattgctgtttaggatgagtaactacatcttttggctattttgcttggtaggcgacatcagcttctggcttgtatgatgacaatgtcagttgcagaattgagtctgttttgagcagatatttgtggaagaaacaaatacataaactattgtatggtggtaaaaagtcatcgattcaagaagtactgtgccttgatgaagagggttcacatttagagatatgtgatcaagatttcttcaagttggagattagtaaaataaaggaaaccagcctgcagtggctggctaaagcagaggaggttgcatgtgattctggtgagcttgcactggatcttgtgtatggacttatagctgaaggggaaaatctctctgtagactttgagaaggaactaaagttactgagggatcgcagtgtcctctactgcatctgctgtaagcccgacgataacagggccatgattgcatgcgaccagtgtgatgagtggtaccattttgattgcatcaacctgcttggaccccctccagaaagcttcttctgccctgcttgccatccaaacaatggtgaagaatctgtatcacttgcacgctcagaggatgatgaggatagatcaagcactggagccggagctcacacgccgccggacagagtggtggagcgagacttaataaagcttcttagctgccatagcggtagctcatggagcgagagcagaagggctcctcatcgaacagctagaaggcgtagtagtttcgtcggattgttatgatgtgcaggaaccttcttagcaccgtgaattgattctttttagttaggttagaagcaggaacgatccatcatctgctgttgtaatttgtagctgttgacaggaggtagatgtagcaaggcagagctgtaagaacccattattattgatcttgtagcagtctgaggttttggaaattgtatcatatactaccgccgttcttgaatatttgtcgcctattgtttcaaaaaacgacaaataaaaaaattaaaaaagaatggagagtatttttatgctgctgctatgcacggc

SEQ ID NO: 49181 - DNA, 6002 bp, Zea Mays
tggaattgttttaggcagcccaaaccgctatccccaccttcttcctcacttgccattcttcgctgacctctaaacctaaccgcccatgggcaaaggggcccctcctgccgttgccacagccacctccgtccctgaggcgccggtcttccaccccacagacgaggagttcgccgaccccctcgcctacgtcgcccgtatccgccccctcgccgagccctacggcatctgccgcatcgtcccgccgtcctcatggtccccgccttacgccctcgacttcaaggctctctccttccccaccaagaggcagcccatccaccgcctcctcgcccgccccgcccccgctgaccccgacaccttcctcctcgactatcgccgtttcctcggggcttcctccgcacatcgccgtggccgcaggaagggccttcccaagtcgccctctctctcggatggtcgcccgctcgacctctgccgcctgttccatgctgtcaagcgcttcggcggttactacggtgcctgtgaggggaagcgctggggcgacgtcgtccgcctcgttgatgataaggcgccaatgcacatatcagagtgcgccaagcacgtgcttgcgcagctatattacgagcatctctatggctatgagaagttcgccaacccacagcatgggaacaagggaaggaagcagccacggcccggatctgatgatcgaccatcggtttctcgttcacaggacgaagagagcaacatatctgttactggggagatggttgaggaggttacaggccggaaaaggagaaatttctcacgcaaggaattaggcagagggacatctcatggtcgttatggccgtgttgttaacatcactggaaataatgtggcatctgctgttgcccagaagcggacgaggaggaactctgatgctgtggttaccacagtcgatgaggtgtctgctggtgtccggaagcggaaaaggagaaagtctgatgccgcgtctaccgtgtttaatgatgaagtggatcaagtttgtgagcagtgtagtagtgggttacatggggatgtcatgctcctatgcgatcgctgtgataaaggctggcatttgtactgtttgtcgccgccgctcgagcgagtgcctccagggaattggtattgctcagattgcctcaactccgatagagattgttttgggtttatccaaaggaggaagtcctgcttgcttgagactttccggcggtttgacgacagggtgagaaagagatggtttgggcagaggaatcccagccgtattcaaattgagaagcagttctgggagattgtggaggggaaggcaggggaacttgaggttatgtatgggagtgacttggacacttcaatttatgggagcgggtttcctcgtcttggtgatacagtgccatcatctatggacctagagacgtggcagaaatactgttcaagcccgtggaatttgaacaattttccgaatctgcctggctcagttcttaggacagtcaaggataaaattcctggtgtcatggtcccatggctctacatagggatgctgttttcgtcattttgttggcatgttgaggaccattgtttctattcaataaattatttgcattggggtgagccaaaatgttgggtatggggtgcctggagcaaaagcaaatgcctttgagcaggttatgcgccaggccttacctgatctgtttgatgcacaaccggatctgctttttcaccttgtcacaatgctgaatccatctattttacaagcaaatagcgttccagtatatagcgtgatgcaggaacctggaaacttcatcatcaccttccccaggtcattccatggtggcttcaatttaggtttgaactgtgccgaggctgtaaattttgcccctgctgattggttacctcatggtggaattggggctaatctatatcgtttataccgcaaagcgcctgtcttgtcacatgaggagcttctgtatgtggttgcaaagaatggtgtggatgctgagtcacttacccatttgaagggagaaataaaaaggctttttataaatgagagaagacgtcgagtagagctttggattaatgggactgtcaaatctagcctaatgttgccaaggattaatccaaactttatcggaagtgaagaggatcctacatgcattatttgtcgacagtatctgtatctttcagcagtctcctgtaactgtaggctgtcttcttatgtttgccttgagcactggaagcacctttgtgaatgcagtccgaagaagcattgcttactttatcgacacacccttgcagagttgggggatttagtgtgcgaggtctctttggttagcccccaaagggacaatgttatgcagaatccacacttgctcaatgatgtttatgtgccgtctaaaaaggtcaaagatcactatatattatatagacagcttgcagaagattgggtttcaaactctgaacatattctccagatgccatttgtggaaaggtcttatgccactgctttggaagaagctgaacaatttctttggggtgatcatgccatggattctgtccggaacataacagtaagactaacaaaggctatgaagtgggccttgggtgttagaaaatgtctctccaaaattcaggactttctgaaagatggctgctctgaaaaagtaaattatgtggaaatagaagaactagttgctacgaaatgtgccccgtgctgtgagcctagtcttacaaaattgcaggcgtatgcagaggaagcgaaattgctgattaatgaagtaaacaatgcactatcatctttcttaacagtagacaaattggaaacattatactcaagggtttcagaattcccagttaagctaacagaatcatcgactttgttttgggagttatcttctgcaaagtcctggttgaagaaagcaagtgattgccttgaacagaataaactgggcattatcgacatagatgtcctcaataaactaaaatcagagataatacaacttcgagttctacttccagagattgatcttatctcaaagctgtggaaagatgtggaatcatggcaaacccgttgtcaattatatctccaagacttccctgatctaaaggagctggagggttttctccttgctgcggatggtgccaactttagcattccagagctgaacattcttaagcaacattactcaaattgttgctcttgggtgagtcgtgctaagaacatactcagaaaactttatgctacgagtgactatcacaatgctgttgaggagttgacaggcattctgaaggaagcagaattactaggagtaaaagttgatgaattgcctattgtggagaaagaactaaagaggtccttatgtaggaagcaagcatctgaggcacttgcaacagtaatgccaatggaggtggttgaagaaattttaaaagaagcttcgatactacatattgaagaggagcaaccatttgatgatctgtctcggatgctcaaagaggccacttcctgggaagagaaggctagacttattcttgaacgatcagcttctctctctgagtttgaagaccatatgaggtgttcagagggaataagagttatccttccgtctaaactgcatatgaaagcagaggttgatattgctaaattgtggatagacaaatgtcaggcctatttgagaccaggctgcaataaacttgcatttggagactttcttaaagttgatgatatcaaggatttaatcaatcagcctgcaaatttgaaagtcattcttgacacttcagaacttaattctgttctcaacaatattgaaaaatgggaacacagttcactaagtctactcaataattttagagccttacttcatttgaatagtattggctctacagttgacacacttcaaagaaaattggaggagctgcaaggtaaaatgaacacagaaatagaagttggattatctcttggttttgagttcaaggttctttgggaactgaaggattcttcgttgatgctaagatggatattgaatgcactgtctctgtgctgtatgattcctttattgcaggatgttgatagattaattgaagaagcagtccaccttcctgcttccttagcagattgttctttggttacattgttgatgagggcattgtcttgtctaagaaaatcacttattttgcttcctggttctggaacatctgcaaaatccaaattggaagatgttgaaaatattctagcagaattcaaggaggttgatgttccttatcctatcatgactgccaagctggaggatgctgtaaacaatcataattcatggatagagcaatgcaataccttcttcatgctgtctgatggccagtcgtgggctatgctgcaaaatctcagggacaatgggcagtctgttgcatttgattgccctgagatggataaagttgttgatgaggttaaaaacgttgaagagtggctcaatcagtgccactgtactctacttctagatggaaataatagttctttgctctccatacttgtaaagataagaggattattggatgatgtttgcacgttatatgctgaggattgtatgaagttaagattatgtgctgtatgctcatgtgacatcggagataggctggcatctagatgtgtgacttgtcaagactggtaccatggctcctgcgtggaaaacctgtctgctactacacaaacgacaattgaatggatgtgttcattttgttcacttttacagagtgaggaccaattgaagaaccaactatctgtaaagatgtctaaaggaaactgccctgcacttgccgcacttgatgaactcatctcttctgcaaagggtttatacactgggattgaggaaattaatttgctaaaagaaattgttgataaggctcgtaacttgaatgcctacttgatgcaaattctggatgattcagactgttatcatggagaagatcttactgtcatattcaaatctcttttagttgctctcaaggcgacatcagcttctggcttgtatgatgacaatgtcagttgcagaattgagtctgttttgagcagatatttgtggaagaaacaaatacataaactattgtatggtggtaaaaagtcatcgattcaagaagtactgtgccttgatgaagagggttcacatttagagatatgtgatcaagatttcttcaagttggagattagtaaaataaaggaaaccagcctgcagtggctggctaaagcagaggaggttgcatgtgattctggtgagcttgcactggatcttgtgtatggacttatagctgaaggggaaaatctctctgtagactttgagaaggaactaaagttactgagggatcgcagtgtcctctactgcatctgctgtaagcccgacgataacagggccatgattgcatgcgaccagtgtgatgagtggtaccattttgattgcatcaacctgcttggaccccctccagaaagcttcttctgccctgcttgccatccaaacaatggtgaagaatctgtatcacttgcacgctcagaggatgatgaggatagatcaagcactggagccggagctcacacgccgccggacagagtggtggagcgagacttaataaagcttcttagctgccatagcggtagctcatggagcgagagcagaagggctcctcatcgaacagctagaaggcgtagtagtttcgtcggattgttatgatgtgcaggaaccttcttagcaccgtgaattgattctttttagttaggttagaagcaggaacgatccatcatctgctgttgtaatttgtagctgttgacaggaggtagatgtagcaaggcagagctgtaagaacccattattattgatcttgtagcagtctgaggttttggaaattgtatcatatactaccgccgttcttgaatatttgtcgcctattgtttcaaaaaacgacaaataaaaaaattaaaaaagaatggagagtatttttatgctgctgctatgcacggc

SEQ ID NO: 49182 - DNA, 5953 bp, Zea Mays
ggcagcccaaaccgctatccccaccttcttcctcacttgccattcttcgctgacctctaaacctaaccgcccatgggcaaaggggcccctcctgccgttgccacagccacctccgtccctgaggcgccggtcttccaccccacagacgaggagttcgccgaccccctcgcctacgtcgcccgtatccgccccctcgccgagccctacggcatctgccgcatcgtcccgccgtcctcatggtccccgccttacgccctcgacttcaaggctctctccttccccaccaagaggcagcccatccaccgcctcctcgcccgccccgcccccgctgaccccgacaccttcctcctcgactatcgccgtttcctcggggcttcctccgcacatcgccgtggccgcaggaagggccttcccaagtcgccctctctctcggatggtcgcccgctcgacctctgccgcctgttccatgctgtcaagcgcttcggcggttactacggtgcctgtgaggggaagcgctggggcgacgtcgtccgcctcgttgatgataaggcgccaatgcacatatcagagtgcgccaagcacgtgcttgcgcagctatattacgagcatctctatggctatgagaagttcgccaacccacagcatgggaacaagggaaggaagcagccacggcccggatctgatgatcgaccatcggtttctcgttcacaggacgaagagagcaacatatctgttactggggagatggttgaggaggttacaggccggaaaaggagaaatttctcacgcaaggaattaggcagagggacatctcatggtcgttatggccgtgttgttaacatcactggaaataatgtggcatctgctgttgcccagaagcggacgaggaggaactctgatgctgtggttaccacagtcgatgaggtgtctgctggtgtccggaagcggaaaaggagaaagtctgatgccgcgtctaccgtgtttaatgatgaagtggatcaagtttgtgagcagtgtagtagtgggttacatggggatgtcatgctcctatgcgatcgctgtgataaaggctggcatttgtactgtttgtcgccgccgctcgagcgagtgcctccagggaattggtattgctcagattgcctcaactccgatagagattgttttgggtttatccaaaggaggaagtcctgcttgcttgagactttccggcggtttgacgacagggtgagaaagagatggtttgggcagaggaatcccagccgtattcaaattgagaagcagttctgggagattgtggaggggaaggcaggggaacttgaggttatgtatgggagtgacttggacacttcaatttatgggagcgggtttcctcgtcttggtgatacagtgccatcatctatggacctagagacgtggcagaaatactgttcaagcccgtggaatttgaacaattttccgaatctgcctggctcagttcttaggacagtcaaggataaaattcctggtgtcatggtcccatggctctacatagggatgctgttttcgtcattttgttggcatgttgaggaccattgtttctattcaataaattatttgcattggggtgagccaaaatgttgggtatggggtgcctggagcaaaagcaaatgcctttgagcaggttatgcgccaggccttacctgatctgtttgatgcacaaccggatctgctttttcaccttgtcacaatgctgaatccatctattttacaagcaaatagcgttccagtatatagcgtgatgcaggaacctggaaacttcatcatcaccttccccaggtcattccatggtggcttcaatttaggtttgaactgtgccgaggctgtaaattttgcccctgctgattggttacctcatggtggaattggggctaatctatatcgtttataccgcaaagcgcctgtcttgtcacatgaggagcttctgtatgtggttgcaaagaatggtgtggatgctgagtcacttacccatttgaagggagaaataaaaaggctttttataaatgagagaagacgtcgagtagagctttggattaatgggactgtcaaatctagcctaatgttgccaaggattaatccaaactttatcggaagtgaagaggatcctacatgcattatttgtcgacagtatctgtatctttcagcagtctcctgtaactgtaggctgtcttcttatgtttgccttgagcactggaagcacctttgtgaatgcagtccgaagaagcattgcttactttatcgacacacccttgcagagttgggggatttagtgtgcgaggtctctttggttagcccccaaagggacaatgttatgcagaatccacacttgctcaatgatgtttatgtgccgtctaaaaaggtcaaagatcactatatattatatagacagcttgcagaagattgggtttcaaactctgaacatattctccagatgccatttgtggaaaggtcttatgccactgctttggaagaagctgaacaatttctttggggtgatcatgccatggattctgtccggaacataacagtaagactaacaaaggctatgaagtgggccttgggtgttagaaaatgtctctccaaaattcaggactttctgaaagatggctgctctgaaaaagtaaattatgtggaaatagaagaactagttgctacgaaatgtgccccgtgctgtgagcctagtcttacaaaattgcaggcgtatgcagaggaagcgaaattgctgattaatgaagtaaacaatgcactatcatctttcttaacagtagacaaattggaaacattatactcaagggtttcagaattcccagttaagctaacagaatcatcgactttgttttgggagttatcttctgcaaagtcctggttgaagaaagcaagtgattgccttgaacagaataaactgggcattatcgacatagatgtcctcaataaactaaaatcagagataatacaacttcgagttctacttccagagattgatcttatctcaaagctgtggaaagatgtggaatcatggcaaacccgttgtcaattatatctccaagacttccctgatctaaaggagctggagggttttctccttgctgcggatggtgccaactttagcattccagagctgaacattcttaagcaacattactcaaattgttgctcttgggtgagtcgtgctaagaacatactcagaaaactttatgctacgagtgactatcacaatgctgttgaggagttgacagttgatgaattgcctattgtggagaaagaactaaagaggtccttatgtaggaagcaagcatctgaggcacttgcaacagtaatgccaatggaggtggttgaagaaattttaaaagaagcttcgatactacatattgaagaggagcaaccatttgatgatctgtctcggatgctcaaagaggccacttcctgggaagagaaggctagacttattcttgaacgatcagcttctctctctgagtttgaagaccatatgaggtgttcagagggaataagagttatccttccgtctaaactgcatatgaaagcagaggttgatattgctaaattgtggatagacaaatgtcaggcctatttgagaccaggctgcaataaacttgcatttggagactttcttaaagttgatgatatcaaggatttaatcaatcagcctgcaaatttgaaagtcattcttgacacttcagaacttaattctgttctcaacaatattgaaaaatgggaacacagttcactaagtctactcaataattttagagccttacttcatttgaatagtattggctctacagttgacacacttcaaagaaaattggaggagctgcaaggtaaaatgaacacagaaatagaagttggattatctcttggttttgagttcaaggttctttgggaactgaaggattcttcgttgatgctaagatggatattgaatgcactgtctctgtgctgtatgattcctttattgcaggatgttgatagattaattgaagaagcagtccaccttcctgcttccttagcagattgttctttggttacattgttgatgagggcattgtcttgtctaagaaaatcacttattttgcttcctggttctggaacatctgcaaaatccaaattggaagatgttgaaaatattctagcagaattcaaggaggttgatgttccttatcctatcatgactgccaagctggaggatgctgtaaacaatcataattcatggatagagcaatgcaataccttcttcatgctgtctgatggccagtcgtgggctatgctgcaaaatctcagggacaatgggcagtctgttgcatttgattgccctgagatggataaagttgttgatgaggttaaaaacgttgaagagtggctcaatcagtgccactgtactctacttctagatggaaataatagttctttgctctccatacttgtaaagataagaggattattggatgatgtttgcacgttatatgctgaggattgtatgaagttaagattatgtgctgtatgctcatgtgacatcggagataggctggcatctagatgtgtgacttgtcaagactggtaccatggctcctgcgtggaaaacctgtctgctactacacaaacgacaattgaatggatgtgttcattttgttcacttttacagagtgaggaccaattgaagaaccaactatctgtaaagatgtctaaaggaaactgccctgcacttgccgcacttgatgaactcatctcttctgcaaagggtttatacactgggattgaggaaattaatttgctaaaagaaattgttgataaggctcgtaacttgaatgcctacttgatgcaaattctggatgattcagactgttatcatggagaagatcttactgtcatattcaaatctcttttagttgctctcaaggcgacatcagcttctggcttgtatgatgacaatgtcagttgcagaattgagtctgttttgagcagatatttgtggaagaaacaaatacataaactattgtatggtggtaaaaagtcatcgattcaagaagtactgtgccttgatgaagagggttcacatttagagatatgtgatcaagatttcttcaagttggagattagtaaaataaaggaaaccagcctgcagtggctggctaaagcagaggaggttgcatgtgattctggtgagcttgcactggatcttgtgtatggacttatagctgaaggggaaaatctctctgtagactttgagaaggaactaaagttactgagggatcgcagtgtcctctactgcatctgctgtaagcccgacgataacagggccatgattgcatgcgaccagtgtgatgagtggtaccattttgattgcatcaacctgcttggaccccctccagaaagcttcttctgccctgcttgccatccaaacaatggtgaagaatctgtatcacttgcacgctcagaggatgatgaggatagatcaagcactggagccggagctcacacgccgccggacagagtggtggagcgagacttaataaagcttcttagctgccatagcggtagctcatggagcgagagcagaagggctcctcatcgaacagctagaaggcgtagtagtttcgtcggattgttatgatgtgcaggaaccttcttagcaccgtgaattgattctttttagttaggttagaagcaggaacgatccatcatctgctgttgtaatttgtagctgttgacaggaggtagatgtagcaaggcagagctgtaagaacccattattattgatcttgtagcagtctgaggttttggaaattgtatcatatactaccgccgttcttgaatatttgtcgcctattgtttcaaaaaacgacaaataaaaaaattaaaaaagaatggagagtatttttatgctgctgctatgcacggc

SEQ ID NO: 49183 - DNA, 6577 bp, Zea Mays
cccaaaccgctatccccaccttcttcctcacttgccattcttcgctgacctctaaacctaaccgcccatgggcaaaggggcccctcctgccgttgccacagccacctccgtccctgaggcgccggtcttccaccccacagacgaggagttcgccgaccccctcgcctacgtcgcccgtatccgccccctcgccgagccctacggcatctgccgcatcgtcccgccgtcctcatggtccccgccttacgccctcgacttcaaggctctctccttccccaccaagaggcagcccatccaccgcctcctcgcccgccccgcccccgctgaccccgacaccttcctcctcgactatcgccgtttcctcggggcttcctccgcacatcgccgtggccgcaggaagggccttcccaagtcgccctctctctcggatggtcgcccgctcgacctctgccgcctgttccatgctgtcaagcgcttcggcggttactacggtgcctgtgaggggaagcgctggggcgacgtcgtccgcctcgttgatgataaggcgccaatgcacatatcagagtgcgccaagcacgtgcttgcgcagctatattacgagcatctctatggctatgagaagttcgccaacccacagcatgggaacaagggaaggaagcagccacggcccggatctgatgatcgaccatcggtttctcgttcacaggacgaagagagcaacatatctgttactggggagatggttgaggaggttacaggccggaaaaggagaaatttctcacgcaaggaattaggcagagggacatctcatggtcgttatggccgtgttgttaacatcactggaaataatgtggcatctgctgttgcccagaagcggacgaggaggaactctgatgctgtggttaccacagtcgatgaggtgtctgctggtgtccggaagcggaaaaggagaaagtctgatgccgcgtctaccgtgtttaatgatgaagtggatcaagtttgtgagcagtgtagtagtgggttacatggggatgtcatgctcctatgcgatcgctgtgataaaggctggcatttgtactgtttgtcgccgccgctcgagcgagtgcctccagggaattggtattgctcagattgcctcaactccgatagagattgttttgggtttatccaaaggaggaagtcctgcttgcttgagactttccggcggtttgacgacagggtgagaaagagatggtttgggcagaggaatcccagccgtattcaaattgagaagcagttctgggagattgtggaggggaaggcaggggaacttgaggttatgtatgggagtgacttggacacttcaatttatgggagcgggtttcctcgtcttggtgatacagtgccatcatctatggacctagagacgtggcagaaatactgttcaagcccgtggaatttgaacaattttccgaatctgcctggctcagttcttaggacagtcaaggataaaattcctggtgtcatggtcccatggctctacatagggatgctgttttcgtcattttgttggcatgttgaggaccattgtttctattcaataaattatttgcattggggtgagccaaaatgttgggtatggggtgcctggagcaaaagcaaatgcctttgagcaggttatgcgccaggccttacctgatctgtttgatgcacaaccggatctgctttttcaccttgtcacaatgctgaatccatctattttacaagcaaatagcgttccagtatatagcgtgatgcaggaacctggaaacttcatcatcaccttccccaggtcattccatggtggcttcaatttaggtttgaactgtgccgaggctgtaaattttgcccctgctgattggttacctcatggtggaattggggctaatctatatcgtttataccgcaaagcgcctgtcttgtcacatgaggagcttctgtatgtggttgcaaagaatggtgtggatgctgagtcacttacccatttgaagggagaaataaaaaggctttttataaatgagagaagacgtcgagtagagctttggattaatgggactgtcaaatctagcctaatgttgccaaggattaatccaaactttatcggaagtgaagaggatcctacatgcattatttgtcgacagtatctgtatctttcagcagtctcctgtaactgtaggctgtcttcttatgtttgccttgagcactggaagcacctttgtgaatgcagtccgaagaagcattgcttactttatcgacacacccttgcagagttgggggatttagtgtgcgaggtctctttggttagcccccaaagggacaatgttatgcagaatccacacttgctcaatgatgtttatgtgccgtctaaaaaggtcaaagatcactatatattatatagacagcttgcagaagattgggtttcaaactctgaacatattctccagatgccatttgtggaaaggtcttatgccactgctttggaagaagctgaacaatttctttggggtgatcatgccatggattctgtccggaacataacagtaagactaacaaaggctatgaagtgggccttgggtgttagaaaatgtctctccaaaattcaggactttctgaaagatggctgctctgaaaaagtaaattatgtggaaatagaagaactagttgctacgaaatgtgccccgtgctgtgagcctagtcttacaaaattgcaggcgtatgcagaggaagcgaaattgctgattaatgaagtaaacaatgcactatcatctttcttaacagtagacaaattggaaacattatactcaagggtttcagaattcccagttaagctaacagaatcatcgactttgttttgggagttatcttctgcaaagtcctggttgaagaaagcaagtgattgccttgaacagaataaactgggcattatcgacatagatgtcctcaataaactaaaatcagagataatacaacttcgagttctacttccagagattgatcttatctcaaagctgtggaaagatgtggaatcatggcaaacccgttgtcaattatatctccaagacttccctgatctaaaggagctggagggttttctccttgctgcggatggtgccaactttagcattccagagctgaacattcttaagcaacattactcaaattgttgctcttgggtgagtcgtgctaagaacatactcagaaaactttatgctacgagtgactatcacaatgctgttgaggagttgacaggcattctgaaggaagcagaattactaggagtaaaagttgatgaattgcctattgtggagaaagaactaaagaggtccttatgtaggaagcaagcatctgaggcacttgcaacagtaatgccaatggaggtggttgaagaaattttaaaagaagcttcgatactacatattgaagaggagcaaccatttgatgatctgtctcggatgctcaaagaggccacttcctgggaagagaaggctagacttattcttgaacgatcagcttctctctctgagtttgaagaccatatgaggtgttcagagggaataagagttatccttccgtctaaactgcatatgaaagcagaggttgatattgctaaattgtggatagacaaatgtcaggcctatttgagaccaggctgcaataaacttgcatttggagactttcttaaagttgatgatatcaaggatttaatcaatcagcctgcaaatttgaaagtcattcttgacacttcagaacttaattctgttctcaacaatattgaaaaatgggaacacagttcactaagtctactcaataattttagagccttacttcatttgaatagtattggctctacagttgacacacttcaaagaaaattggaggagctgcaaggtaaaatgaacacagaaatagaagttggattatctcttggttttgagttcaaggttctttgggaactgaaggattcttcgttgatgctaagatggatattgaatgcactgtctctgtgctgtatgattcctttattgcaggatgttgatagattaattgaagaagcagtccaccttcctgcttccttagcagattgttctttggttacattgttgatgagggcattgtcttgtctaagaaaatcacttattttgcttcctggttctggaacatctgcaaaatccaaattggaagatgttgaaaatattctagcagaattcaaggaggttgatgttccttatcctatcatgactgccaagctggaggatgctgtaaacaatcataattcatggatagagcaatgcaataccttcttcatgctgtctgatggccagtcgtgggctatgctgcaaaatctcagggacaatgggcagtctgttgcatttgattgccctgagatggataaagttgttgatgaggttaaaaacgttgaagagtggctcaatcagtgccactgtactctacttctagatggaaataatagttctttgctctccatacttgtaaagataagaggattattggatgatgtttgcacgttatatgctgaggattgtatgaagttaagattatgtgctgtatgctcatgtgacatcggagataggctggcatctagatgtgtgacttgtcaagactggtaccatggctcctgcgtggaaaacctgtctgctactacacaaacgacaattgaatggatgtgttcattttgttcacttttacagagtgaggaccaattgaagaaccaactatctgtaaagatgtctaaaggaaactgccctgcacttgccgcacttgatgaactcatctcttctgcaaagggtttatacactgggattgaggaaattaatttgctaaaagaaattgttgataaggctcgtaacttgaatgcctacttgatgcaaattctggatgattcagactgttatcatggagaagatcttactgtcatattcaaatctcttttagttgctctcaaggcgacatcagcttctggcttgtatgatgacaatgtcagttgcagaattgagtctgttttgagcagatatttgtggaagaaacaaatacataaactattgtatggtggtaaaaagtcatcgattcaagaagtactgtgccttgatgaagaggtaataccgtttttattttgtgtaaagactagagttgtttttaaggtcatctctaggtgttcagtaatgggtaaagttgtggtgagatgtggaagtttccctatacaccatattaggccattcgccaatgagagtgatacctcataccactgtggggggctaaattcagagaaaacaaacagagaaaattccttatttgacactcaaaaaacttgctcttcccaatttagcactttaaaactgctactcccctgcatctcttcaatcatccatcttgctcaaaaactgctacaatgtccgcggccgtttcgaggagacgtgccaagaacccatgccaagattttccctacgttgaaacagaagagtggctggcgtgggcccatgttcgcatggacctattatcaatgattctcagaggcgtatcatcaagaacctgggttactccactgatgcagcaaggattgaccaaagagcacaagacatacagtgagctgttcaagacgactatcaatgatgttcatctttctgctctagcggcgatttttggctggaggacagataaaatggatgatccttgtgcctctggtgcattgggttcacatttagagatatgtgatcaagatttcttcaagttggagattagtaaaataaaggaaaccagcctgcagtggctggctaaagcagaggaggttgcatgtgattctggtgagcttgcactggatcttgtgtatggacttatagctgaaggggaaaatctctctgtagactttgagaaggaactaaagttactgagggatcgcagtgtcctctactgcatctgctgtaagcccgacgataacagggccatgattgcatgcgaccagtgtgatgagtggtaccattttgattgcatcaacctgcttggaccccctccagaaagcttcttctgccctgcttgccatccaaacaatggtgaagaatctgtatcacttgcacgctcagaggatgatgaggatagatcaagcactggagccggagctcacacgccgccggacagagtggtggagcgagacttaataaagcttcttagctgccatagcggtagctcatggagcgagagcagaagggctcctcatcgaacagctagaaggcgtagtagtttcgtcggattgttatgatgtgcaggaaccttcttagcaccgtgaattgattctttttagttaggttagaagcaggaacgatccatcatctgctgttgtaatttgtagctgttgacaggaggtagatgtagcaaggcagagctgtaagaacccattattattgatcttgtagcagtctgaggttttggaaattgtatcatatactaccgccgttcttgaatatttgtcgcctattgtttcaaaaaacgacaaataaaaaaattaaaaaagaatggagagtatttttatgctgctgctatgcacggc

SEQ ID NO: 49184 - DNA, 5833 bp, Zea Mays
cccaccttcttcctcacttgccattcttcgctgacctctaaacctaaccgcccatgggcaaaggggcccctcctgccgttgccacagccacctccgtccctgaggcgccggtcttccaccccacagacgaggagttcgccgaccccctcgcctacgtcgcccgtatccgccccctcgccgagccctacggcatctgccgcatcgtcccgccgtcctcatggtccccgccttacgccctcgacttcaaggctctctccttccccaccaagaggcagcccatccaccgcctcctcgcccgccccgcccccgctgaccccgacaccttcctcctcgactatcgccgtttcctcggggcttcctccgcacatcgccgtggccgcaggaagggccttcccaagtcgccctctctctcggatggtcgcccgctcgacctctgccgcctgttccatgctgtcaagcgcttcggcggttactacggtgcctgtgaggggaagcgctggggcgacgtcgtccgcctcgttgatgataaggcgccaatgcacatatcagagtgcgccaagcacgtgcttgcgcagctatattacgagcatctctatggctatgagaagttcgccaacccacagcatgggaacaagggaaggaagcagccacggcccggatctgatgatcgaccatcggtttctcgttcacaggacgaagagagcaacatatctgttactggggagatggttgaggaggttacaggccggaaaaggagaaatttctcacgcaaggaattaggcagagggacatctcatggtcgttatggccgtgttgttaacatcactggaaataatgtggcatctgctgttgcccagaagcggacgaggaggaactctgatgctgtggttaccacagtcgatgaggtgtctgctggtgtccggaagcggaaaaggagaaagtctgatgccgcgtctaccgtgtttaatgatgaagtggatcaagtttgtgagcagtgtagtagtgggttacatggggatgtcatgctcctatgcgatcgctgtgataaaggctggcatttgtactgtttgtcgccgccgctcgagcgagtgcctccagggaattggtattgctcagattgcctcaactccgatagagattgttttgggtttatccaaaggaggaagtcctgcttgcttgagactttccggcggtttgacgacagggtgagaaagagatggtttgggcagaggaatcccagccgtattcaaattgagaagcagttctgggagattgtggaggggaaggcaggggaacttgaggttatgtatgggagtgacttggacacttcaatttatgggagcgggtttcctcgtcttggtgatacagtgccatcatctatggacctagagacgtggcagaaatactgttcaagcccgtggaatttgaacaattttccgaatctgcctggctcagttcttaggacagtcaaggataaaattcctggtgtcatggtcccatggctctacatagggatgctgttttcgtcattttgttggcatgttgaggaccattgtttctattcaataaattatttgcattggggtgagccaaaatgttgggtatggggtgcctggagcaaaagcaaatgcctttgagcaggttatgcgccaggccttacctgatctgtttgatgcacaaccggatctgctttttcaccttgtcacaatgctgaatccatctattttacaagcaaatagcgttccagtatatagcgtgatgcaggaacctggaaacttcatcatcaccttccccaggtcattccatggtggcttcaatttagaatggtgtggatgctgagtcacttacccatttgaagggagaaataaaaaggctttttataaatgagagaagacgtcgagtagagctttggattaatgggactgtcaaatctagcctaatgttgccaaggattaatccaaactttatcggaagtgaagaggatcctacatgcattatttgtcgacagtatctgtatctttcagcagtctcctgtaactgtaggctgtcttcttatgtttgccttgagcactggaagcacctttgtgaatgcagtccgaagaagcattgcttactttatcgacacacccttgcagagttgggggatttagtgtgcgaggtctctttggttagcccccaaagggacaatgttatgcagaatccacacttgctcaatgatgtttatgtgccgtctaaaaaggtcaaagatcactatatattatatagacagcttgcagaagattgggtttcaaactctgaacatattctccagatgccatttgtggaaaggtcttatgccactgctttggaagaagctgaacaatttctttggggtgatcatgccatggattctgtccggaacataacagtaagactaacaaaggctatgaagtgggccttgggtgttagaaaatgtctctccaaaattcaggactttctgaaagatggctgctctgaaaaagtaaattatgtggaaatagaagaactagttgctacgaaatgtgccccgtgctgtgagcctagtcttacaaaattgcaggcgtatgcagaggaagcgaaattgctgattaatgaagtaaacaatgcactatcatctttcttaacagtagacaaattggaaacattatactcaagggtttcagaattcccagttaagctaacagaatcatcgactttgttttgggagttatcttctgcaaagtcctggttgaagaaagcaagtgattgccttgaacagaataaactgggcattatcgacatagatgtcctcaataaactaaaatcagagataatacaacttcgagttctacttccagagattgatcttatctcaaagctgtggaaagatgtggaatcatggcaaacccgttgtcaattatatctccaagacttccctgatctaaaggagctggagggttttctccttgctgcggatggtgccaactttagcattccagagctgaacattcttaagcaacattactcaaattgttgctcttgggtgagtcgtgctaagaacatactcagaaaactttatgctacgagtgactatcacaatgctgttgaggagttgacaggcattctgaaggaagcagaattactaggagtaaaagttgatgaattgcctattgtggagaaagaactaaagaggtccttatgtaggaagcaagcatctgaggcacttgcaacagtaatgccaatggaggtggttgaagaaattttaaaagaagcttcgatactacatattgaagaggagcaaccatttgatgatctgtctcggatgctcaaagaggccacttcctgggaagagaaggctagacttattcttgaacgatcagcttctctctctgagtttgaagaccatatgaggtgttcagagggaataagagttatccttccgtctaaactgcatatgaaagcagaggttgatattgctaaattgtggatagacaaatgtcaggcctatttgagaccaggctgcaataaacttgcatttggagactttcttaaagttgatgatatcaaggatttaatcaatcagcctgcaaatttgaaagtcattcttgacacttcagaacttaattctgttctcaacaatattgaaaaatgggaacacagttcactaagtctactcaataattttagagccttacttcatttgaatagtattggctctacagttgacacacttcaaagaaaattggaggagctgcaaggtaaaatgaacacagaaatagaagttggattatctcttggttttgagttcaaggttctttgggaactgaaggattcttcgttgatgctaagatggatattgaatgcactgtctctgtgctgtatgattcctttattgcaggatgttgatagattaattgaagaagcagtccaccttcctgcttccttagcagattgttctttggttacattgttgatgagggcattgtcttgtctaagaaaatcacttattttgcttcctggttctggaacatctgcaaaatccaaattggaagatgttgaaaatattctagcagaattcaaggaggttgatgttccttatcctatcatgactgccaagctggaggatgctgtaaacaatcataattcatggatagagcaatgcaataccttcttcatgctgtctgatggccagtcgtgggctatgctgcaaaatctcagggacaatgggcagtctgttgcatttgattgccctgagatggataaagttgttgatgaggttaaaaacgttgaagagtggctcaatcagtgccactgtactctacttctagatggaaataatagttctttgctctccatacttgtaaagataagaggattattggatgatgtttgcacgttatatgctgaggattgtatgaagttaagattatgtgctgtatgctcatgtgacatcggagataggctggcatctagatgtgtgacttgtcaagactggtaccatggctcctgcgtggaaaacctgtctgctactacacaaacgacaattgaatggatgtgttcattttgttcacttttacagagtgaggaccaattgaagaaccaactatctgtaaagatgtctaaaggaaactgccctgcacttgccgcacttgatgaactcatctcttctgcaaagggtttatacactgggattgaggaaattaatttgctaaaagaaattgttgataaggctcgtaacttgaatgcctacttgatgcaaattctggatgattcagactgttatcatggagaagatcttactgtcatattcaaatctcttttagttgctctcaaggcgacatcagcttctggcttgtatgatgacaatgtcagttgcagaattgagtctgttttgagcagatatttgtggaagaaacaaatacataaactattgtatggtggtaaaaagtcatcgattcaagaagtactgtgccttgatgaagagggttcacatttagagatatgtgatcaagatttcttcaagttggagattagtaaaataaaggaaaccagcctgcagtggctggctaaagcagaggaggttgcatgtgattctggtgagcttgcactggatcttgtgtatggacttatagctgaaggggaaaatctctctgtagactttgagaaggaactaaagttactgagggatcgcagtgtcctctactgcatctgctgtaagcccgacgataacagggccatgattgcatgcgaccagtgtgatgagtggtaccattttgattgcatcaacctgcttggaccccctccagaaagcttcttctgccctgcttgccatccaaacaatggtgaagaatctgtatcacttgcacgctcagaggatgatgaggatagatcaagcactggagccggagctcacacgccgccggacagagtggtggagcgagacttaataaagcttcttagctgccatagcggtagctcatggagcgagagcagaagggctcctcatcgaacagctagaaggcgtagtagtttcgtcggattgttatgatgtgcaggaaccttcttagcaccgtgaattgattctttttagttaggttagaagcaggaacgatccatcatctgctgttgtaatttgtagctgttgacaggaggtagatgtagcaaggcagagctgtaagaacccattattattgatcttgtagcagtctgaggttttggaaattgtatcatatactaccgccgttcttgaatatttgtcgcctattgtttcaaaaaacgacaaataaaaaaattaaaaaagaatggagagtatttttatgctgctgctatgcacggc

SEQ ID NO: 49185 - DNA, 6370 bp, Zea Mays
ccaccttcttcctcacttgccattcttcgctgacctctaaacctaaccgcccatgggcaaaggggcccctcctgccgttgccacagccacctccgtccctgaggcgccggtcttccaccccacagacgaggagttcgccgaccccctcgcctacgtcgcccgtatccgccccctcgccgagccctacggcatctgccgcatcgtcccgccgtcctcatggtccccgccttacgccctcgacttcaaggctctctccttccccaccaagaggcagcccatccaccgcctcctcgcccgccccgcccccgctgaccccgacaccttcctcctcgactatcgccgtttcctcggggcttcctccgcacatcgccgtggccgcaggaagggccttcccaagtcgccctctctctcggatggtcgcccgctcgacctctgccgcctgttccatgctgtcaagcgcttcggcggttactacggtgcctgtgaggggaagcgctggggcgacgtcgtccgcctcgttgatgataaggcgccaatgcacatatcagagtgcgccaagcacgtgcttgcgcagctatattacgagcatctctatggctatgagaagttcgccaacccacagcatgggaacaagggaaggaagcagccacggcccggatctgatgatcgaccatcggtttctcgttcacaggacgaagagagcaacatatctgttactggggagatggttgaggaggttacaggccggaaaaggagaaatttctcacgcaaggaattaggcagagggacatctcatggtcgttatggccgtgttgttaacatcactggaaataatgtggcatctgctgttgcccagaagcggacgaggaggaactctgatgctgtggttaccacagtcgatgaggtgtctgctggtgtccggaagcggaaaaggagaaagtctgatgccgcgtctaccgtgtttaatgatgaagtggatcaagtttgtgagcagtgtagtagtgggttacatggggatgtcatgctcctatgcgatcgctgtgataaaggctggcatttgtactgtttgtcgccgccgctcgagcgagtgcctccagggaattggtattgctcagattgcctcaactccgatagagattgttttgggtttatccaaaggaggaagtcctgcttgcttgagactttccggcggtttgacgacagggtgagaaagagatggtttgggcagaggaatcccagccgtattcaaattgagaagcagttctgggagattgtggaggggaaggcaggggaacttgaggttatgtatgggagtgacttggacacttcaatttatgggagcgggtttcctcgtcttggtgatacagtgccatcatctatggacctagagacgtggcagaaatactgttcaagcccgtggaatttgaacaattttccgaatctgcctggctcagttcttaggacagtcaaggataaaattcctggtgtcatggtcccatggctctacatagggatgctgttttcgtcattttgttggcatgttgaggaccattgtttctattcaataaattatttgcattggggtgagccaaaatgttgggtatggggtgcctggagcaaaagcaaatgcctttgagcaggttatgcgccaggccttacctgatctgtttgatgcacaaccggatctgctttttcaccttgtcacaatgctgaatccatctattttacaagcaaatagcgttccagtatatagcgtgatgcaggaacctggaaacttcatcatcaccttccccaggtcattccatggtggcttcaatttaggtttgaactgtgccgaggctgtaaattttgcccctgctgattggttacctcatggtggaattggggctaatctatatcgtttataccgcaaagcgcctgtcttgtcacatgaggagcttctgtatgtggttgcaaagaatggtgtggatgctgagtcacttacccatttgaagggagaaataaaaaggctttttataaatgagagaagacgtcgagtagagctttggattaatgggactgtcaaatctagcctaatgttgccaaggattaatccaaactttatcggaagtgaagaggatcctacatgcattatttgtcgacagtatctgtatctttcagcagtctcctgtaactgtaggctgtcttcttatgtttgccttgagcactggaagcacctttgtgaatgcagtccgaagaagcattgcttactttatcgacacacccttgcagagttgggggatttagtgtgcgaggtctctttggttagcccccaaagggacaatgttatgcagaatccacacttgctcaatgatgtttatgtgccgtctaaaaaggtcaaagatcactatatattatatagacagcttgcagaagattgggtttcaaactctgaacatattctccagatgccatttgtggaaaggtcttatgccactgctttggaagaagctgaacaatttctttggggtgatcatgccatggattctgtccggaacataacagtaagactaacaaaggctatgaagtgggccttgggtgttagaaaatgtctctccaaaattcaggactttctgaaagatggctgctctgaaaaagtaaattatgtggaaatagaagaactagttgctacgaaatgtgccccgtgctgtgagcctagtcttacaaaattgcaggcgtatgcagaggaagcgaaattgctgattaatgaagtaaacaatgcactatcatctttcttaacagtagacaaattggaaacattatactcaagggtttcagaattcccagttaagctaacagaatcatcgactttgttttgggagttatcttctgcaaagtcctggttgaagaaagcaagtgattgccttgaacagaataaactgggcattatcgacatagatgtcctcaataaactaaaatcagagataatacaacttcgagttctacttccagagattgatcttatctcaaagctgtggaaagatgtggaatcatggcaaacccgttgtcaattatatctccaagacttccctgatctaaaggagctggagggttttctccttgctgcggatggtgccaactttagcattccagagctgaacattcttaagcaacattactcaaattgttgctcttgggtgagtcgtgctaagaacatactcagaaaactttatgctacgagtgactatcacaatgctgttgaggagttgacagttgatgaattgcctattgtggagaaagaactaaagaggtccttatgtaggaagcaagcatctgaggcacttgcaacagtaatgccaatggaggtggttgaagaaattttaaaagaagcttcgatactacatattgaagaggagcaaccatttgatgatctgtctcggatgctcaaagaggccacttcctgggaagagaaggctagacttattcttgaacgatcagcttctctctctgagtttgaagaccatatgaggtgttcagagggaataagagttatccttccgtctaaactgcatatgaaagcagaggttgatattgctaaattgtggatagacaaatgtcaggcctatttgagaccaggctgcaataaacttgcatttggagactttcttaaagttgatgatatcaaggatttaatcaatcagcctgcaaatttgaaagtcattcttgacacttcagaacttaattctgttctcaacaatattgaaaaatgggaacacagttcactaagtctactcaataattttagagccttacttcatttgaatagtattggctctacagttgacacacttcaaagaaaattggaggagctgcaaggtaaaatgaacacagaaatagaagttggattatctcttggttttgagttcaaggttctttgggaactgaaggattcttcgttgatgctaagatggatattgaatgcactgtctctgtgctgtatgattcctttattgcaggatgttgatagattaattgaagaagcagtccaccttcctgcttccttagcagattgttctttggttacattgttgatgagggcattgtcttgtctaagaaaatcacttattttgcttcctggttctggaacatctgcaaaatccaaattggaagatgttgaaaatattctagcagaattcaaggaggttgatgttccttatcctatcatgactgccaagctggaggatgctgtaaacaatcataattcatggatagagcaatgcaataccttcttcatgctgtctgatggccagtcgtgggctatgctgcaaaatctcagggacaatgggcagtctgttgcatttgattgccctgagatggataaagttgttgatgaggttaaaaacgttgaagagtggctcaatcagtgccactgtactctacttctagatggaaataatagttctttgctctccatacttgtaaagataagaggattattggatgatgtttgcacgttatatgctgaggattgtatgaagttaagattatgtgctgtatgctcatgtgacatcggagataggctggcatctagatgtgtgacttgtcaagactggtaccatggctcctgcgtggaaaacctgtctgctactacacaaacgacaattgaatggatgtgttcattttgttcacttttacagagtgaggaccaattgaagaaccaactatctgtaaagatgtctaaaggaaactgccctgcacttgccgcacttgatgaactcatctcttctgcaaagggtttatacactgggattgaggaaattaatttgctaaaagaaattgttgataaggctcgtaacttgaatgcctacttgatgcaaattctggatgattcagactgttatcatggagaagatcttactgtcatattcaaatctcttttagttgctctcaaggtgataattatcaaacttctcattctgaaaagcccttgttctttgtctgtttaaaaaggcgaggcctaggtgctgggcagtgctttgtctaacttttttccgtttagagatgttttggacttgatgtatgtaaaaacgggacaaattatagacgaggaaagataaacttcgatcatattatttatggatgcatgttgatatcttccttttttctgttctgacatgatactctaacagtccacagaaagtacaaacactctgcaacgcctaggcacaaggtggaggcccaaccacctgtatagcacctatagagctttttttaacattgatgctacatggttccaattgtgaattgatttccgtgtgaaagtaactaataaatgtgctattgctgtttaggatgagtaactacatcttttggctattttgcttggtaggcgacatcagcttctggcttgtatgatgacaatgtcagttgcagaattgagtctgttttgagcagatatttgtggaagaaacaaatacataaactattgtatggtggtaaaaagtcatcgattcaagaagtactgtgccttgatgaagagggttcacatttagagatatgtgatcaagatttcttcaagttggagattagtaaaataaaggaaaccagcctgcagtggctggctaaagcagaggaggttgcatgtgattctggtgagcttgcactggatcttgtgtatggacttatagctgaaggggaaaatctctctgtagactttgagaaggaactaaagttactgagggatcgcagtgtcctctactgcatctgctgtaagcccgacgataacagggccatgattgcatgcgaccagtgtgatgagtggtaccattttgattgcatcaacctgcttggaccccctccagaaagcttcttctgccctgcttgccatccaaacaatggtgaagaatctgtatcacttgcacgctcagaggatgatgaggatagatcaagcactggagccggagctcacacgccgccggacagagtggtggagcgagacttaataaagcttcttagctgccatagcggtagctcatggagcgagagcagaagggctcctcatcgaacagctagaaggcgtagtagtttcgtcggattgttatgatgtgcaggaaccttcttagcaccgtgaattgattctttttagttaggttagaagcaggaacgatccatcatctgctgttgtaatttgtagctgttgacaggaggtagatgtagcaaggcagagctgtaagaacccattattattgatcttgtagcagtctgaggttttggaaattgtatcatatactaccgccgttcttgaatatttgtcgcctattgtttcaaaaaacgacaaataaaaaaattaaaaaagaatggagagtatttttatgctgctgctatgcacggc

SEQ ID NO: 49186 - DNA, 5984 bp, Zea Mays
ccaccttcttcctcacttgccattcttcgctgacctctaaacctaaccgcccatgggcaaaggggcccctcctgccgttgccacagccacctccgtccctgaggcgccggtcttccaccccacagacgaggagttcgccgaccccctcgcctacgtcgcccgtatccgccccctcgccgagccctacggcatctgccgcatcgtcccgccgtcctcatggtccccgccttacgccctcgacttcaaggctctctccttccccaccaagaggcagcccatccaccgcctcctcgcccgccccgcccccgctgaccccgacaccttcctcctcgactatcgccgtttcctcggggcttcctccgcacatcgccgtggccgcaggaagggccttcccaagtcgccctctctctcggatggtcgcccgctcgacctctgccgcctgttccatgctgtcaagcgcttcggcggttactacggtgcctgtgaggggaagcgctggggcgacgtcgtccgcctcgttgatgataaggcgccaatgcacatatcagagtgcgccaagcacgtgcttgcgcagctatattacgagcatctctatggctatgagaagttcgccaacccacagcatgggaacaagggaaggaagcagccacggcccggatctgatgatcgaccatcggtttctcgttcacaggacgaagagagcaacatatctgttactggggagatggttgaggaggttacaggccggaaaaggagaaatttctcacgcaaggaattaggcagagggacatctcatggtcgttatggccgtgttgttaacatcactggaaataatgtggcatctgctgttgcccagaagcggacgaggaggaactctgatgctgtggttaccacagtcgatgaggtgtctgctggtgtccggaagcggaaaaggagaaagtctgatgccgcgtctaccgtgtttaatgatgaagtggatcaagtttgtgagcagtgtagtagtgggttacatggggatgtcatgctcctatgcgatcgctgtgataaaggctggcatttgtactgtttgtcgccgccgctcgagcgagtgcctccagggaattggtattgctcagattgcctcaactccgatagagattgttttgggtttatccaaaggaggaagtcctgcttgcttgagactttccggcggtttgacgacagggtgagaaagagatggtttgggcagaggaatcccagccgtattcaaattgagaagcagttctgggagattgtggaggggaaggcaggggaacttgaggttatgtatgggagtgacttggacacttcaatttatgggagcgggtttcctcgtcttggtgatacagtgccatcatctatggacctagagacgtggcagaaatactgttcaagcccgtggaatttgaacaattttccgaatctgcctggctcagttcttaggacagtcaaggataaaattcctggtgtcatggtcccatggctctacatagggatgctgttttcgtcattttgttggcatgttgaggaccattgtttctattcaataaattatttgcattggggtgagccaaaatgttgggtatggggtgcctggagcaaaagcaaatgcctttgagcaggttatgcgccaggccttacctgatctgtttgatgcacaaccggatctgctttttcaccttgtcacaatgctgaatccatctattttacaagcaaatagcgttccagtatatagcgtgatgcaggaacctggaaacttcatcatcaccttccccaggtcattccatggtggcttcaatttaggtttgaactgtgccgaggctgtaaattttgcccctgctgattggttacctcatggtggaattggggctaatctatatcgtttataccgcaaagcgcctgtcttgtcacatgaggagcttctgtatgtggttgcaaagaatggtgtggatgctgagtcacttacccatttgaagggagaaataaaaaggctttttataaatgagagaagacgtcgagtagagctttggattaatgggactgtcaaatctagcctaatgttgccaaggattaatccaaactttatcggaagtgaagaggatcctacatgcattatttgtcgacagtatctgtatctttcagcagtctcctgtaactgtaggctgtcttcttatgtttgccttgagcactggaagcacctttgtgaatgcagtccgaagaagcattgcttactttatcgacacacccttgcagagttgggggatttagtgtgcgaggtctctttggttagcccccaaagggacaatgttatgcagaatccacacttgctcaatgatgtttatgtgccgtctaaaaaggtcaaagatcactatatattatatagacagcttgcagaagattgggtttcaaactctgaacatattctccagatgccatttgtggaaaggtcttatgccactgctttggaagaagctgaacaatttctttggggtgatcatgccatggattctgtccggaacataacagtaagactaacaaaggctatgaagtgggccttgggtgttagaaaatgtctctccaaaattcaggactttctgaaagatggctgctctgaaaaagtaaattatgtggaaatagaagaactagttgctacgaaatgtgccccgtgctgtgagcctagtcttacaaaattgcaggcgtatgcagaggaagcgaaattgctgattaatgaagtaaacaatgcactatcatctttcttaacagtagacaaattggaaacattatactcaagggtttcagaattcccagttaagctaacagaatcatcgactttgttttgggagttatcttctgcaaagtcctggttgaagaaagcaagtgattgccttgaacagaataaactgggcattatcgacatagatgtcctcaataaactaaaatcagagataatacaacttcgagttctacttccagagattgatcttatctcaaagctgtggaaagatgtggaatcatggcaaacccgttgtcaattatatctccaagacttccctgatctaaaggagctggagggttttctccttgctgcggatggtgccaactttagcattccagagctgaacattcttaagcaacattactcaaattgttgctcttgggtgagtcgtgctaagaacatactcagaaaactttatgctacgagtgactatcacaatgctgttgaggagttgacaggcattctgaaggaagcagaattactaggagtaaaagttgatgaattgcctattgtggagaaagaactaaagaggtccttatgtaggaagcaagcatctgaggcacttgcaacagtaatgccaatggaggtggttgaagaaattttaaaagaagcttcgattttcttacctgccagactacatattgaagaggagcaaccatttgatgatctgtctcggatgctcaaagaggccacttcctgggaagagaaggctagacttattcttgaacgatcagcttctctctctgagtttgaagaccatatgaggtgttcagagggaataagagttatccttccgtctaaactgcatatgaaagcagaggttgatattgctaaattgtggatagacaaatgtcaggcctatttgagaccaggctgcaataaacttgcatttggagactttcttaaagttgatgatatcaaggatttaatcaatcagcctgcaaatttgaaagtcattcttgacacttcagaacttaattctgttctcaacaatattgaaaaatgggaacacagttcactaagtctactcaataattttagagccttacttcatttgaatagtattggctctacagttgacacacttcaaagaaaattggaggagctgcaaggtaaaatgaacacagaaatagaagttggattatctcttggttttgagttcaaggttctttgggaactgaaggattcttcgttgatgctaagatggatattgaatgcactgtctctgtgctgtatgattcctttattgcaggatgttgatagattaattgaagaagcagtccaccttcctgcttccttagcagattgttctttggttacattgttgatgagggcattgtcttgtctaagaaaatcacttattttgcttcctggttctggaacatctgcaaaatccaaattggaagatgttgaaaatattctagcagaattcaaggaggttgatgttccttatcctatcatgactgccaagctggaggatgctgtaaacaatcataattcatggatagagcaatgcaataccttcttcatgctgtctgatggccagtcgtgggctatgctgcaaaatctcagggacaatgggcagtctgttgcatttgattgccctgagatggataaagttgttgatgaggttaaaaacgttgaagagtggctcaatcagtgccactgtactctacttctagatggaaataatagttctttgctctccatacttgtaaagataagaggattattggatgatgtttgcacgttatatgctgaggattgtatgaagttaagattatgtgctgtatgctcatgtgacatcggagataggctggcatctagatgtgtgacttgtcaagactggtaccatggctcctgcgtggaaaacctgtctgctactacacaaacgacaattgaatggatgtgttcattttgttcacttttacagagtgaggaccaattgaagaaccaactatctgtaaagatgtctaaaggaaactgccctgcacttgccgcacttgatgaactcatctcttctgcaaagggtttatacactgggattgaggaaattaatttgctaaaagaaattgttgataaggctcgtaacttgaatgcctacttgatgcaaattctggatgattcagactgttatcatggagaagatcttactgtcatattcaaatctcttttagttgctctcaaggcgacatcagcttctggcttgtatgatgacaatgtcagttgcagaattgagtctgttttgagcagatatttgtggaagaaacaaatacataaactattgtatggtggtaaaaagtcatcgattcaagaagtactgtgccttgatgaagagggttcacatttagagatatgtgatcaagatttcttcaagttggagattagtaaaataaaggaaaccagcctgcagtggctggctaaagcagaggaggttgcatgtgattctggtgagcttgcactggatcttgtgtatggacttatagctgaaggggaaaatctctctgtagactttgagaaggaactaaagttactgagggatcgcagtgtcctctactgcatctgctgtaagcccgacgataacagggccatgattgcatgcgaccagtgtgatgagtggtaccattttgattgcatcaacctgcttggaccccctccagaaagcttcttctgccctgcttgccatccaaacaatggtgaagaatctgtatcacttgcacgctcagaggatgatgaggatagatcaagcactggagccggagctcacacgccgccggacagagtggtggagcgagacttaataaagcttcttagctgccatagcggtagctcatggagcgagagcagaagggctcctcatcgaacagctagaaggcgtagtagtttcgtcggattgttatgatgtgcaggaaccttcttagcaccgtgaattgattctttttagttaggttagaagcaggaacgatccatcatctgctgttgtaatttgtagctgttgacaggaggtagatgtagcaaggcagagctgtaagaacccattattattgatcttgtagcagtctgaggttttggaaattgtatcatatactaccgccgttcttgaatatttgtcgcctattgtttcaaaaaacgacaaataaaaaaattaaaaaagaatggagagtatttttatgctgctgctatgcacggc

SEQ ID NO: 49187 - DNA, 6734 bp, Zea Mays
caccttcttcctcacttgccattcttcgctgacctctaaacctaaccgcccatgggcaaaggggcccctcctgccgttgccacagccacctccgtccctgaggcgccggtcttccaccccacagacgaggagttcgccgaccccctcgcctacgtcgcccgtatccgccccctcgccgagccctacggcatctgccgcatcgtcccgccgtcctcatggtccccgccttacgccctcgacttcaaggctctctccttccccaccaagaggcagcccatccaccgcctcctcgcccgccccgcccccgctgaccccgacaccttcctcctcgactatcgccgtttcctcggggcttcctccgcacatcgccgtggccgcaggaagggccttcccaagtcgccctctctctcggatggtcgcccgctcgacctctgccgcctgttccatgctgtcaagcgcttcggcggttactacggtgcctgtgaggggaagcgctggggcgacgtcgtccgcctcgttgatgataaggcgccaatgcacatatcagagtgcgccaagcacgtgcttgcgcagctatattacgagcatctctatggctatgagaagttcgccaacccacagcatgggaacaagggaaggaagcagccacggcccggatctgatgatcgaccatcggtttctcgttcacaggacgaagagagcaacatatctgttactggggagatggttgaggaggttacaggccggaaaaggagaaatttctcacgcaaggaattaggcagagggacatctcatggtcgttatggccgtgttgttaacatcactggaaataatgtggcatctgctgttgcccagaagcggacgaggaggaactctgatgctgtggttaccacagtcgatgaggtgtctgctggtgtccggaagcggaaaaggagaaagtctgatgccgcgtctaccgtgtttaatgatgaagtggatcaagtttgtgagcagtgtagtagtgggttacatggggatgtcatgctcctatgcgatcgctgtgataaaggctggcatttgtactgtttgtcgccgccgctcgagcgagtgcctccagggaattggtattgctcagattgcctcaactccgatagagattgttttgggtttatccaaaggaggaagtcctgcttgcttgagactttccggcggtttgacgacagggtgagaaagagatggtttgggcagaggaatcccagccgtattcaaattgagaagcagttctgggagattgtggaggggaaggcaggggaacttgaggttatgtatgggagtgacttggacacttcaatttatgggagcgggtttcctcgtcttggtgatacagtgccatcatctatggacctagagacgtggcagaaatactgttcaagcccgtggaatttgaacaattttccgaatctgcctggctcagttcttaggacagtcaaggataaaattcctggtgtcatggtcccatggctctacatagggatgctgttttcgtcattttgttggcatgttgaggaccattgtttctattcaataaattatttgcattggggtgagccaaaatgttgggtatggggtgcctggagcaaaagcaaatgcctttgagcaggttatgcgccaggccttacctgatctgtttgatgcacaaccggatctgctttttcaccttgtcacaatgctgaatccatctattttacaagcaaatagcgttccagtatatagcgtgatgcaggaacctggaaacttcatcatcaccttccccaggtcattccatggtggcttcaatttaggtttgaactgtgccgaggctgtaaattttgcccctgctgattggttacctcatggtggaattggggctaatctatatcgtttataccgcaaagcgcctgtcttgtcacatgaggagcttctgtatgtggttgcaaagaatggtgtggatgctgagtcacttacccatttgaagggagaaataaaaaggctttttataaatgagagaagacgtcgagtagagctttggattaatgggactgtcaaatctagcctaatgttgccaaggattaatccaaactttatcggaagtgaagaggatcctacatgcattatttgtcgacagtatctgtatctttcagcagtctcctgtaactgtaggctgtcttcttatgtttgccttgagcactggaagcacctttgtgaatgcagtccgaagaagcattgcttactttatcgacacacccttgcagagttgggggatttagtgtgcgaggtctctttggttagcccccaaagggacaatgttatgcagaatccacacttgctcaatgatgtttatgtgccgtctaaaaaggtcaaagatcactatatattatatagacagcttgcagaagattgggtttcaaactctgaacatattctccagatgccatttgtggaaaggtcttatgccactgctttggaagaagctgaacaatttctttggggtgatcatgccatggattctgtatgtttctttgacaaagcatgctgtgacctgtttacatgtcttcaagtattatatgacttatattaactgtaatactgtctatgccttaggtccggaacataacagtaagactaacaaaggctatgaagtgggccttgggtgttagaaaatgtctctccaaaattcaggactttctgaaagatggctgctctgaaaaagtaaattatgtggaaatagaagaactagttgctacgaaatgtgccccgtgctgtgagcctagtcttacaaaattgcaggtatgcaaccctgggtacatttgtagcatgtacttggtcttaaaatatactgtgatgttttaatttcccctacccactgcaggcgtatgcagaggaagcgaaattgctgattaatgaagtaaacaatgcactatcatctttcttaacagtagacaaattggaaacattatactcaagggtttcagaattcccagttaagctaacagaatcatcgactttgttttgggagttatcttctgcaaagtcctggttgaagaaagcaagtgattgccttgaacagaataaactgggcattatcgacatagatgtcctcaataaactaaaatcagagataatacaacttcgagttctacttccagagattgatcttatctcaaagctgtggaaagatgtggaatcatggcaaacccgttgtcaattatatctccaagacttccctgatctaaaggagctggagggttttctccttgctgcggatggtgccaactttagcattccagagctgaacattcttaagcaacattactcaaattgttgctcttgggtgagtcgtgctaagaacatactcagaaaactttatgctacgagtgactatcacaatgctgttgaggagttgacaggcattctgaaggaagcagaattactaggagtaaaagttgatgaattgcctattgtggagaaagaactaaagaggtccttatgtaggaagcaagcatctgaggcacttgcaacagtaatgccaatggaggtggttgaagaaattttaaaagaagcttcgattttcttacctgccagactacatattgaagaggagcaaccatttgatgatctgtctcggatgctcaaagaggccacttcctgggaagagaaggctagacttattcttgaacgatcagcttctctctctgagtttgaagaccatatgaggtgttcagagggaataagagttatccttccgtctaaactgcatatgaaagcagaggttgatattgctaaattgtggatagacaaatgtcaggcctatttgagaccaggctgcaataaacttgcatttggagactttcttaaagttgatgatatcaaggatttaatcaatcagcctgcaaatttgaaagtcattcttgacacttcagaacttaattctgttctcaacaatattgaaaaatgggaacacagttcactaagtctactcaataattttagagccttacttcatttgaatagtattggctctacagttgacacacttcaaagaaaattggaggagctgcaaggtaaaatgaacacagaaatagaagttggattatctcttggttttgagttcaaggttctttgggaactgaaggattcttcgttgatgctaagatggatattgaatgcactgtctctgtgctgtatgattcctttattgcaggatgttgatagattaattgaagaagcagtccaccttcctgcttccttagcagattgttctttggttacattgttgatgagggcattgtcttgtctaagaaaatcacttattttgcttcctggttctggaacatctgcaaaatccaaattggaagatgttgaaaatattctagcagaattcaaggaggttgatgttccttatcctatcatgactgccaagctggaggatgctgtaaacaatcataattcatggatagagcaatgcaataccttcttcatgctgtctgatggccagtcgtgggctatgctgcaaaatctcagggacaatgggcagtctgttgcatttgattgccctgagatggataaagttgttgatgaggttaaaaacgttgaagagtggctcaatcagtgccactgtactctacttctagatggaaataatagttctttgctctccatacttgtaaagataagaggattattggatgatgtttgcacgttatatgctgaggattgtatgaagttaagattatgtgctgtatgctcatgtgacatcggagataggctggcatctagatgtgtgacttgtcaagactggtaccatggctcctgcgtggaaaacctgtctgctactacacaaacgacaattgaatggatgtgttcattttgttcacttttacagagtgaggaccaattgaagaaccaactatctgtaaagatgtctaaaggaaactgccctgcacttgccgcacttgatgaactcatctcttctgcaaagggtttatacactgggattgaggaaattaatttgctaaaagaaattgttgataaggctcgtaacttgaatgcctacttgatgcaaattctggatgattcagactgttatcatggagaagatcttactgtcatattcaaatctcttttagttgctctcaaggtgataattatcaaacttctcattctgaaaagcccttgttctttgtctgtttaaaaaggcgaggcctaggtgctgggcagtgctttgtctaacttttttccgtttagagatgttttggacttgatgtatgtaaaaacgggacaaattatagacgaggaaagataaacttcgatcatattatttatggatgcatgttgatatcttccttttttctgttctgacatgatactctaacagtccacagaaagtacaaacactctgcaacgcctaggcacaaggtggaggcccaaccacctgtatagcacctatagagctttttttaacattgatgctacatggttccaattgtgaattgatttccgtgtgaaagtaactaataaatgtgctattgctgtttaggatgagtaactacatcttttggctattttgcttggtaggcgacatcagcttctggcttgtatgatgacaatgtcagttgcagaattgagtctgttttgagcagatatttgtggaagaaacaaatacataaactattgtatggtggtaaaaagtcatcgattcaagaagtactgtgccttgatgaagagggttcacatttagagatatgtgatcaagatttcttcaagttggagattagtaaaataaaggaaaccagcctgcagtggctggctaaagcagaggaggtgtggtttcggtctcttgtacaatttgttccccaggatggaaaatgacactattgtcgtgatacaggttgcatgtgattctggtgagcttgcactggatcttgtgtatggacttatagctgaaggggaaaatctctctgtagactttgagaaggaactaaagttactgagggatcgcagtgtcctctactgcatctgctgtaagcccgacgataacagggccatgattgcatgcgaccagtgtgatgagtggtaccattttgattgcatcaacctgcttggaccccctccagaaagcttcttctgccctgcttgccatccaaacaatggtgaagaatctgtatcacttgcacgctcagaggatgatgaggataggtagtgcaccgctacagttgagttgttttttcgtgtcatccccaagataacaagttctcactggcacctgcagatcaagcactggagccggagctcacacgccgccggacagagtggtggagcgagacttaataaagcttcttagctgccatagcggtagctcatggagcgagagcagaagggctcctcatcgaacagctagaaggcgtagtagtttcgtcggattgttatgatgtgcaggaaccttcttagcaccgtgaattgattctttttagttaggttagaagcaggaacgatccatcatctgctgttgtaatttgtagctgttgacaggaggtagatgtagcaaggcagagctgtaagaacccattattattgatcttgtagcagtctgaggttttggaaattgtatcatatactaccgccgttcttgaatatttgtcgcctattgtttcaaaaaacgacaaataaaaaaattaaaaaagaatggagagtatttttatgctgctgctatgcacggc

SEQ ID NO: 49188 - DNA, 6259 bp, Zea Mays
cttcctcacttgccattcttcgctgacctctaaacctaaccgcccatgggcaaaggggcccctcctgccgttgccacagccacctccgtccctgaggcgccggtcttccaccccacagacgaggagttcgccgaccccctcgcctacgtcgcccgtatccgccccctcgccgagccctacggcatctgccgcatcgtcccgccgtcctcatggtccccgccttacgccctcgacttcaaggctctctccttccccaccaagaggcagcccatccaccgcctcctcgcccgccccgcccccgctgaccccgacaccttcctcctcgactatcgccgtttcctcggggcttcctccgcacatcgccgtggccgcaggaagggccttcccaagtcgccctctctctcggatggtcgcccgctcgacctctgccgcctgttccatgctgtcaagcgcttcggcggttactacggtgcctgtgaggggaagcgctggggcgacgtcgtccgcctcgttgatgataaggcgccaatgcacatatcagagtgcgccaagcacgtgcttgcgcagctatattacgagcatctctatggctatgagaagttcgccaacccacagcatgggaacaagggaaggaagcagccacggcccggatctgatgatcgaccatcggtttctcgttcacaggacgaagagagcaacatatctgttactggggagatggttgaggaggttacaggccggaaaaggagaaatttctcacgcaaggaattaggcagagggacatctcatggtcgttatggccgtgttgttaacatcactggaaataatgtggcatctgctgttgcccagaagcggacgaggaggaactctgatgctgtggttaccacagtcgatgaggtgtctgctggtgtccggaagcggaaaaggagaaagtctgatgccgcgtctaccgtgtttaatgatgaagtggatcaagtttgtgagcagtgtagtagtgggttacatggggatgtcatgctcctatgcgatcgctgtgataaaggctggcatttgtactgtttgtcgccgccgctcgagcgagtgcctccagggaattggtattgctcagattgcctcaactccgatagagattgttttgggtttatccaaaggaggaagtcctgcttgcttgagactttccggcggtttgacgacagggtgagaaagagatggtttgggcagaggaatcccagccgtattcaaattgagaagcagttctgggagattgtggaggggaaggcaggggaacttgaggttatgtatgggagtgacttggacacttcaatttatgggagcgggtttcctcgtcttggtgatacagtgccatcatctatggacctagagacgtggcagaaatactgttcaagcccgtggaatttgaacaattttccgaatctgcctggctcagttcttaggacagtcaaggataaaattcctggtgtcatggtcccatggctctacatagggatgctgttttcgtcattttgttggcatgttgaggaccattgtttctattcaataaattatttgcattggggtgagccaaaatgttgggtatggggtgcctggagcaaaagcaaatgcctttgagcaggttatgcgccaggccttacctgatctgtttgatgcacaaccggatctgctttttcaccttgtcacaatgctgaatccatctattttacaagcaaatagcgttccagtatatagcgtgatgcaggaacctggaaacttcatcatcaccttccccaggtcattccatggtggcttcaatttaggtttgaactgtgccgaggctgtaaattttgcccctgctgattggttacctcatggtggaattggggctaatctatatcgtttataccgcaaagcgcctgtcttgtcacatgaggagcttctgtatgtggttgcaaagaatggtgtggatgctgagtcacttacccatttgaagggagaaataaaaaggctttttataaatgagagaagacgtcgagtagagctttggattaatgggactgtcaaatctagcctaatgttgccaaggattaatccaaactttatcggaagtgaagaggatcctacatgcattatttgtcgacagtatctgtatctttcagcagtctcctgtaactgtaggctgtcttcttatgtttgccttgagcactggaagcacctttgtgaatgcagtccgaagaagcattgcttactttatcgacacacccttgcagagttgggggatttagtgtgcgaggtctctttggttagcccccaaagggacaatgttatgcagaatccacacttgctcaatgatgtttatgtgccgtctaaaaaggtcaaagatcactatatattatatagacagcttgcagaagattgggtttcaaactctgaacatattctccagatgccatttgtggaaaggtcttatgccactgctttggaagaagctgaacaatttctttggggtgatcatgccatggattctgtccggaacataacagtaagactaacaaaggctatgaagtgggccttgggtgttagaaaatgtctctccaaaattcaggactttctgaaagatggctgctctgaaaaagtaaattatgtggaaatagaagaactagttgctacgaaatgtgccccgtgctgtgagcctagtcttacaaaattgcaggcgtatgcagaggaagcgaaattgctgattaatgaagtaaacaatgcactatcatctttcttaacagtagacaaattggaaacattatactcaagggtttcagaattcccagttaagctaacagaatcatcgactttgttttgggagttatcttctgcaaagtcctggttgaagaaagcaagtgattgccttgaacagaataaactgggcattatcgacatagatgtcctcaataaactaaaatcagagataatacaacttcgagttctacttccagagattgatcttatctcaaagctgtggaaagatgtggaatcatggcaaacccgttgtcaattatatctccaagacttccctgatctaaaggagctggagggttttctccttgctgcggatggtgccaactttagcattccagagctgaacattcttaagcaacattactcaaattgttgctcttgggtgagtcgtgctaagaacatactcagaaaactttatgctacgagtgactatcacaatgctgttgaggagttgacaggcattctgaaggaagcagaattactaggagtaaaagttgatgaattgcctattgtggagaaagaactaaagaggtccttatgtaggaagcaagcatctgaggcacttgcaacagtaatgccaatggaggtggttgaagaaattttaaaagaagcttcgatactacatattgaagaggagcaaccatttgatgatctgtctcggatgctcaaagaggccacttcctgggaagagaaggctagacttattcttgaacgatcagcttctctctctgagtttgaagaccatatgaggtgttcagagggaataagagttatccttccgtctaaactgcatatgaaagcagaggttgatattgctaaattgtggatagacaaatgtcaggcctatttgagaccaggctgcaataaacttgcatttggagactttcttaaagttgatgatatcaaggatttaatcaatcagcctgcaaatttgaaagtcattcttgacacttcagaacttaattctgttctcaacaatattgaaaaatgggaacacagttcactaagtctactcaataattttagagccttacttcatttgaatagtattggctctacagttgacacacttcaaagaaaattggaggagctgcaaggatgttgatagattaattgaagaagcagtccaccttcctgcttccttagcagattgttctttggttacattgttgatgagggcattgtcttgtctaagaaaatcacttattttgcttcctggttctggaacatctgcaaaatccaaattggaagatgttgaaaatattctagcagaattcaaggaggttgatgttccttatcctatcatgactgccaagctggaggatgctgtaaacaatcataattcatggatagagcaatgcaataccttcttcatgctgtctgatggccagtcgtgggctatgctgcaaaatctcagggacaatgggcagtctgttgcatttgattgccctgagatggataaagttgttgatgaggttaaaaacgttgaagagtggctcaatcagtgccactgtactctacttctagatggaaataatagttctttgctctccatacttgtaaagataagaggattattggatgatgtttgcacgttatatgctgaggattgtatgaagttaagattatgtgctgtatgctcatgtgacatcggagataggctggcatctagatgtgtgacttgtcaagactggtaccatggctcctgcgtggaaaacctgtctgctactacacaaacgacaattgaatggatgtgttcattttgttcacttttacagagtgaggaccaattgaagaaccaactatctgtaaagatgtctaaaggaaactgccctgcacttgccgcacttgatgaactcatctcttctgcaaagggtttatacactgggattgaggaaattaatttgctaaaagaaattgttgataaggctcgtaacttgaatgcctacttgatgcaaattctggatgattcagactgttatcatggagaagatcttactgtcatattcaaatctcttttagttgctctcaaggtgataattatcaaacttctcattctgaaaagcccttgttctttgtctgtttaaaaaggcgaggcctaggtgctgggcagtgctttgtctaacttttttccgtttagagatgttttggacttgatgtatgtaaaaacgggacaaattatagacgaggaaagataaacttcgatcatattatttatggatgcatgttgatatcttccttttttctgttctgacatgatactctaacagtccacagaaagtacaaacactctgcaacgcctaggcacaaggtggaggcccaaccacctgtatagcacctatagagctttttttaacattgatgctacatggttccaattgtgaattgatttccgtgtgaaagtaactaataaatgtgctattgctgtttaggatgagtaactacatcttttggctattttgcttggtaggcgacatcagcttctggcttgtatgatgacaatgtcagttgcagaattgagtctgttttgagcagatatttgtggaagaaacaaatacataaactattgtatggtggtaaaaagtcatcgattcaagaagtactgtgccttgatgaagagggttcacatttagagatatgtgatcaagatttcttcaagttggagattagtaaaataaaggaaaccagcctgcagtggctggctaaagcagaggaggttgcatgtgattctggtgagcttgcactggatcttgtgtatggacttatagctgaaggggaaaatctctctgtagactttgagaaggaactaaagttactgagggatcgcagtgtcctctactgcatctgctgtaagcccgacgataacagggccatgattgcatgcgaccagtgtgatgagtggtaccattttgattgcatcaacctgcttggaccccctccagaaagcttcttctgccctgcttgccatccaaacaatggtgaagaatctgtatcacttgcacgctcagaggatgatgaggatagatcaagcactggagccggagctcacacgccgccggacagagtggtggagcgagacttaataaagcttcttagctgccatagcggtagctcatggagcgagagcagaagggctcctcatcgaacagctagaaggcgtagtagtttcgtcggattgttatgatgtgcaggaaccttcttagcaccgtgaattgattctttttagttaggttagaagcaggaacgatccatcatctgctgttgtaatttgtagctgttgacaggaggtagatgtagcaaggcagagctgtaagaacccattattattgatcttgtagcagtctgaggttttggaaattgtatcatatactaccgccgttcttgaatatttgtcgcctattgtttcaaaaaacgacaaataaaaaaattaaaaaagaatggagagtatttttatgctgctgctatgcacggc

SEQ ID NO: 49189 - DNA, 4197 bp, Zea Mays
atgaccttcgcactagggcttggctatgctaaagtggctcccaaccttggaggacgactgccaagcaagcgccgcgaggcttgccccgatcttggctcagaccagactccaaccctggccaattccaggaatattccccaggctcgggtgtctggttggcatgtggagccacaagctatatcaaggaatggtgtggatgctgagtcacttacccatttgaagggagaaataaaaaggctttttataaatgagagaagacgtcgagtagagctttggattaatgggactgtcaaatctagcctaatgttgccaaggattaatccaaactttatcggaagtgaagaggatcctacatgcattatttgtcgacagtatctgtatctttcagcagtctcctgtaactgtaggctgtcttcttatgtttgccttgagcactggaagcacctttgtgaatgcagtccgaagaagcattgcttactttatcgacacacccttgcagagttgggggatttagtgtgcgaggtctctttggttagcccccaaagggacaatgttatgcagaatccacacttgctcaatgatgtttatgtgccgtctaaaaaggtcaaagatcactatatattatatagacagcttgcagaagattgggtttcaaactctgaacatattctccagatgccatttgtggaaaggtcttatgccactgctttggaagaagctgaacaatttctttggggtgatcatgccatggattctgtccggaacataacagtaagactaacaaaggctatgaagtgggccttgggtgttagaaaatgtctctccaaaattcaggactttctgaaagatggctgctctgaaaaagtaaattatgtggaaatagaagaactagttgctacgaaatgtgccccgtgctgtgagcctagtcttacaaaattgcaggcgtatgcagaggaagcgaaattgctgattaatgaagtaaacaatgcactatcatctttcttaacagtagacaaattggaaacattatactcaagggtttcagaattcccagttaagctaacagaatcatcgactttgttttgggagttatcttctgcaaagtcctggttgaagaaagcaagtgattgccttgaacagaataaactgggcattatcgacatagatgtcctcaataaactaaaatcagagataatacaacttcgagttctacttccagagattgatcttatctcaaagctgtggaaagatgtggaatcatggcaaacccgttgtcaattatatctccaagacttccctgatctaaaggagctggagggttttctccttgctgcggatggtgccaactttagcattccagagctgaacattcttaagcaacattactcaaattgttgctcttgggtgagtcgtgctaagaacatactcagaaaactttatgctacgagtgactatcacaatgctgttgaggagttgacaggcattctgaaggaagcagaattactaggagtaaaagttgatgaattgcctattgtggagaaagaactaaagaggtccttatgtaggaagcaagcatctgaggcacttgcaacagtaatgccaatggaggtggttgaagaaattttaaaagaagcttcgatactacatattgaagaggagcaaccatttgatgatctgtctcggatgctcaaagaggccacttcctgggaagagaaggctagacttattcttgaacgatcagcttctctctctgagtttgaagaccatatgaggtgttcagagggaataagagttatccttccgtctaaactgcatatgaaagcagaggttgatattgctaaattgtggatagacaaatgtcaggcctatttgagaccaggctgcaataaacttgcatttggagactttcttaaagttgatgatatcaaggatttaatcaatcagcctgcaaatttgaaagtcattcttgacacttcagaacttaattctgttctcaacaatattgaaaaatgggaacacagttcactaagtctactcaataattttagagccttacttcatttgaatagtattggctctacagttgacacacttcaaagaaaattggaggagctgcaaggtaaaatgaacacagaaatagaagttggattatctcttggttttgagttcaaggttctttgggaactgaaggattcttcgttgatgctaagatggatattgaatgcactgtctctgtgctgtatgattcctttattgcaggatgttgatagattaattgaagaagcagtccaccttcctgcttccttagcagattgttctttggttacattgttgatgagggcattgtcttgtctaagaaaatcacttattttgcttcctggttctggaacatctgcaaaatccaaattggaagatgttgaaaatattctagcagaattcaaggaggttgatgttccttatcctatcatgactgccaagctggaggatgctgtaaacaatcataattcatggatagagcaatgcaataccttcttcatgctgtctgatggccagtcgtgggctatgctgcaaaatctcagggacaatgggcagtctgttgcatttgattgccctgagatggataaagttgttgatgaggttaaaaacgttgaagagtggctcaatcagtgccactgtactctacttctagatggaaataatagttctttgctctccatacttgtaaagataagaggattattggatgatgtttgcacgttatatgctgaggattgtatgaagttaagattatgtgctgtatgctcatgtgacatcggagataggctggcatctagatgtgtgacttgtcaagactggtaccatggctcctgcgtggaaaacctgtctgctactacacaaacgacaattgaatggatgtgttcattttgttcacttttacagagtgaggaccaattgaagaaccaactatctgtaaagatgtctaaaggaaactgccctgcacttgccgcacttgatgaactcatctcttctgcaaagggtttatacactgggattgaggaaattaatttgctaaaagaaattgttgataaggctcgtaacttgaatgcctacttgatgcaaattctggatgattcagactgttatcatggagaagatcttactgtcatattcaaatctcttttagttgctctcaaggcgacatcagcttctggcttgtatgatgacaatgtcagttgcagaattgagtctgttttgagcagatatttgtggaagaaacaaatacataaactattgtatggtggtaaaaagtcatcgattcaagaagtactgtgccttgatgaagagggttcacatttagagatatgtgatcaagatttcttcaagttggagattagtaaaataaaggaaaccagcctgcagtggctggctaaagcagaggaggttgcatgtgattctggtgagcttgcactggatcttgtgtatggacttatagctgaaggggaaaatctctctgtagactttgagaaggaactaaagttactgagggatcgcagtgtcctctactgcatctgctgtaagcccgacgataacagggccatgattgcatgcgaccagtgtgatgagtggtaccattttgattgcatcaacctgcttggaccccctccagaaagcttcttctgccctgcttgccatccaaacaatggtgaagaatctgtatcacttgcacgctcagaggatgatgaggatagatcaagcactggagccggagctcacacgccgccggacagagtggtggagcgagacttaataaagcttcttagctgccatagcggtagctcatggagcgagagcagaagggctcctcatcgaacagctagaaggcgtagtagtttcgtcggattgttatgatgtgcaggaaccttcttagcaccgtgaattgattctttttagttaggttagaagcaggaacgatccatcatctgctgttgtaatttgtagctgttgacaggaggtagatgtagcaaggcagagctgtaagaacccattattattgatcttgtagcagtctgaggttttggaaattgtatcatatactaccgccgttcttgaatatttgtcgcctattgtttcaaaaaacgacaaataaaaaaattaaaaaagaatggagagtatttttatgctgctgctatgcacggc

SEQ ID NO: 49190 - DNA, 4058 bp, Zea Mays
gtaaaagtgaccagtaaaaccatctggaccgggcactttatctggagaatggtgtggatgctgagtcacttacccatttgaagggagaaataaaaaggctttttataaatgagagaagacgtcgagtagagctttggattaatgggactgtcaaatctagcctaatgttgccaaggattaatccaaactttatcggaagtgaagaggatcctacatgcattatttgtcgacagtatctgtatctttcagcagtctcctgtaactgtaggctgtcttcttatgtttgccttgagcactggaagcacctttgtgaatgcagtccgaagaagcattgcttactttatcgacacacccttgcagagttgggggatttagtgtgcgaggtctctttggttagcccccaaagggacaatgttatgcagaatccacacttgctcaatgatgtttatgtgccgtctaaaaaggtcaaagatcactatatattatatagacagcttgcagaagattgggtttcaaactctgaacatattctccagatgccatttgtggaaaggtcttatgccactgctttggaagaagctgaacaatttctttggggtgatcatgccatggattctgtccggaacataacagtaagactaacaaaggctatgaagtgggccttgggtgttagaaaatgtctctccaaaattcaggactttctgaaagatggctgctctgaaaaagtaaattatgtggaaatagaagaactagttgctacgaaatgtgccccgtgctgtgagcctagtcttacaaaattgcaggcgtatgcagaggaagcgaaattgctgattaatgaagtaaacaatgcactatcatctttcttaacagtagacaaattggaaacattatactcaagggtttcagaattcccagttaagctaacagaatcatcgactttgttttgggagttatcttctgcaaagtcctggttgaagaaagcaagtgattgccttgaacagaataaactgggcattatcgacatagatgtcctcaataaactaaaatcagagataatacaacttcgagttctacttccagagattgatcttatctcaaagctgtggaaagatgtggaatcatggcaaacccgttgtcaattatatctccaagacttccctgatctaaaggagctggagggttttctccttgctgcggatggtgccaactttagcattccagagctgaacattcttaagcaacattactcaaattgttgctcttgggtgagtcgtgctaagaacatactcagaaaactttatgctacgagtgactatcacaatgctgttgaggagttgacaggcattctgaaggaagcagaattactaggagtaaaagttgatgaattgcctattgtggagaaagaactaaagaggtccttatgtaggaagcaagcatctgaggcacttgcaacagtaatgccaatggaggtggttgaagaaattttaaaagaagcttcgatactacatattgaagaggagcaaccatttgatgatctgtctcggatgctcaaagaggccacttcctgggaagagaaggctagacttattcttgaacgatcagcttctctctctgagtttgaagaccatatgaggtgttcagagggaataagagttatccttccgtctaaactgcatatgaaagcagaggttgatattgctaaattgtggatagacaaatgtcaggcctatttgagaccaggctgcaataaacttgcatttggagactttcttaaagttgatgatatcaaggatttaatcaatcagcctgcaaatttgaaagtcattcttgacacttcagaacttaattctgttctcaacaatattgaaaaatgggaacacagttcactaagtctactcaataattttagagccttacttcatttgaatagtattggctctacagttgacacacttcaaagaaaattggaggagctgcaaggtaaaatgaacacagaaatagaagttggattatctcttggttttgagttcaaggttctttgggaactgaaggattcttcgttgatgctaagatggatattgaatgcactgtctctgtgctgtatgattcctttattgcaggatgttgatagattaattgaagaagcagtccaccttcctgcttccttagcagattgttctttggttacattgttgatgagggcattgtcttgtctaagaaaatcacttattttgcttcctggttctggaacatctgcaaaatccaaattggaagatgttgaaaatattctagcagaattcaaggaggttgatgttccttatcctatcatgactgccaagctggaggatgctgtaaacaatcataattcatggatagagcaatgcaataccttcttcatgctgtctgatggccagtcgtgggctatgctgcaaaatctcagggacaatgggcagtctgttgcatttgattgccctgagatggataaagttgttgatgaggttaaaaacgttgaagagtggctcaatcagtgccactgtactctacttctagatggaaataatagttctttgctctccatacttgtaaagataagaggattattggatgatgtttgcacgttatatgctgaggattgtatgaagttaagattatgtgctgtatgctcatgtgacatcggagataggctggcatctagatgtgtgacttgtcaagactggtaccatggctcctgcgtggaaaacctgtctgctactacacaaacgacaattgaatggatgtgttcattttgttcacttttacagagtgaggaccaattgaagaaccaactatctgtaaagatgtctaaaggaaactgccctgcacttgccgcacttgatgaactcatctcttctgcaaagggtttatacactgggattgaggaaattaatttgctaaaagaaattgttgataaggctcgtaacttgaatgcctacttgatgcaaattctggatgattcagactgttatcatggagaagatcttactgtcatattcaaatctcttttagttgctctcaaggcgacatcagcttctggcttgtatgatgacaatgtcagttgcagaattgagtctgttttgagcagatatttgtggaagaaacaaatacataaactattgtatggtggtaaaaagtcatcgattcaagaagtactgtgccttgatgaagagggttcacatttagagatatgtgatcaagatttcttcaagttggagattagtaaaataaaggaaaccagcctgcagtggctggctaaagcagaggaggttgcatgtgattctggtgagcttgcactggatcttgtgtatggacttatagctgaaggggaaaatctctctgtagactttgagaaggaactaaagttactgagggatcgcagtgtcctctactgcatctgctgtaagcccgacgataacagggccatgattgcatgcgaccagtgtgatgagtggtaccattttgattgcatcaacctgcttggaccccctccagaaagcttcttctgccctgcttgccatccaaacaatggtgaagaatctgtatcacttgcacgctcagaggatgatgaggatagatcaagcactggagccggagctcacacgccgccggacagagtggtggagcgagacttaataaagcttcttagctgccatagcggtagctcatggagcgagagcagaagggctcctcatcgaacagctagaaggcgtagtagtttcgtcggattgttatgatgtgcaggaaccttcttagcaccgtgaattgattctttttagttaggttagaagcaggaacgatccatcatctgctgttgtaatttgtagctgttgacaggaggtagatgtagcaaggcagagctgtaagaacccattattattgatcttgtagcagtctgaggttttggaaattgtatcatatactaccgccgttcttgaatatttgtcgcctattgtttcaaaaaacgacaaataaaaaaattaaaaaagaatggagagtatttttatgctgctgctatgcacggc

SEQ ID NO: 49191 - DNA, 1867 bp, Zea Mays
aaatgtttggcatagctcacgttcgacccgtgcatagtgtctaagtcgcatcaggttcaccaggacatgtcagcgccgttctctcactatttcgtgttcaccgggcataattcctacctcactgggaaccagctcaatagtgactccagtgacgtcccaattgtaaaggcgttgcagagaggtgttagagtcattgaactcgatatgtggcccaatccttcaaaggacaatgtcgatattcttcatggagggacattgactgccccagtggaaatgatcaaatgtttgaagtccatcaaagaatacgccttctgtgcctcaaattatcctcttgttattactcttgaggatcacctcacatcagatctccaagctaaagttgctacgatgctcactgaaacatttggagatcttcttttcgtccctaatccagacccgatgaaagagtttccttctccagcatctctaatgaagagaataatcatatcaaccaaacctccacaagaatataaggagtttctcaaagccgagaataatcgcagtggcagcggaaacatagctgagttgccagaccaaggaagcctgagaagaatagattcaaatgccgatgaatctgatgggaaggatgaactggatgagcaagacgaggaagactccgacgaggacgatcccaaatttcagcaggatacagcctgtgagtataggaaactcatcaccatccaagctggcaaaccaaaaggccatttgcgggatgcgctaaaagtggatccagacaaagtcaggcggctttctttgagcgagacacagttagctaaagcgacaatctctcatggtgctgaagtcataaggttcacacagaagaatatactccgtgtgtatccaaagggcacgagggttaattcttcaaactacgatccaatgaacgcctggacccatggtgcgcagatggttgcgttcaacatgcagggccatgataaagcgctccggttgatgcaagggtttttcagagccaatgggggctgtggttatgttaaaaagcctgacttcttgctaagaacaggtccaaatggggaagtatttgaccccaaggctagtttgccagtgaagaaaaccctcaaggtgaaagtttatatgggagacgggtggcgcatggacttcagtaaaactcatttcgatgccttttcgcctccagatttctatactaggggatcgcaggtgtgaaggcagacagtgtgatgaagaagacaagggtgattgaggaccagtgggtgccgatgtgggatgaggagttcacgttccttctgacggttccggagctggccctcctgagggtagaggtccaggagtacgacatgtcggagaagcacgacttcggggggcagacagtcttgccggtatgggagctgaagcagggcatccgtgctgtgcccctgcacgatcgcaagggtgtcaggtacaagtccgtcaggctcctcatgcgatttgattttgtgtagccgagccgagccgccattcagattcagcttctgtttttttccttcttgtgtgaattgaatgtattactcccttccttccatcttcaacgtatatgtgtatgtatgtacttatttttgtcggaataaaagttgtatggaatggaatggaaggaaggagtagaactgtcttcaaactccagcttctagatctgtacgggtgattcagttttacttgctggcacattgtttgtttgtttactttactggagatagatttgtacattagcttgattattcttcatttagctactggctaagagatagattagccaatgtgtttgaaagcctttatcatggctatatgaataagataaggaggacacgtctttttg

SEQ ID NO: 49192 - DNA, 2359 bp, Zea Mays
cttagcactggcacagcgcagcacatgaggagaagaagagggaggagtaattatttattaattaacaaagagaagacttcttccttcctcgtcgtctccagcccattccaattcttgattccatcgccccaccatccacaactcccctaatccttccaacctcctcgtcgtccagtccaccacctccacgcgcaatggccagcggctaggcggcaccaaccagatcacaaggattcgtttcatccggcagcgcagctctagagcctccatgggcagctacgcgtacaagtactgtatgtgcttcacgcgcaagttccgatccccggacgcccagccgccgccggacgtccgcgccgcccacctctccttcgcctctgacgcccatgccctccgccgcttcgtcgccggcgtccagggcgagtcccccgccgacgtcgaccgcatcctcgccatgctctccgggggccacagccatggaatcgcccgcctcgtcacaaggtcgccggcggcatccacgcccacgctcgaagacttcttcgccttcctcttctcccccgacctcaacccacccatcgcgcaccaggttcaccaggacatgtcagcgccgttctctcactatttcgtgttcaccgggcataattcctacctcactgggaaccagctcaatagtgactccagtgacgtcccaattgtaaaggcgttgcagagaggtgttagagtcattgaactcgatatgtggcccaatccttcaaaggacaatgtcgatattcttcatggagggacattgactgccccagtggaaatgatcaaatgtttgaagtccatcaaagaatacgccttctgtgcctcaaattatcctcttgttattactcttgaggatcacctcacatcagatctccaagctaaagttgctacgatgctcactgaaacatttggagatcttcttttcgtccctaatccagacccgatgaaagagtttccttctccagcatctctaatgaagagaataatcatatcaaccaaacctccacaagaatataaggagtttctcaaagccgagaataatcgcagtggcagcggaaacatagctgagttgccagaccaaggaagcctgagaagaatagattcaaatgccgatgaatctgatgggaaggatgaactggatgagcaagacgaggaagactccgacgaggacgatcccaaatttcagcaggatacagcctgtgagtataggaaactcatcaccatccaagctggcaaaccaaaaggccatttgcgggatgcgctaaaagtggatccagacaaagtcaggcggctttctttgagcgagacacagttagctaaagcgacaatctctcatggtgctgaagtcataagggcacgagggttaattcttcaaactacgatccaatgaacgcctggacccatggtgcgcagatggttgcgttcaacatgcagggccatgataaagcgctccggttgatgcaagggtttttcagagccaatgggggctgtggttatgttaaaaagcctgacttcttgctaagaacaggtccaaatggggaagtatttgaccccaaggctagtttgccagtgaagaaaaccctcaaggtgaaagtttatatgggagacgggtggcgcatggacttcagtaaaactcatttcgatgccttttcgcctccagatttctatactaggggatcgcaggtgtgaaggcagacagtgtgatgaagaagacaagggtgattgaggaccagtgggtgccgatgtgggatgaggagttcacgttccttctgacggttccggagctggccctcctgagggtagaggtccaggagtacgacatgtcggagaagcacgacttcggggggcagacagtcttgccggtatgggagctgaagcagggcatccgtgctgtgcccctgcacgatcgcaagggtgtcaggtacaagtccgtcaggctcctcatgcgatttgattttgtgtagccgagccgagccgccattcagattcagcttctgtttttttccttcttgtgtgaattgaatgtattactcccttccttccatcttcaacgtatatgtgtatgtatgtacttatttttgtcggaataaaagttgtatggaatggaatggaaggaaggagtagaactgtcttcaaactccagcttctagatctgtacgggtgattcagttttacttgctggcacattgtttgtttgtttactttactggagatagatttgtacattagcttgattattcttcatttagctactggctaagagatagattagccaatgtgtttgaaagcctttatcatggctatatgaataagataaggaggacacgtctttttg

SEQ ID NO: 49193 - DNA, 2414 bp, Zea Mays
ttggttctgtcgatgcagctcatcaattccattcccagctccggaaaatcgagaaatttcgattggttatttgatttgatttgattctggccgtgccgaaccctagcttccatctcggtccaatctcagttccacatattgttactcctcggcagcagaggaggccgtcgtggaatgagttgaggatgacggcatactactcgtgctcctaggaaaggtcagggaaaggaagaattcgagccatggaggacgaggcggacggcggcggcgaatccttcgtgctgcgctccggcgtccgcgcgggcctcaagcgcgaattcgccttcgccatcgcctcgcaggccgtcctttcgtcctcatacgcacccctgggccgcacccgccgctcatcccgcatcctcaacccatcggccgcttcgaccccctccgtcgccggcgccgccgtctcgacatcctcctcctcaacccccgacacaaagccaaaagccaagcgcccgcgcccaccagatcctccccctccccctcccttcccccctccaccagactatgcccctgcccccggagaagaccatgacggggccgctgtcggccccgtgctcgccttgatggctgctgctgggcccagccctccgccgacgcctttgactccgcaaccccatgccgacgcggatgcggatcccgcacacctcgccaacatcatcattccgccggagtcgtcgcccaggcgcatcacgcgctccatgctccagcccaagtctcgccttcctaccgccgctcgttctcctgacaatgcggcaccgctcaaaccaaaactggaaccgccggaagaggaggatggcaagccggttccagcgttgaggcgcttcaccagatcactactggtcaaggacaaggacagcaacgacgacgacctctcaggcaccaccaccgccagcaatgcctcctccccttcgcccaaaaccaacaccacaagtaccagcaggagcagcaacaaggggaataagaatacaaacaagattcccaccaacctcagggagctgctcgccaccggcatgctcgaaggtcagcccgtcaagtacatcatgaggaaaggcaagcgagcggtactccggggagttatcaaacgcattggcatattgtgttcatgctcttcatgcaaaggccgaaaagttgtttcaccttactactttgaggtgcatgctgggagtaccaaaaagcatccatcagactacattttcctggaaaatggaaataatctgcatgatgtgttgagggcatgtacaaatgctacattagacatgttggagcctgcaatacgaaaggcaataggcccagcacctcaggagagaatattcagatgcaaatcatgcaaaagttcattcagtacactccgcagtgggaaatttgctttgttttgtgattcgtgtcttgagtccaagggagctaagaataatatcagttcatccaaagttgggcgaagtcaaacttcatctgccaaggtatataagagtgcatcaccaggagcaaagtcttcaagtgtaggaaggcttacaagaaaggataagggtatgcataaggtcgttttcatgagtggcattttaccagagggcactgatgttggttactatgttggtggaaagaggttactggatggatatataaaggaacttgggatctactgtcattgctgcagcacagtggttagtccttcacagtttgaaggtcatgctggtcgagctgctcgacgcaaaccttaccacaacatatatatgtcaaacggcgtttcactacatgagctgtcaatttcactcttgaaaggtcaaaagatgtcaaacagacaaagtgatgacttgtgcagcatttgttcagatggtgggcaactactcctttgtgatacctgtccaagagcttttcatagagaatgtgttggcttatcttctgccacaaagggaacttggtgttgccgatattgtgagaatagacaacagagggaaagttgtttggcatataacaacaatgcaatagctgctgggagagttgaaggagttgatgccttggaacaaatattcacgcggtcgatacgtattgctacaacacttgagactggatttggtggttgcgcactgtgcaagtaagtgttcttccatggcatgttgcttgtatatccaccctggccttcttttcttttgcactgataataaattacatgtactttcaatcttacctaaaacatttcgtatgctggcagagaaaatttggcaaacttctcatcaagtaatgatatttgttgaataagctggttaatgaatcggaagctcaatgttcgagcgctaaatctctttacccatttcgaactctctgattacttttgcataaatgttagtttcattaatcttactttaagctttatttgc

SEQ ID NO: 49194 - DNA, 3260 bp, Zea Mays
ttggttctgtcgatgcagctcatcaattccattcccagctccggaaaatcgagaaatttcgattggttatttgatttgatttgattctggccgtgccgaaccctagcttccatctcggtccaatctcagttccacatattgttactcctcggcagcagaggaggccgtcgtggaatgagttgaggatgacggcatactactcgtgctcctaggaaaggtcagggaaaggaagaattcgagccatggaggacgaggcggacggcggcggcgaatccttcgtgctgcgctccggcgtccgcgcgggcctcaagcgcgaattcgccttcgccatcgcctcgcaggccgtcctttcgtcctcatacgcacccctgggccgcacccgccgctcatcccgcatcctcaacccatcggccgcttcgaccccctccgtcgccggcgccgccgtctcgacatcctcctcctcaacccccgacacaaagccaaaagccaagcgcccgcgcccaccagatcctccccctccccctcccttcccccctccaccagactatgcccctgcccccggagaagaccatgacggggccgctgtcggccccgtgctcgccttgatggctgctgctgggcccagccctccgccgacgcctttgactccgcaaccccatgccgacgcggatgcggatcccgcacacctcgccaacatcatcattccgccggagtcgtcgcccaggcgcatcacgcgctccatgctccagcccaagtctcgccttcctaccgccgctcgttctcctgacaatgcggcaccgctcaaaccaaaactggaaccgccggaagaggaggatggcaagccggttccagcgttgaggcgcttcaccagatcactactggtcaaggacaaggacagcaacgacgacgacctctcaggcaccaccaccgccagcaatgcctcctccccttcgcccaaaaccaacaccacaagtaccagcaggagcagcaacaaggggaataagaatacaaacaagattcccaccaacctcagggagctgctcgccaccggcatgctcgaaggtcagcccgtcaagtacatcatgaggaaaggcaagcgagcggtactccggggagttatcaaacgcattggcatattgtgttcatgctcttcatgcaaaggccgaaaagttgtttcaccttactactttgaggtgcatgctgggagtaccaaaaagcatccatcagactacattttcctggaaaatggaaataatctgcatgatgtgttgagggcatgtacaaatgctacattagacatgttggagcctgcaatacgaaaggcaataggcccagcacctcaggagagaatattcagatgcaaatcatgcaaaagttcattcagtacactccgcagtgggaaatttgctttgttttgtgattcgtgtcttgagtccaagggagctaagaataatatcagttcatccaaagttgggcgaagtcaaacttcatctgccaaggtatataagagtgcatcaccaggagcaaagtcttcaagtgtaggaaggcttacaagaaaggataagggtatgcataaggtcgttttcatgagtggcattttaccagagggcactgatgttggttactatgttggtggaaagaggttactggatggatatataaaggaacttgggatctactgtcattgctgcagcacagtggttagtccttcacagtttgaaggtcatgctggtcgagctgctcgacgcaaaccttaccacaacatatatatgtcaaacggcgtttcactacatgagctgtcaatttcactcttgaaaggtcaaaagatgtcaaacagacaaagtgatgacttgtgcagcatttgttcagatggtgggcaactactcctttgtgatacctgtccaagagcttttcatagaggctccatgatttcagcaaaaagaaattcagtacccgaaccgtgctgctttgtgaccaatgtggtagagaatatcatgttggttgcctcaaggaacataatatggctgatctgacggcattgcccgagggagcctggtattgttctacggactgtgtgaggattaaccagacactgcaagatttacttaacagtggtggagaacctgttcttgccatggatttagatgtcattaagaagaaacgagaagtgaaaggttttaatgatgatgatgctgaccttgatgttagatggagagttttaaaggacaagagctcagacgacagcaaactagtgctctccaaagcagttgccattttccatgaaacttttgatcccattatccaggtttcaactggacgggacctcattccagccatggtttatgggaggagtgcaagggaccaagattacacaggaatgtattgtactgtgttaactgtgaacaatattgtagtttctgcgggtcttttccgcatcatgggtagtgaaattgctgagctgccgttggttgctacaagtagggatagacaaggcttggggtatttccaagcacttttttcctgcatagaacgtctgttgtcatctttggaggtgaaacattttgtgctaccagctgcagaggaagcggagtctatctggactgagcgttttgggttcgcaaagataagccaggatgagctgcgcgaatacctcaagggtgggcgaacaactgtgtttcaggggacgtcaaacctgcacaagctggttgcgaaacttgaatgctagttatgtgagaattgtatggcaagagcaaggacatgaagctaagaagcagctcattgtttgtgtgcctctgggattgatgcagacaggaaagaggcaccctgatccctttcttgtaaatgttggtgagcatgttggcattggcatcttgatctgtttccataggtaaggtgaagaggattgtgtaagataaaagggacaagctgtatgtaaagacaagccaaagctgagtgaatttcaggcaccttattgtgtggagggtcctgtgtttgttgagtaggcaacgctcgggctggtgtgagatgatgactgcatttgtgttgtgttggtggtattttcactgctgacatgactgttgtatcggatgacatcttttctgttttatgacagtggcagtgtgatactaggctgttaggaggggacgggggaggtcaaacccaacgtacatcatgagtggagctgctgtaatgtaacagaagtattgcaccccccccccccccccccccaataatatataacatgcttaatttggtgcgaa

SEQ ID NO: 49195 - DNA, 3471 bp, Zea Mays
ttggttctgtcgatgcagctcatcaattccattcccagctccggaaaatcgagaaatttcgattggttatttgatttgatttgattctggccgtgccgaaccctagcttccatctcggtccaatctcagttccacatattgttactcctcggcagcagaggaggccgtcgtggaatgagttgaggatgacggcatactactcgtgctcctaggaaaggtcagggaaaggaagaattcgagccatggaggacgaggcggacggcggcggcgaatccttcgtgctgcgctccggcgtccgcgcgggcctcaagcgcgaattcgccttcgccatcgcctcgcaggccgtcctttcgtcctcatacgcacccctgggccgcacccgccgctcatcccgcatcctcaacccatcggccgcttcgaccccctccgtcgccggcgccgccgtctcgacatcctcctcctcaacccccgacacaaagccaaaagccaagcgcccgcgcccaccagatcctccccctccccctcccttcccccctccaccagactatgcccctgcccccggagaagaccatgacggggccgctgtcggccccgtgctcgccttgatggctgctgctgggcccagccctccgccgacgcctttgactccgcaaccccatgccgacgcggatgcggatcccgcacacctcgccaacatcatcattccgccggagtcgtcgcccaggcgcatcacgcgctccatgctccagcccaagtctcgccttcctaccgccgctcgttctcctgacaatgcggcaccgctcaaaccaaaactggaaccgccggaagaggaggatggcaagccggttccagcgttgaggcgcttcaccagatcactactggtcaaggacaaggacagcaacgacgacgacctctcaggcaccaccaccgccagcaatgcctcctccccttcgcccaaaaccaacaccacaagtaccagcaggagcagcaacaaggggaataagaatacaaacaagattcccaccaacctcagggagctgctcgccaccggcatgctcgaaggtcagcccgtcaagtacatcatgaggaaaggcaagcgagcggtactccggggagttatcaaacgcattggcatattgtgttcatgctcttcatgcaaaggccgaaaagttgtttcaccttactactttgaggtgcatgctgggagtaccaaaaagcatccatcagactacattttcctggaaaatggaaataatctgcatgatgtgttgagggcatgtacaaatgctacattagacatgttggagcctgcaatacgaaaggcaataggcccagcacctcaggagagaatattcagatgcaaatcatgcaaaagttcattcagtacactccgcagtgggaaatttgctttgttttgtgattcgtgtcttgagtccaagggagctaagaataatatcagttcatccaaagttgggcgaagtcaaacttcatctgccaaggtatataagagtgcatcaccaggagcaaagtcttcaagtgtaggaaggcttacaagaaaggataagggtatgcataaggtcgttttcatgagtggcattttaccagagggcactgatgttggttactatgttggtggaaagaggttactggatggatatataaaggaacttgggatctactgtcattgctgcagcacagtggttagtccttcacagtttgaaggtcatgctggtcgagctgctcgacgcaaaccttaccacaacatatatatgtcaaacggcgtttcactacatgagctgtcaatttcactcttgaaaggtcaaaagatgtcaaacagacaaagtgatgacttgtgcagcatttgttcagatggtgggcaactactcctttgtgatacctgtccaagagcttttcatagagaatgtgttggcttatcttctgccacaaagggaacttggtgttgccgatattgtgagaatagacaacagagggaaagttgtttggcatataacaacaatgcaatagctgctgggagagttgaaggagttgatgccttggaacaaatattcacgcggtcgatacgtattgctacaacacttgagactggatttggtggttgcgcactgtgcaagctccatgatttcagcaaaaagaaattcagtacccgaaccgtgctgctttgtgaccaatgtggtagagaatatcatgttggttgcctcaaggaacataatatggctgatctgacggcattgcccgagggagcctggtattgttctacggactgtgtgaggattaaccagacactgcaagatttacttaacagtggtggagaacctgttcttgccatggatttagatgtcattaagaagaaacgagaagtgaaaggttttaatgatgatgatgctgaccttgatgttagatggagagttttaaaggacaagagctcagacgacagcaaactagtgctctccaaagcagttgccattttccatgaaacttttgatcccattatccaggtttcaactggacgggacctcattccagccatggtttatgggaggagtgcaagggaccaagattacacaggaatgtattgtactgtgttaactgtgaacaatattgtagtttctgcgggtcttttccgcatcatgggtagtgaaattgctgagctgccgttggttgctacaagtagggatagacaaggcttggggtatttccaagcacttttttcctgcatagaacgtctgttgtcatctttggaggtgaaacattttgtgctaccagctgcagaggaagcggagtctatctggactgagcgttttgggttcgcaaagataagccaggatgagctgcgcgaatacctcaagggtgggcgaacaactgtgtttcaggggacgtcaaacctgcacaagctggttgcgaaacttgaatgctagttatgtgagaattgtatggcaagagcaaggacatgaagctaagaagcagctcattgtttgtgtgcctctgggattgatgcagacaggaaagaggcaccctgatccctttcttgtaaatgttggtgagcatgttggcattggcatcttgatctgtttccataggtaaggtgaagaggattgtgtaagataaaagggacaagctgtatgtaaagacaagccaaagctgagtgaatttcaggcaccttattgtgtggagggtcctgtgtttgttgagtaggcaacgctcgggctggtgtgagatgatgactgcatttgtgttgtgttggtggtattttcactgctgacatgactgttgtatcggatgacatcttttctgttttatgacagtggcagtgtgatactaggctgttaggaggggacgggggaggtcaaacccaacgtacatcatgagtggagctgctgtaatgtaacagaagtattgcaccccccccccccccccccccaataatatataacatgcttaatttggtgcgaa

SEQ ID NO: 49196 - DNA, 3466 bp, Zea Mays
ttggttctgtcgatgcagctcatcaattccattcccagctccggaaaatcgagaaatttcgattggttatttgatttgatttgattctggccgtgccgaaccctagcttccatctcggtccaatctcagttccacatattgttactcctcggcagcagaggaggccgtcgtggaatgagttgaggatgacggcatactactcgtgctcctaggaaaggtcagggaaaggaagaattcgagccatggaggacgaggcggacggcggcggcgaatccttcgtgctgcgctccggcgtccgcgcgggcctcaagcgcgaattcgccttcgccatcgcctcgcaggccgtcctttcgtcctcatacgcacccctgggccgcacccgccgctcatcccgcatcctcaacccatcggccgcttcgaccccctccgtcgccggcgccgccgtctcgacatcctcctcctcaacccccgacacaaagccaaaagccaagcgcccgcgcccaccagatcctccccctccccctcccttcccccctccaccagactatgcccctgcccccggagaagaccatgacggggccgctgtcggccccgtgctcgccttgatggctgctgctgggcccagccctccgccgacgcctttgactccgcaaccccatgccgacgcggatgcggatcccgcacacctcgccaacatcatcattccgccggagtcgtcgcccaggcgcatcacgcgctccatgctccagcccaagtctcgccttcctaccgccgctcgttctcctgacaatgcggcaccgctcaaaccaaaactggaaccgccggaagaggaggatggcaagccggttccagcgttgaggcgcttcaccagatcactactggtcaaggacaaggacagcaacgacgacgacctctcaggcaccaccaccgccagcaatgcctcctccccttcgcccaaaaccaacaccacaagtaccagcaggagcagcaacaaggggaataagaatacaaacaagattcccaccaacctcagggagctgctcgccaccggcatgctcgaaggtcagcccgtcaagtacatcatgaggaaagcgagcggtactccggggagttatcaaacgcattggcatattgtgttcatgctcttcatgcaaaggccgaaaagttgtttcaccttactactttgaggtgcatgctgggagtaccaaaaagcatccatcagactacattttcctggaaaatggaaataatctgcatgatgtgttgagggcatgtacaaatgctacattagacatgttggagcctgcaatacgaaaggcaataggcccagcacctcaggagagaatattcagatgcaaatcatgcaaaagttcattcagtacactccgcagtgggaaatttgctttgttttgtgattcgtgtcttgagtccaagggagctaagaataatatcagttcatccaaagttgggcgaagtcaaacttcatctgccaaggtatataagagtgcatcaccaggagcaaagtcttcaagtgtaggaaggcttacaagaaaggataagggtatgcataaggtcgttttcatgagtggcattttaccagagggcactgatgttggttactatgttggtggaaagaggttactggatggatatataaaggaacttgggatctactgtcattgctgcagcacagtggttagtccttcacagtttgaaggtcatgctggtcgagctgctcgacgcaaaccttaccacaacatatatatgtcaaacggcgtttcactacatgagctgtcaatttcactcttgaaaggtcaaaagatgtcaaacagacaaagtgatgacttgtgcagcatttgttcagatggtgggcaactactcctttgtgatacctgtccaagagcttttcatagagaatgtgttggcttatcttctgccacaaagggaacttggtgttgccgatattgtgagaatagacaacagagggaaagttgtttggcatataacaacaatgcaatagctgctgggagagttgaaggagttgatgccttggaacaaatattcacgcggtcgatacgtattgctacaacacttgagactggatttggtggttgcgcactgtgcaagctccatgatttcagcaaaaagaaattcagtacccgaaccgtgctgctttgtgaccaatgtggtagagaatatcatgttggttgcctcaaggaacataatatggctgatctgacggcattgcccgagggagcctggtattgttctacggactgtgtgaggattaaccagacactgcaagatttacttaacagtggtggagaacctgttcttgccatggatttagatgtcattaagaagaaacgagaagtgaaaggttttaatgatgatgatgctgaccttgatgttagatggagagttttaaaggacaagagctcagacgacagcaaactagtgctctccaaagcagttgccattttccatgaaacttttgatcccattatccaggtttcaactggacgggacctcattccagccatggtttatgggaggagtgcaagggaccaagattacacaggaatgtattgtactgtgttaactgtgaacaatattgtagtttctgcgggtcttttccgcatcatgggtagtgaaattgctgagctgccgttggttgctacaagtagggatagacaaggcttggggtatttccaagcacttttttcctgcatagaacgtctgttgtcatctttggaggtgaaacattttgtgctaccagctgcagaggaagcggagtctatctggactgagcgttttgggttcgcaaagataagccaggatgagctgcgcgaatacctcaagggtgggcgaacaactgtgtttcaggggacgtcaaacctgcacaagctggttgcgaaacttgaatgctagttatgtgagaattgtatggcaagagcaaggacatgaagctaagaagcagctcattgtttgtgtgcctctgggattgatgcagacaggaaagaggcaccctgatccctttcttgtaaatgttggtgagcatgttggcattggcatcttgatctgtttccataggtaaggtgaagaggattgtgtaagataaaagggacaagctgtatgtaaagacaagccaaagctgagtgaatttcaggcaccttattgtgtggagggtcctgtgtttgttgagtaggcaacgctcgggctggtgtgagatgatgactgcatttgtgttgtgttggtggtattttcactgctgacatgactgttgtatcggatgacatcttttctgttttatgacagtggcagtgtgatactaggctgttaggaggggacgggggaggtcaaacccaacgtacatcatgagtggagctgctgtaatgtaacagaagtattgcaccccccccccccccccccccaataatatataacatgcttaatttggtgcgaa

SEQ ID NO: 49197 - DNA, 1625 bp, Zea Mays
gtttttatttctaagtctggtgttttatcaagaattctttcatacatttcttttggcgaactcctttgaacaagaatgtgttggcttatcttctgccacaaagggaacttggtgttgccgatattgtgagaatagacaacagagggaaagttgtttggcatataacaacaatgcaatagctgctgggagagttgaaggagttgatgccttggaacaaatattcacgcggtcgatacgtattgctacaacacttgagactggatttggtggttgcgcactgtgcaagctccatgatttcagcaaaaagaaattcagtacccgaaccgtgctgctttgtgaccaatgtggtagagaatatcatgttggttgcctcaaggaacataatatggctgatctgacggcattgcccgagggagcctggtattgttctacggactgtgtgaggattaaccagacactgcaagatttacttaacagtggtggagaacctgttcttgccatggatttagatgtcattaagaagaaacgagaagtgaaaggttttaatgatgatgatgctgaccttgatgttagatggagagttttaaaggacaagagctcagacgacagcaaactagtgctctccaaagcagttgccattttccatgaaacttttgatcccattatccaggtttcaactggacgggacctcattccagccatggtttatgggaggagtgcaagggaccaagattacacaggaatgtattgtactgtgttaactgtgaacaatattgtagtttctgcgggtcttttccgcatcatgggtagtgaaattgctgagctgccgttggttgctacaagtagggatagacaaggcttggggtatttccaagcacttttttcctgcatagaacgtctgttgtcatctttggaggtgaaacattttgtgctaccagctgcagaggaagcggagtctatctggactgagcgttttgggttcgcaaagataagccaggatgagctgcgcgaatacctcaagggtgggcgaacaactgtgtttcaggggacgtcaaacctgcacaagctggttgcgaaacttgaatgctagttatgtgagaattgtatggcaagagcaaggacatgaagctaagaagcagctcattgtttgtgtgcctctgggattgatgcagacaggaaagaggcaccctgatccctttcttgtaaatgttggtgagcatgttggcattggcatcttgatctgtttccataggtaaggtgaagaggattgtgtaagataaaagggacaagctgtatgtaaagacaagccaaagctgagtgaatttcaggcaccttattgtgtggagggtcctgtgtttgttgagtaggcaacgctcgggctggtgtgagatgatgactgcatttgtgttgtgttggtggtattttcactgctgacatgactgttgtatcggatgacatcttttctgttttatgacagtggcagtgtgatactaggctgttaggaggggacgggggaggtcaaacccaacgtacatcatgagtggagctgctgtaatgtaacagaagtattgcaccccccccccccccccccccaataatatataacatgcttaatttggtgcgaa

SEQ ID NO: 49198 - DNA, 2187 bp, Zea Mays
ggcgagggtggccttctcctcccatgcaagctcagcagtacgctcatgggcacgaaatgtgttggcttatcttctgccacaaagggaacttggtgttgccgatattgtgagaatagacaacagagggaaagttgtttggcatataacaacaatgcaatagctgctgggagagttgaaggagttgatgccttggaacaaatattcacgcggtcgatacgtattgctacaacacttgagactggatttggtggttgcgcactgtgcaagtaagtgttcttccatggcatgttgcttgtatatccaccctggccttcttttcttttgcactgataataaattacatgtactttcaatcttacctaaaacatttcgtatgctggcagagaaaatttggcaaacttctcatcaagtaatgatatttgttgaataagctggttaatgaatcggaagctcaatgttcgagcgctaaatctctttacccatttcgaactctctgattacttttgcataaatgttagtttcattaatcttactttaagctttatttgccctagttaattctgtgttagcattagtcgtggttgtttatgggtgtttggcgctaagtattgaccagtttgtggaagtcatatcattggtaccttctatcaaaaaaggttacatattgttttcgtttaatgccaacttgccaagtactacgacatttcttcaaaacttggagtgccataactttaggtccactttttggtatacaacttttgttgtttatatatgtttatatttgatgatctggagttgccaatgtcctttcctgtcacaagtatatataatccatgttatttggcaggctccatgatttcagcaaaaagaaattcagtacccgaaccgtgctgctttgtgaccaatgtggtagagaatatcatgttggttgcctcaaggaacataatatggctgatctgacggcattgcccgagggagcctggtattgttctacggactgtgtgaggattaaccagacactgcaagatttacttaacagtggtggagaacctgttcttgccatggatttagatgtcattaagaagaaacgagaagtgaaaggttttaatgatgatgatgctgaccttgatgttagatggagagttttaaaggacaagagctcagacgacagcaaactagtgctctccaaagcagttgccattttccatgaaacttttgatcccattatccaggtttcaactggacgggacctcattccagccatggtttatgggaggagtgcaagggaccaagattacacaggaatgtattgtactgtgttaactgtgaacaatattgtagtttctgcgggtcttttccgcatcatgggtagtgaaattgctgagctgccgttggttgctacaagtagggatagacaaggcttggggtatttccaagcacttttttcctgcatagaacgtctgttgtcatctttggaggtgaaacattttgtgctaccagctgcagaggaagcggagtctatctggactgagcgttttgggttcgcaaagataagccaggatgagctgcgcgaatacctcaagggtgggcgaacaactgtgtttcaggggacgtcaaacctgcacaagctggttgcgaaacttgaatgctagttatgtgagaattgtatggcaagagcaaggacatgaagctaagaagcagctcattgtttgtgtgcctctgggattgatgcagacaggaaagaggcaccctgatccctttcttgtaaatgttggtgagcatgttggcattggcatcttgatctgtttccataggtaaggtgaagaggattgtgtaagataaaagggacaagctgtatgtaaagacaagccaaagctgagtgaatttcaggcaccttattgtgtggagggtcctgtgtttgttgagtaggcaacgctcgggctggtgtgagatgatgactgcatttgtgttgtgttggtggtattttcactgctgacatgactgttgtatcggatgacatcttttctgttttatgacagtggcagtgtgatactaggctgttaggaggggacgggggaggtcaaacccaacgtacatcatgagtggagctgctgtaatgtaacagaagtattgcaccccccccccccccccccccaataatatataacatgcttaatttggtgcgaa

SEQ ID NO: 49199 - DNA, 1530 bp, Zea Mays
ggcgagggtggccttctcctcccatgcaagctcagcagtacgctcatgggcacgaaatgtgttggcttatcttctgccacaaagggaacttggtgttgccgatattgtgagaatagacaacagagggaaagttgtttggcatataacaacaatgcaatagctgctgggagagttgaaggagttgatgccttggaacaaatattcacgcggtcgatacgtattgctacaacacttgagactggatttggtggttgcgcactgtgcaagctccatgatttcagcaaaaagaaattcagtacccgaaccgtgctgctttgtgaccaatgtggtagagaatatcatgttggttgcctcaaggaacataatatggctgatctgacggcattgcccgagggagcctggtattgttctacggactgtgtgaggattaaccagacactgcaagatttacttaacagtggtggagaacctgttcttgccatggatttagatgtcattaagaagaaacgagaagtgaaaggttttaatgatgatgatgctgaccttgatgttagatggagagttttaaaggacaagagctcagacgacagcaaactagtgctctccaaagcagttgccattttccatgaaacttttgatcccattatccaggtttcaactggacgggacctcattccagccatggtttatgggaggagtgcaagggaccaagattacacaggaatgtattgtactgtgttaactgtgaacaatattgtagtttctgcgggtcttttccgcatcatgggtagtgaaattgctgagctgccgttggttgctacaagtagggatagacaaggcttgctgcagaggaagcggagtctatctggactgagcgttttgggttcgcaaagataagccaggatgagctgcgcgaatacctcaagggtgggcgaacaactgtgtttcaggggacgtcaaacctgcacaagctggttgcgaaacttgaatgctagttatgtgagaattgtatggcaagagcaaggacatgaagctaagaagcagctcattgtttgtgtgcctctgggattgatgcagacaggaaagaggcaccctgatccctttcttgtaaatgttggtgagcatgttggcattggcatcttgatctgtttccataggtaaggtgaagaggattgtgtaagataaaagggacaagctgtatgtaaagacaagccaaagctgagtgaatttcaggcaccttattgtgtggagggtcctgtgtttgttgagtaggcaacgctcgggctggtgtgagatgatgactgcatttgtgttgtgttggtggtattttcactgctgacatgactgttgtatcggatgacatcttttctgttttatgacagtggcagtgtgatactaggctgttaggaggggacgggggaggtcaaacccaacgtacatcatgagtggagctgctgtaatgtaacagaagtattgcaccccccccccccccccccccaataatatataacatgcttaatttggtgcgaa

SEQ ID NO: 49200 - DNA, 1334 bp, Zea Mays
gcaagaaccttctgcattcgccatcaataaagaaagtacaagaacatcacccacagctcagaatcccaggcgcggcggttaccggtcagcaccagaccgctaaggctgagagagttatcttccaagttcagagcttcagatagtaataggagaagacggtcgcagctgctagcctacaaaactgcaatatgcaaaaatatacaaggaaacgatgatgagaatctagccaacaaaacaggctagcaggtctgggctaaatttaagcacggaaatttgttaacagattactagtggagatgtatgagagaagaggaagatacagaggaacagagagatatggcagagagctggtagcgccgtgacggctggaaacaagtggaagtttaggttattacatttcataccctctaccacaacacattcctaatatatatatactccagtctctgcttgtgcattcgtgggttcattttcctttgacgaacgccccttctcggcccatcatcagcttgctcttctggcccatcatccaactcagcgttcaactgctcctgtgccacaaccggcaagacctgctctatcgaagggctgatgctgacattccccccttcttcgaacgccgcttgtccccaagcggtcgctgatgggaagcgattcttctgcgcttcggcgtcctcccaagttgcatgcgaagcatccatccctgaccagatcacttggaccatgtaccaactgcatagtgaaaggtgaattgggatatgctgagacgatggccaattgagtcaacaactcttgtgcttgcgtatcatgatctttgagagccggtgtgtactgatagaggcacacagtaaacatatgtgcaccgagtaacagagggatattgtgatcacccggcctgcttggaggcaacccaactggatcctcaaaaatatccaaaaactgggaaggaatatcctgcacctgagtattgattgttggcatcttgctgtcagggaaacggttctgctgggaggtggccgagagtaaccacagctccactattgctcctgtgggaacagaagggtgaacaccttgtaaacacctagttgctccttgatagggaatgatcatccatttgttagaccagttcactggcataggactatatcgttgcagcctgtccatgcccacgaccagatcaaacaagggtaagagtaaaaacgtgagatccactgaaaaactgcgaacaggcatggtccactcagctgaaggcacctgataattgcaagtaataacttgaccaaatgaaggtattagcaagaacttcaggtctgctgaaaagtgacagcccgaca

SEQ ID NO: 49201 - DNA, 219 bp, Zea Mays
ggtttctcctttcaacttaataccatgtgccttcatttcttctaaaagcatgattgttgcatctgtaattttagaaatctcccttttctccactctgcgagatgattttgtatcacactgttttagactcatggatagtaccatcatgaagtctaggacacccacgaccagaataggacccatatgaatttcagcacacatctaaaggaacccacttct

SEQ ID NO: 49202 - DNA, 490 bp, Zea Mays
cgaagtcaccgagcatgtcggggtagtcgatcagcagattggagcccttgatgtcctggtgaaggatgccccgctcatggcagtgctgcagccccacgaacagctgctgcatgtagcacttgatcaggcatatattgacgtcgaggaagcggcctggtgacctccagttgcttgagggcatttcatcgaacaacttgtgagcaccattcttcgatgctcctcctctacaggctggcatgcgcgtcccactactcagctgcctctgcgaggtgcttgcccccttcggcgtcgtgcctagccagatcgtgcttaacggttggtgcgccatagccggcttagttgtcctctcccactccatcgggcgggtgaggcgcaaaagcgcgtccgcagaaacgtcatcgagtgacgtgtattgctgaagcttggtggtgatgagcgcggtggcgttgtcggcggcggccgggcactggcagaagatagggaacatgac

SEQ ID NO: 49203 - DNA, 282 bp, Zea Mays
tcacgagcaagctggcccaagataggatattcttctttgtgtgctttccaccaggctagtatgtcaaaactatcaagctcttcatcgatacttgacttaatcatgtcacccgttgaagttgggtaaggtgcaacagatgatgttgagggtgtagtagagacatagcattgatacatctttttcatgacaccattaaatttatccagctcagtttgataggtatatgggtacaccttcttcaagtaaaattctacaattttcctcttgtatctaggatcaagg

SEQ ID NO: 49204 - DNA, 1718 bp, Zea Mays
gctcgggggcaattctgtctatccatccacaaatagaagtttgtctcagaaaacaaaaataagaaggatgggaattggattctgatttgttgttcttcttcctaaataataaattctagggtttgcctcttccctctcggctctcgctcccaccaccaccaccaggcagacgcagatcggcggcgggataggctagcaatgatccccaattccgacttcctctagactgcctggcggtcgaattccgattcgattggagtagggaacgagaagggaacaaatacaccggcaccaccaccagaccagacagcacgtgcctccatactatggtttacgccccgtgccgctcatcgacgccgccgtcttcctcgccgatgctccacaagaacctccgcgccctcggacccggcttgaatcccttggctcccttcggcatgggcaactactcccgctagccgtttcctcctatccctctttctccgattccgatctctgagtgcttccgcctccgcccccggccgcttcctccatcggaaccgatccccgctattttactcccgttcgtttcattgttccgttgctttggatctgagtctcgagatcctcccctgtcctgctgctcgaggagccgccaaggataccaaaataccatggtgcaggtgcgcaggtcgctcagcatgagccgccttcggagctgccacgacgcggacgaccgtggctggaacccgctccatgttgctgctcgcaagggagacctcaaggaggtccgacgtctcctggatgagggggggatggatgtgaatgcacctgcatggggaccaaaatgtcctggtgctaccccactccatctggctgctcagggtgggcatgttaaaatcatggatgaactactggagcgtggtgccaatattgatgctcgaacaaaaggggcatgcggctggactcctctacacattgctgccaaggaaaggaacaagaaggctgtgagattcctgattgagaatggagcattccttcctcctgagatgaatgaccataggatgaaagcgattcgcctggcgaaacttcgttgagctcggataactagagagaaagcagcaggtgcatgcagcttgagaacgatgaagttaagtcaagtcattgagtacatttgcttgatgtctggatgatggagatgttctgttctgtgactttagaataattgttgagtggtacctgtaatatacgacgagtgatttgttgaataataatcatacactagtgtatagcgcgcacatgcgcgcatgccgttctgtggtgtaaaatcttgttataagcatgtataacttgatattgtatcgtgaacatgcatatatgcagagtagtcattattgagacatgagtatcagatcaaatttagcattaaagtaacgtgcaccaagagcttaagcaagcaatggtgctagacttagcacatttcttaagatttcaaagagtggaatgaactcaacataaattcatcctaacaaacatgtcctaaccgttccttctttagttcttcagctactcctttgaaggcataagaataatcaattgcagtatgaacagtgtaaggtaagcgattacgacaacattgttctcaacatatggatattttgattttacaattcttttccaatgtccaacatctgtaggtatctgctttatttttgggggtggagctagcaaagttgtagatc

SEQ ID NO: 49205 - DNA, 5159 bp, Zea Mays
ttcatcgtcagtgaggaggaacatgagagaggagagaacgggtggcgcgatgcgacgtcggctgtcgtgctcgtgaccgcaacctcctaccgcgatcccgatctgccgctccgtccgtccggccggcaagtccccgcctccgcctccgcgcctgactgtcccctccccaccatttcattccaattgagagccgtggggaccaatcaaccctagatccacctcgtccctccacgcgacaggagaggtatctccctgatccaactccgcatggcctcctcctccttcgcccccgacgaccagaccgacgccgacttcttcgacaagctcgtcgacgacgacgacccggccaccgacttgcctcgggccgtctccgccaccagcgtcgccgacgacccaccacccgtcctggagccgcaggttccggcgccggcgccttcggaggggtcaggcaagggcggcgccggcgtccacaccgcggtcaagcaggtgcagtgggcctccttcggaggtggcgtggacgacggccctgatccgttcgctgatctctcgggaggcgccggtgacgacgacggcttcctcgggaacacggcggggacccaggcggccttggatcacgccgccgaggtgacggatcaggacttcttcgctgggagcagctcctccgatcagcagaatgtccatggtcagcacgaccagggcagaggcagcgccgcggtggattccgcagatcccaaatctctggaggccatgtaccctgggtggaagtacgacgaggcctcacagcaatggtaccagcttgatggcagtgtaaattcaactgggaatgcagctcaggcgctggacgatagcgctcagaatgcacatcatcatcagcagcagctcgacgcggcttacctgcacaattcagcgcacgcggggcttgggacaattgccgaggagagcactaccgcagctggtgctgccaatagttggggccaaggggctgccccggagtacccacccagcatgctcttctatgcagagtatcctggttggtactttgacaccaacactcagcagtggcactcccttgagtcgtaccagcaggccgccgtgcaggctggaacatctagcacgggtcagactgttgttgcaagcgatgatgttgttgcgacttcctctctgacaggccataatgccgggcaaactgaggaccttgttgcccacaatcaggtgacacaacgcaactcatcctcgaatagtttcacccatcagaaccaatggcagaccaccgatgcacttggtaacaatgtacaatctgaaagcctggctagtagcttctatggttttgaacaacacatgaatgctgagactaccagttcctctacgagccaacagactggttttcacacagctgaaacaattacagatcactatggtggacgcaaagccttcgaatcatcaagtcttcagagtggttatagctcctctgacagtcaacaatccagtcacaaggcattcgaaccttccacgggttatcaggctggttacaacgggtttgaacctgcttcaggtcaccacacggcgtttgaacctgccatgcataaccagagtggatacaaggcatttgacccttctacgggtcaccatagtgcttcgtggggattcatgccttccacgggtcagcagactgatttcaagggttccagagcttccacagttcaccaggccggttatgaagagtttgaaatttctagaggttacaatacaaatttcaaggcatttgaatcatcttcatctcaaaatgctggttacaatggttcccagccttcttcaggtcaccaacctaactacatgggatttgacacctctgcaaaccaccatggttatactgatgtcaatggtgttgcgagtactcaaggctttgtcccaatgcaaaccacgtaccagggccagaaacaagcaaatgcaacctcacaagggcacctgtcaaatagctatttgggtactgacaactccatgaactttaatcagcaacaatttctgggtgcaaatgcctcaaatttgcaattcggtcactccccgcatgaaggtaggtcatcggctggacgaccaccacatgccctcgttgcttttgggtttggagggaagctcatagttatgaaagaaactacctccatgcctgcaagttttaacagtggaaatcagggtaactctagtagcacagtgtcggttcttaatctgttggaggtagtctttgataaagttgatccttcaagtgtcactaatggtagtgcacttagttatttccatgctctatgccgtcaacctgttcctggccctctggttggtggaagtgctgcatcaaaggatgtaaataagtggcttgatgaaatgattgcacggtacgagtcttcctctagtgaattccatagaggtgatactcgcaagttgcttatttcattgctgaagatactgtctcagcactatggaaaactgcgttcaccttttgcgtctgacccatcgcaagaggagacagatggtccagaaatggcagtaactaagctattttcatcgtgtaagagaagcactgttcatatgggagattatggatccctagttccctgcatgaaaagtattccttcagaaagtcagatgcaggctgttgcacaagaggtccaaagtcttctagtttctgggagaagaaaagaggcccttcactgtgcacaggcaggtcaactttggggacctgcaatcatactggcattgcagcttggtgataagttttatgtggatacagtgaagaaaatggcccacttccattttgtatctgggtcccctctgcgaacgctatgccttctcatcgctggacaacctgcagatgtttttaatgtagagaacaatgtcaacagtgactatggtgcatcccatcaacctgtggagcctggtcctaatatgttggatgattgggaggagaatttggctattattactgcaaacagaacagaaggtgacgttctagtaatcacccatcttggtgattgcctctggaaagaaaaaaatgaggttgcagctgcccattcatgctatttagttgctgaactaaacattgattcatactcggaaagtgcaaggttatgcctcattggtgcagaccatttgaagtgtcctcgaacatttgccagccctgaagccattcagaggacagaggtttatgaatatgcgaaggtgcttggtaattctcaatatatcctactatcctttcagccatataagctgatatatgcatacatgcttgtggaagtggggaaagtttctgattctttgaggtattgccaagcgtctataaaggtactgaaagcctctggtcgtgcccctgaattggaggtgtggaaacaattattttcttcgctggaggagaggatacgcactcaccagcagggtggatatggcacaaatcttgccccaggaaaaatagttgggaagatttttacctcgcttgataaatctatatcccgcatgatgggtacaccatctgcaccacttccaccgttgccacatggatcttttagtgataaagagagccactctatacctgcggcagcaaaatttgttaatagccaatcggtaatggtcatgccatcgttaataccatctgcttcaatgcagtcaatgactgagatagcagaggatagtggtggcactggcaggaaaattgcacacaacagaagtgtttctgagccggactttggtagatcatccaaacagatggtacacagagcagtgcatcaggatccagcagttctcgatttggttggctagtgcagaagactatgggattagtgtcaaaatcccaccgccaggcaaaattaggggatcagaacaaattttactatgatgaaaaattgaagcggtgggtggaggaaggtgctgctgttcctgccgaagagcctcctcttcctccacctccaacaaaaccatctttccagaatggtatgctagacaataagttgaatggccccatgagcgtaagccatgctcccaatggagtcacagaatggaaatcctcaaattcttcagagcaaggtgcatctggtgcaatgccatcatataacaaaccagctgctccatctatgacaccaccagctggtgccaagttcttcatgccaactgcagcacctgttgccgcggatcagatgataccacaccaagcagcagagatacacagtgaaaccatccatcaggatgagcggtcagcctcaccgccagcagaaacatcattttcttcaaccccaccacccacgcaatttccatcaccagtgcaatcaacaatttatcggcaatctagtatggagaacatctccaccccttaccagggttccggggtatcgtcattaagcaacgacagctcattctcaaaatctcgagccgcgtcctggagtgggacatactctgagcagtttaatgcttttgcgggcactatatcgcctgacagacagacgacgcattcaccactgatgcctggcaaaccaccacacagccgttccaacagcaactcatcagggcatctcaatggattggcagaggatcttcatgaggtcgagctgtaactggcgactggtcagcatgaccgtcgcaactcgtgtcttaaaggcagcgatgacaacccctccccaagcaggtgacagaaaagaaggtgcccttaaaatgctgaccacggggatgccgcagctggaatgggcttggtgtgactttgcacgagattctggggcgcgctctaaaccaccgaggtgcgtcaggcctgtactaatagagatgcagggtttttttttgtagccatatatacatatatgttggttttgtgttttagagagaagggaaagggttgggtgggcctttgtttacaggtgggaagggaagagaagcagcatgcagatgcccttgtacagataatctgcccctacccagtttgtttaaaacgcaaacaacgccattttggttttagttccctggagaaggatagaggagaaggtgtgtgtctttgtagtgtgagaagcatggctctgtagtgttgttgttatagtgtactactactgtgctagccagccgcatacacagactgtttattctttggagacgaatcaattctttcatcttgactagggcattattatttgtta

SEQ ID NO: 49206 - DNA, 5096 bp, Zea Mays
gaacgggtggcgcgatgcgacgtcggctgtcgtgctcgtgaccgcaacctcctaccgcgatcccgatctgccgctccgtccgtccggccggcaagtccccgcctccgcctccgcgcctgactgtcccctccccaccatttcattccaattgagagccgtggggaccaatcaaccctagatccacctcgtccctccacgcgacaggagaggtatctccctgatccaactccgcatggcctcctcctccttcgcccccgacgaccagaccgacgccgacttcttcgacaagctcgtcgacgacgacgacccggccaccgacttgcctcgggccgtctccgccaccagcgtcgccgacgacccaccacccgtcctggagccgcaggttccggcgccggcgccttcggaggggtcaggcaagggcggcgccggcgtccacaccgcggtcaagcaggtgcagtgggcctccttcggaggtggcgtggacgacggccctgatccgttcgctgatctctcgggaggcgccggtgacgacgacggcttcctcgggaacacggcggggacccaggcggccttggatcacgccgccgaggtgacggatcaggacttcttcgctgggagcagctcctccgatcagcagaatgtccatggtcagcacgaccagggcagaggcagcgccgcggtggattccgcagatcccaaatctctggaggccatgtaccctgggtggaagtacgacgaggcctcacagcaatggtaccagcttgatggcagtgtaaattcaactgggaatgcagctcaggcgctggacgatagcgctcagaatgcacatcatcatcagcagcagctcgacgcggcttacctgcacaattcagcgcacgcggggcttgggacaattgccgaggagagcactaccgcagctggtgctgccaatagttggggccaaggggctgccccggagtacccacccagcatgctcttctatgcagagtatcctggttggtactttgacaccaacactcagcagtggcactcccttgagtcgtaccagcaggccgccgtgcaggctggaacatctagcacgggtcagactgttgttgcaagcgatgatgttgttgcgacttcctctctgacaggccataatgccgggcaaactgaggaccttgttgcccacaatcaggtgacacaacgcaactcatcctcgaatagtttcacccatcagaaccaatggcagaccaccgatgcacttggtaacaatgtacaatctgaaagcctggctagtagcttctatggttttgaacaacacatgaatgctgagactaccagttcctctacgagccaacagactggttttcacacagctgaaacaattacagatcactatggtggacgcaaagccttcgaatcatcaagtcttcagagtggttatagctcctctgacagtcaacaatccagtcacaaggcattcgaaccttccacgggttatcaggctggttacaacgggtttgaacctgcttcaggtcaccacacggcgtttgaacctgccatgcataaccagagtggatacaaggcatttgacccttctacgggtcaccatagtgcttcgtggggattcatgccttccacgggtcagcagactgatttcaagggttccagagcttccacagttcaccaggccggttatgaagagtttgaaatttctagaggttacaatacaaatttcaaggcatttgaatcatcttcatctcaaaatgctggttacaatggttcccagccttcttcaggtcaccaacctaactacatgggatttgacacctctgcaaaccaccatggttatactgatgtcaatggtgttgcgagtactcaaggctttgtcccaatgcaaaccacgtaccagggccagaaacaagcaaatgcaacctcacaagggcacctgtcaaatagctatttgggtactgacaactccatgaactttaatcagcaacaatttctgggtgcaaatgcctcaaatttgcaattcggtcactccccgcatgaaggtaggtcatcggctggacgaccaccacatgccctcgttgcttttgggtttggagggaagctcatagttatgaaagaaactacctccatgcctgcaagttttaacagtggaaatcagggtaactctagtagcacagtgtcggttcttaatctgttggaggtagtctttgataaagttgatccttcaagtgtcactaatggtagtgcacttagttatttccatgctctatgccgtcaacctgttcctggccctctggttggtggaagtgctgcatcaaaggatgtaaataagtggcttgatgaaatgattgcacggtacgagtcttcctctagtgaattccatagaggtgatactcgcaagttgcttatttcattgctgaagatactgtctcagcactatggaaaactgcgttcaccttttgcgtctgacccatcgcaagaggagacagatggtccagaaatggcagtaactaagctattttcatcgtgtaagagaagcactgttcatatgggagattatggatccctagttccctgcatgaaaagtattccttcagaaagtcagatgcaggctgttgcacaagaggtccaaagtcttctagtttctgggagaagaaaagaggcccttcactgtgcacaggcaggtcaactttggggacctgcaatcatactggcattgcagcttggtgataagttttatgtggatacagtgaagaaaatggcccacttccattttgtatctgggtcccctctgcgaacgctatgccttctcatcgctggacaacctgcagatgtttttaatgtagagaacaatgtcaacagtgactatggtgcatcccatcaacctgtggagcctggtcctaatatgttggatgattgggaggagaatttggctattattactgcaaacagaacagaaggtgacgttctagtaatcacccatcttggtgattgcctctggaaagaaaaaaatgaggttgcagctgcccattcatgctatttagttgctgaactaaacattgattcatactcggaaagtgcaaggttatgcctcattggtgcagaccatttgaagtgtcctcgaacatttgccagccctgaagccattcagaggacagaggtttatgaatatgcgaaggtgcttggtaattctcaatatatcctactatcctttcagccatataagctgatatatgcatacatgcttgtggaagtggggaaagtttctgattctttgaggtattgccaagcgtctataaaggtactgaaagcctctggtcgtgcccctgaattggaggtgtggaaacaattattttcttcgctggaggagaggatacgcactcaccagcagggtggatatggcacaaatcttgccccaggaaaaatagttgggaagatttttacctcgcttgataaatctatatcccgcatgatggtcaatgactgagatagcagaggatagtggtggcactggcaggaaaattgcacacaacagaagtgtttctgagccggactttggtagatcatccaaacagggtgctggtggatcagatggtacacagagcagtgcatcaggatccagcagttctcgatttggttggctagtgcagaagactatgggattagtgtcaaaatcccaccgccaggcaaaattaggggatcagaacaaattttactatgatgaaaaattgaagcggtgggtggaggaaggtgctgctgttcctgccgaagagcctcctcttcctccacctccaacaaaaccatctttccagaatggtatgctagacaataagttgaatggccccatgagcgtaagccatgctcccaatggagtcacagaatggaaatcctcaaattcttcagagcaaggtctgggtatgccgccaattccacctagccaaaaccagttttctgctcgtggacggatgggtgtccggtccagatatgttgacacattcaatagatcaggtgcatctggtgcaatgccatcatataacaaaccagctgctccatctatgacaccaccagctggtgccaagttcttcatgccaactgcagcacctgttgccgcggatcagatgataccacaccaagcagcagagatacacagtgaaaccatccatcaggatgagcggtcagcctcaccgccagcagaaacatcattttcttcaaccccaccacccacgcaatttccatcaccagtgcaatcaacaatttatcggcaatctagtatggagaacatctccaccccttaccagggttccggggtatcgtcattaagcaacgacagctcattctcaaaatctcgagccgcgtcctggagtgggacatactctgagcagtttaatgcttttgcgggcactatatcgcctgacagacagacgacgcattcaccactgatgcctggcaaaccaccacacagccgttccaacagcaactcatcagggcatctcaatggattggcagaggatcttcatgaggtcgagctgtaactggcgactggtcagcatgaccgtcgcaactcgtgtcttaaaggcagcgatgacaacccctccccaagcaggtgacagaaaagaaggtgcccttaaaatgctgaccacggggatgccgcagctggaatgggcttggtgtgactttgcacgagattctggggcgcgctctaaaccaccgaggtgcgtcaggcctgtactaatagagatgcagggtttttttttgtagccatatatacatatatgttggttttgtgttttagagagaagggaaagggttgggtgggcctttgtttacaggtgggaagggaagagaagcagcatgcagatgcccttgtacagataatctgcccctacccagtttgtttaaaacgcaaacaacgccattttggttttagttccctggagaaggatagaggagaaggtgtgtgtctttgtagtgtgagaagcatggctctgtagtgttgttgttatagtgtactactactgtgctagccagccgcatacacagactgtttattctttggagacgaatcaattctttcatcttgactagggcattattatttgtta

SEQ ID NO: 49207 - DNA, 5220 bp, Zea Mays
cgggtggcgcgatgcgacgtcggctgtcgtgctcgtgaccgcaacctcctaccgcgatcccgatctgccgctccgtccgtccggccggcaagtccccgcctccgcctccgcgcctgactgtcccctccccaccatttcattccaattgagagccgtggggaccaatcaaccctagatccacctcgtccctccacgcgacaggagaggtatctccctgatccaactccgcatggcctcctcctccttcgcccccgacgaccagaccgacgccgacttcttcgacaagctcgtcgacgacgacgacccggccaccgacttgcctcgggccgtctccgccaccagcgtcgccgacgacccaccacccgtcctggagccgcaggttccggcgccggcgccttcggaggggtcaggcaagggcggcgccggcgtccacaccgcggtcaagcaggtgcagtgggcctccttcggaggtggcgtggacgacggccctgatccgttcgctgatctctcgggaggcgccggtgacgacgacggcttcctcgggaacacggcggggacccaggcggccttggatcacgccgccgaggtgacggatcaggacttcttcgctgggagcagctcctccgatcagcagaatgtccatggtcagcacgaccagggcagaggcagcgccgcggtggattccgcagatcccaaatctctggaggccatgtaccctgggtggaagtacgacgaggcctcacagcaatggtaccagcttgatggcagtgtaaattcaactgggaatgcagctcaggcgctggacgatagcgctcagaatgcacatcatcatcagcagcagctcgacgcggcttacctgcacaattcagcgcacgcggggcttgggacaattgccgaggagagcactaccgcagctggtgctgccaatagttggggccaaggggctgccccggagtacccacccagcatgctcttctatgcagagtatcctggttggtactttgacaccaacactcagcagtggcactcccttgagtcgtaccagcaggccgccgtgcaggctggaacatctagcacgggtcagactgttgttgcaagcgatgatgttgttgcgacttcctctctgacaggccataatgccgggcaaactgaggaccttgttgcccacaatcaggtgacacaacgcaactcatcctcgaatagtttcacccatcagaaccaatggcagaccaccgatgcacttggtaacaatgtacaatctgaaagcctggctagtagcttctatggttttgaacaacacatgaatgctgagactaccagttcctctacgagccaacagactggttttcacacagctgaaacaattacagatcactatggtggacgcaaagccttcgaatcatcaagtcttcagagtggttatagctcctctgacagtcaacaatccagtcacaaggcattcgaaccttccacgggttatcaggctggttacaacgggtttgaacctgcttcaggtcaccacacggcgtttgaacctgccatgcataaccagagtggatacaaggcatttgacccttctacgggtcaccatagtgcttcgtggggattcatgccttccacgggtcagcagactgatttcaagggttccagagcttccacagttcaccaggccggttatgaagagtttgaaatttctagaggttacaatacaaatttcaaggcatttgaatcatcttcatctcaaaatgctggttacaatggttcccagccttcttcaggtcaccaacctaactacatgggatttgacacctctgcaaaccaccatggttatactgatgtcaatggtgttgcgagtactcaaggctttgtcccaatgcaaaccacgtaccagggccagaaacaagcaaatgcaacctcacaagggcacctgtcaaatagctatttgggtactgacaactccatgaactttaatcagcaacaatttctgggtgcaaatgcctcaaatttgcaattcggtcactccccgcatgaaggtaggtcatcggctggacgaccaccacatgccctcgttgcttttgggtttggagggaagctcatagttatgaaagaaactacctccatgcctgcaagttttaacagtggaaatcagggtaactctagtagcacagtgtcggttcttaatctgttggaggtagtctttgataaagttgatccttcaagtgtcactaatggtagtgcacttagttatttccatgctctatgccgtcaacctgttcctggccctctggttggtggaagtgctgcatcaaaggatgtaaataagtggcttgatgaaatgattgcacggtacgagtcttcctctagtgaattccatagaggtgatactcgcaagttgcttatttcattgctgaagatactgtctcagcactatggaaaactgcgttcaccttttgcgtctgacccatcgcaagaggagacagatggtccagaaatggcagtaactaagctattttcatcgtgtaagagaagcactgttcatatgggagattatggatccctagttccctgcatgaaaagtattccttcagaaagtcagatgcaggctgttgcacaagaggtccaaagtcttctagtttctgggagaagaaaagaggcccttcactgtgcacaggcaggtcaactttggggacctgcaatcatactggcattgcagcttggtgataagttttatgtggatacagtgaagaaaatggcccacttccattttgtatctgggtcccctctgcgaacgctatgccttctcatcgctggacaacctgcagatgtttttaatgtagagaacaatgtcaacagtgactatggtgcatcccatcaacctgtggagcctggtcctaatatgttggatgattgggaggagaatttggctattattactgcaaacagaacagaaggtgacgttctagtaatcacccatcttggtgattgcctctggaaagaaaaaaatgaggttgcagctgcccattcatgctatttagttgctgaactaaacattgattcatactcggaaagtgcaaggttatgcctcattggtgcagaccatttgaagtgtcctcgaacatttgccagccctgaagccattcagaggacagaggtttatgaatatgcgaaggtgcttggtaattctcaatatatcctactatcctttcagccatataagctgatatatgcatacatgcttgtggaagtggggaaagtttctgattctttgaggtattgccaagcgtctataaaggtactgaaagcctctggtcgtgcccctgaattggaggtgtggaaacaattattttcttcgctggaggagaggatacgcactcaccagcagggtggatatggcacaaatcttgccccaggaaaaatagttgggaagatttttacctcgcttgataaatctatatcccgcatgatgggtacaccatctgcaccacttccaccgttgccacatggatcttttagtgataaagagagccactctatacctgcggcagcaaaatttgttaatagccaatcggtaatggtcatgccatcgttaataccatctgcttcaatgcagtcaatgactgagatagcagaggatagtggtggcactggcaggaaaattgcacacaacagaagtgtttctgagccggactttggtagatcatccaaacagatggtacacagagcagtgcatcaggatccagcagttctcgatttggttggctagtgcagaagactatgggattagtgtcaaaatcccaccgccaggcaaaattaggggatcagaacaaattttactatgatgaaaaattgaagcggtgggtggaggaaggtgctgctgttcctgccgaagagcctcctcttcctccacctccaacaaaaccatctttccagaatggtatgctagacaataagttgaatggccccatgagcgtaagccatgctcccaatggagtcacagaatggaaatcctcaaattcttcagagcaaggtctgggtatgccgccaattccacctagccaaaaccagttttctgctcgtggacggatgggtgtccggtccagatatgttgacacattcaatagatcaggtgcatctggtgcaatgccatcatataacaaaccagctgctccatctatgacaccaccagctggtgccaagttcttcatgccaactgcagcacctgttgccgcggatcagatgataccacaccaagcagcagagatacacagtgaaaccatccatcaggatgagcggtcagcctcaccgccagcagaaacatcattttcttcaaccccaccacccacgcaatttccatcaccagtgcaatcaacaatttatcggcaatctagtatggagaacatctccaccccttaccagggttccggggtatcgtcattaagcaacgacagctcattctcaaaatctcgagccgcgtcctggagtgggacatactctgagcagtttaatgcttttgcgggcactatatcgcctgacagacagacgacgcattcaccactgatgcctggcaaaccaccacacagccgttccaacagcaactcatcagggcatctcaatggattggcagaggatcttcatgaggtcgagctgtaactggcgactggtcagcatgaccgtcgcaactcgtgtcttaaaggcagcgatgacaacccctccccaagcaggtgacagaaaagaaggtgcccttaaaatgctgaccacggggatgccgcagctggaatgggcttggtgtgactttgcacgagattctggggcgcgctctaaaccaccgaggtgcgtcaggcctgtactaatagagatgcagggtttttttttgtagccatatatacatatatgttggttttgtgttttagagagaagggaaagggttgggtgggcctttgtttacaggtgggaagggaagagaagcagcatgcagatgcccttgtacagataatctgcccctacccagtttgtttaaaacgcaaacaacgccattttggttttagttccctggagaaggatagaggagaaggtgtgtgtctttgtagtgtgagaagcatggctctgtagtgttgttgttatagtgtactactactgtgctagccagccgcatacacagactgtttattctttggagacgaatcaattctttcatcttgactagggcattattatttgtta

SEQ ID NO: 49208 - DNA, 5025 bp, Zea Mays
gcgcgatgcgacgtcggctgtcgtgctcgtgaccgcaacctcctaccgcgatcccgatctgccgctccgtccgtccggccggcaagtccccgcctccgcctccgcgcctgactgtcccctccccaccatttcattccaattgagagccgtggggaccaatcaaccctagatccacctcgtccctccacgcgacaggagaggtatctccctgatccaactccgcatggcctcctcctccttcgcccccgacgaccagaccgacgccgacttcttcgacaagctcgtcgacgacgacgacccggccaccgacttgcctcgggccgtctccgccaccagcgtcgccgacgacccaccacccgtcctggagccgcaggttccggcgccggcgccttcggaggggtcaggcaagggcggcgccggcgtccacaccgcggtcaagcaggtgcagtgggcctccttcggaggtggcgtggacgacggccctgatccgttcgctgatctctcgggaggcgccggtgacgacgacggcttcctcgggaacacggcggggacccaggcggccttggatcacgccgccgaggtgacggatcaggacttcttcgctgggagcagctcctccgatcagcagaatgtccatggtcagcacgaccagggcagaggcagcgccgcggtggattccgcagatcccaaatctctggaggccatgtaccctgggtggaagtacgacgaggcctcacagcaatggtaccagcttgatggcagtgtaaattcaactgggaatgcagctcaggcgctggacgatagcgctcagaatgcacatcatcatcagcagcagctcgacgcggcttacctgcacaattcagcgcacgcggggcttgggacaattgccgaggagagcactaccgcagctggtgctgccaatagttggggccaaggggctgccccggagtacccacccagcatgctcttctatgcagagtatcctggttggtactttgacaccaacactcagcagtggcactcccttgagtcgtaccagcaggccgccgtgcaggctggaacatctagcacgggtcagactgttgttgcaagcgatgatgttgttgcgacttcctctctgacaggccataatgccgggcaaactgaggaccttgttgcccacaatcaggtgacacaacgcaactcatcctcgaatagtttcacccatcagaaccaatggcagaccaccgatgcacttggtaacaatgtacaatctgaaagcctggctagtagcttctatggttttgaacaacacatgaatgctgagactaccagttcctctacgagccaacagactggttttcacacagctgaaacaattacagatcactatggtggacgcaaagccttcgaatcatcaagtcttcagagtggttatagctcctctgacagtcaacaatccagtcacaaggcattcgaaccttccacgggttatcaggctggttacaacgggtttgaacctgcttcaggtcaccacacggcgtttgaacctgccatgcataaccagagtggatacaaggcatttgacccttctacgggtcaccatagtgcttcgtggggattcatgccttccacgggtcagcagactgatttcaagggttccagagcttccacagttcaccaggccggttatgaagagtttgaaatttctagaggttacaatacaaatttcaaggcatttgaatcatcttcatctcaaaatgctggttacaatggttcccagccttcttcaggtcaccaacctaactacatgggatttgacacctctgcaaaccaccatggttatactgatgtcaatggtgttgcgagtactcaaggctttgtcccaatgcaaaccacgtaccagggccagaaacaagcaaatgcaacctcacaagggcacctgtcaaatagctatttgggtactgacaactccatgaactttaatcagcaacaatttctgggtgcaaatgcctcaaatttgcaattcggtcactccccgcatgaaggtaggtcatcggctggacgaccaccacatgccctcgttgcttttgggtttggagggaagctcatagttatgaaagaaactacctccatgcctgcaagttttaacagtggaaatcagggtaactctagtagcacagtgtcggttcttaatctgttggaggtagtctttgataaagttgatccttcaagtgtcactaatggtagtgcacttagttatttccatgctctatgccgtcaacctgttcctggccctctggttggtggaagtgctgcatcaaaggatgtaaataagtggcttgatgaaatgattgcacggtacgagtcttcctctagtgaattccatagaggtgatactcgcaagttgcttatttcattgctgaagatactgtctcagcactatggaaaactgcgttcaccttttgcgtctgacccatcgcaagaggagacagatggtccagaaatggcagtaactaagctattttcatcgtgtaagagaagcactgttcatatgggagattatggatccctagttccctgcatgaaaagtattccttcagaaagtcagatgcaggctgttgcacaagaggtccaaagtcttctagtttctgggagaagaaaagaggcccttcactgtgcacaggcaggtcaactttggggacctgcaatcatactggcattgcagcttggtgataagttttatgtggatacagtgaagaaaatggcccacttccattttgtatctgggtcccctctgcgaacgctatgccttctcatcgctggacaacctgcagatgtttttaatgtagagaacaatgtcaacagtgactatggtgcatcccatcaacctgtggagcctggtcctaatatgttggatgattgggaggagaatttggctattattactgcaaacagaacagaaggtgacgttctagtaatcacccatcttggtgattgcctctggaaagaaaaaaatgagtgcaaggttatgcctcattggtgcagaccatttgaagtgtcctcgaacatttgccagccctgaagccattcagaggacagaggtttatgaatatgcgaaggtgcttggtaattctcaatatatcctactatcctttcagccatataagctgatatatgcatacatgcttgtggaagtggggaaagtttctgattctttgaggtattgccaagcgtctataaaggtactgaaagcctctggtcgtgcccctgaattggaggtgtggaaacaattattttcttcgctggaggagaggatacgcactcaccagcagggtggatatggcacaaatcttgccccaggaaaaatagttgggaagatttttacctcgcttgataaatctatatcccgcatgatggtcaatgactgagatagcagaggatagtggtggcactggcaggaaaattgcacacaacagaagtgtttctgagccggactttggtagatcatccaaacagggtgctggtggatcagatggtacacagagcagtgcatcaggatccagcagttctcgatttggttggctagtgcagaagactatgggattagtgtcaaaatcccaccgccaggcaaaattaggggatcagaacaaattttactatgatgaaaaattgaagcggtgggtggaggaaggtgctgctgttcctgccgaagagcctcctcttcctccacctccaacaaaaccatctttccagaatggtatgctagacaataagttgaatggccccatgagcgtaagccatgctcccaatggagtcacagaatggaaatcctcaaattcttcagagcaaggtctgggtatgccgccaattccacctagccaaaaccagttttctgctcgtggacggatgggtgtccggtccagatatgttgacacattcaatagatcaggtgcatctggtgcaatgccatcatataacaaaccagctgctccatctatgacaccaccagctggtgccaagttcttcatgccaactgcagcacctgttgccgcggatcagatgataccacaccaagcagcagagatacacagtgaaaccatccatcaggatgagcggtcagcctcaccgccagcagaaacatcattttcttcaaccccaccacccacgcaatttccatcaccagtgcaatcaacaatttatcggcaatctagtatggagaacatctccaccccttaccagggttccggggtatcgtcattaagcaacgacagctcattctcaaaatctcgagccgcgtcctggagtgggacatactctgagcagtttaatgcttttgcgggcactatatcgcctgacagacagacgacgcattcaccactgatgcctggcaaaccaccacacagccgttccaacagcaactcatcagggcatctcaatggattggcagaggatcttcatgaggtcgagctgtaactggcgactggtcagcatgaccgtcgcaactcgtgtcttaaaggcagcgatgacaacccctccccaagcaggtgacagaaaagaaggtgcccttaaaatgctgaccacggggatgccgcagctggaatgggcttggtgtgactttgcacgagattctggggcgcgctctaaaccaccgaggtgcgtcaggcctgtactaatagagatgcagggtttttttttgtagccatatatacatatatgttggttttgtgttttagagagaagggaaagggttgggtgggcctttgtttacaggtgggaagggaagagaagcagcatgcagatgcccttgtacagataatctgcccctacccagtttgtttaaaacgcaaacaacgccattttggttttagttccctggagaaggatagaggagaaggtgtgtgtctttgtagtgtgagaagcatggctctgtagtgttgttgttatagtgtactactactgtgctagccagccgcatacacagactgtttattctttggagacgaatcaattctttcatcttgactagggcattattatttgtta

SEQ ID NO: 49209 - DNA, 5149 bp, Zea Mays
ccggccggcaagtccccgcctccgcctccgcgcctgactgtcccctccccaccatttcattccaattgagagccgtggggaccaatcaaccctagatccacctcgtccctccacgcgacaggagaggtatctccctgatccaactccgcatggcctcctcctccttcgcccccgacgaccagaccgacgccgacttcttcgacaagctcgtcgacgacgacgacccggccaccgacttgcctcgggccgtctccgccaccagcgtcgccgacgacccaccacccgtcctggagccgcaggttccggcgccggcgccttcggaggggtcaggcaagggcggcgccggcgtccacaccgcggtcaagcaggtgcagtgggcctccttcggaggtggcgtggacgacggccctgatccgttcgctgatctctcgggaggcgccggtgacgacgacggcttcctcgggaacacggcggggacccaggcggccttggatcacgccgccgaggtgacggatcaggacttcttcgctgggagcagctcctccgatcagcagaatgtccatggtcagcacgaccagggcagaggcagcgccgcggtggattccgcagatcccaaatctctggaggccatgtaccctgggtggaagtacgacgaggcctcacagcaatggtaccagcttgatggcagtgtaaattcaactgggaatgcagctcaggcgctggacgatagcgctcagaatgcacatcatcatcagcagcagctcgacgcggcttacctgcacaattcagcgcacgcggggcttgggacaattgccgaggagagcactaccgcagctggtgctgccaatagttggggccaaggggctgccccggagtacccacccagcatgctcttctatgcagagtatcctggttggtactttgacaccaacactcagcagtggcactcccttgagtcgtaccagcaggccgccgtgcaggctggaacatctagcacgggtcagactgttgttgcaagcgatgatgttgttgcgacttcctctctgacaggccataatgccgggcaaactgaggaccttgttgcccacaatcaggtgacacaacgcaactcatcctcgaatagtttcacccatcagaaccaatggcagaccaccgatgcacttggtaacaatgtacaatctgaaagcctggctagtagcttctatggttttgaacaacacatgaatgctgagactaccagttcctctacgagccaacagactggttttcacacagctgaaacaattacagatcactatggtggacgcaaagccttcgaatcatcaagtcttcagagtggttatagctcctctgacagtcaacaatccagtcacaaggcattcgaaccttccacgggttatcaggctggttacaacgggtttgaacctgcttcaggtcaccacacggcgtttgaacctgccatgcataaccagagtggatacaaggcatttgacccttctacgggtcaccatagtgcttcgtggggattcatgccttccacgggtcagcagactgatttcaagggttccagagcttccacagttcaccaggccggttatgaagagtttgaaatttctagaggttacaatacaaatttcaaggcatttgaatcatcttcatctcaaaatgctggttacaatggttcccagccttcttcaggtcaccaacctaactacatgggatttgacacctctgcaaaccaccatggttatactgatgtcaatggtgttgcgagtactcaaggctttgtcccaatgcaaaccacgtaccagggccagaaacaagcaaatgcaacctcacaagggcacctgtcaaatagctatttgggtactgacaactccatgaactttaatcagcaacaatttctgggtgcaaatgcctcaaatttgcaattcggtcactccccgcatgaaggtaggtcatcggctggacgaccaccacatgccctcgttgcttttgggtttggagggaagctcatagttatgaaagaaactacctccatgcctgcaagttttaacagtggaaatcagggtaactctagtagcacagtgtcggttcttaatctgttggaggtagtctttgataaagttgatccttcaagtgtcactaatggtagtgcacttagttatttccatgctctatgccgtcaacctgttcctggccctctggttggtggaagtgctgcatcaaaggatgtaaataagtggcttgatgaaatgattgcacggtacgagtcttcctctagtgaattccatagaggtgatactcgcaagttgcttatttcattgctgaagatactgtctcagcactatggaaaactgcgttcaccttttgcgtctgacccatcgcaagagatggtccagaaatggcagtaactaagctattttcatcgtgtaagagaagcactgttcatatgggagattatggatccctagttccctgcatgaaaagtattccttcagaaagtcagatgcaggctgttgcacaagaggtccaaagtcttctagtttctgggagaagaaaagaggcccttcactgtgcacaggcaggtcaactttggggacctgcaatcatactggcattgcagcttggtgataagttttatgtggatacagtgaagaaaatggcccacttccattttgtatctgggtcccctctgcgaacgctatgccttctcatcgctggacaacctgcagatgtttttaatgtagagaacaatgtcaacagtgactatggtgcatcccatcaacctgtggagcctggtcctaatatgttggatgattgggaggagaatttggctattattactgcaaacagaacagaaggtgacgttctagtaatcacccatcttggtgattgcctctggaaagaaaaaaatgaggttgcagctgcccattcatgctatttagttgctgaactaaacattgattcatactcggaaagtgcaaggttatgcctcattggtgcagaccatttgaagtgtcctcgaacatttgccagccctgaagccattcagaggacagaggtttatgaatatgcgaaggtgcttggtaattctcaatatatcctactatcctttcagccatataagctgatatatgcatacatgcttgtggaagtggggaaagtttctgattctttgaggtattgccaagcgtctataaaggtactgaaagcctctggtcgtgcccctgaattggaggtgtggaaacaattattttcttcgctggaggagaggatacgcactcaccagcagggtggatatggcacaaatcttgccccaggaaaaatagttgggaagatttttacctcgcttgataaatctatatcccgcatgatgggtacaccatctgcaccacttccaccgttgccacatggatcttttagtgataaagagagccactctatacctgcggcagcaaaatttgttaatagccaatcggtaatggtcatgccatcgttaataccatctgcttcaatgcagtcaatgactgagatagcagaggatagtggtggcactggcaggaaaattgcacacaacagaagtgtttctgagccggactttggtagatcatccaaacagggtgctggtggatcagatggtacacagagcagtgcatcaggatccagcagttctcgatttggttggctagtgcagaagactatgggattagtgtcaaaatcccaccgccaggcaaaattaggggatcagaacaaattttactatgatgaaaaattgaagcggtgggtggaggaaggtgctgctgttcctgccgaagagcctcctcttcctccacctccaacaaaaccatctttccagaatggtatgctagacaataagttgaatggccccatgagcgtaagccatgctcccaatggagtcacagaatggaaatcctcaaattcttcagagcaaggtctgggtatgccgccaattccacctagccaaaaccagttttctgctcgtggacggatgggtgtccggtccagatatgttgacacattcaatagatcaggtgcatctggtgcaatgccatcatataacaaaccagctgctccatctatgacaccaccagctggtgccaagttcttcatgccaactgcagcacctgttgccgcggatcagatgataccacaccaagcagcagagatacacagtgaaaccatccatcaggatgagcggtcagcctcaccgccagcagaaacatcattttcttcaaccccaccacccacgcaatttccatcaccagtgcaatcaacaatttatcggcaatctagtatggagaacatctccaccccttaccagggttccggggtatcgtcattaagcaacgacagctcattctcaaaatctcgagccgcgtcctggagtgggacatactctgagcagtttaatgcttttgcgggcactatatcgcctgacagacagacgacgcattcaccactgatgcctggcaaaccaccacacagccgttccaacagcaactcatcagggcatctcaatggattggcagaggatcttcatgaggtcgagctgtaactggcgactggtcagcatgaccgtcgcaactcgtgtcttaaaggcagcgatgacaacccctccccaagcaggtgacagaaaagaaggtgcccttaaaatgctgaccacggggatgccgcagctggaatgggcttggtgtgactttgcacgagattctggggcgcgctctaaaccaccgaggtgcgtcaggcctgtactaatagagatgcagggtttttttttgtagccatatatacatatatgttggttttgtgttttagagagaagggaaagggttgggtgggcctttgtttacaggtgggaagggaagagaagcagcatgcagatgcccttgtacagataatctgcccctacccagtttgtttaaaacgcaaacaacgccattttggttttagttccctggagaaggatagaggagaaggtgtgtgtctttgtagtgtgagaagcatggctctgtagtgttgttgttatagtgtactactactgtgctagccagccgcatacacagactgtttattctttggagacgaatcaattctttcatcttgactagggcattattatttgtta

SEQ ID NO: 49210 - DNA, 5152 bp, Zea Mays
ccggccggcaagtccccgcctccgcctccgcgcctgactgtcccctccccaccatttcattccaattgagagccgtggggaccaatcaaccctagatccacctcgtccctccacgcgacaggagaggtatctccctgatccaactccgcatggcctcctcctccttcgcccccgacgaccagaccgacgccgacttcttcgacaagctcgtcgacgacgacgacccggccaccgacttgcctcgggccgtctccgccaccagcgtcgccgacgacccaccacccgtcctggagccgcaggttccggcgccggcgccttcggaggggtcaggcaagggcggcgccggcgtccacaccgcggtcaagcaggtgcagtgggcctccttcggaggtggcgtggacgacggccctgatccgttcgctgatctctcgggaggcgccggtgacgacgacggcttcctcgggaacacggcggggacccaggcggccttggatcacgccgccgaggtgacggatcaggacttcttcgctgggagcagctcctccgatcagcagaatgtccatggtcagcacgaccagggcagaggcagcgccgcggtggattccgcagatcccaaatctctggaggccatgtaccctgggtggaagtacgacgaggcctcacagcaatggtaccagcttgatggcagtgtaaattcaactgggaatgcagctcaggcgctggacgatagcgctcagaatgcacatcatcatcagcagcagctcgacgcggcttacctgcacaattcagcgcacgcggggcttgggacaattgccgaggagagcactaccgcagctggtgctgccaatagttggggccaaggggctgccccggagtacccacccagcatgctcttctatgcagagtatcctggttggtactttgacaccaacactcagcagtggcactcccttgagtcgtaccagcaggccgccgtgcaggctggaacatctagcacgggtcagactgttgttgcaagcgatgatgttgttgcgacttcctctctgacaggccataatgccgggcaaactgaggaccttgttgcccacaatcaggtgacacaacgcaactcatcctcgaatagtttcacccatcagaaccaatggcagaccaccgatgcacttggtaacaatgtacaatctgaaagcctggctagtagcttctatggttttgaacaacacatgaatgctgagactaccagttcctctacgagccaacagactggttttcacacagctgaaacaattacagatcactatggtggacgcaaagccttcgaatcatcaagtcttcagagtggttatagctcctctgacagtcaacaatccagtcacaaggcattcgaaccttccacgggttatcaggctggttacaacgggtttgaacctgcttcaggtcaccacacggcgtttgaacctgccatgcataaccagagtggatacaaggcatttgacccttctacgggtcaccatagtgcttcgtggggattcatgccttccacgggtcagcagactgatttcaagggttccagagcttccacagttcaccaggccggttatgaagagtttgaaatttctagaggttacaatacaaatttcaaggcatttgaatcatcttcatctcaaaatgctggttacaatggttcccagccttcttcaggtcaccaacctaactacatgggatttgacacctctgcaaaccaccatggttatactgatgtcaatggtgttgcgagtactcaaggctttgtcccaatgcaaaccacgtaccagggccagaaacaagcaaatgcaacctcacaagggcacctgtcaaatagctatttgggtactgacaactccatgaactttaatcagcaacaatttctgggtgcaaatgcctcaaatttgcaattcggtcactccccgcatgaaggtaggtcatcggctggacgaccaccacatgccctcgttgcttttgggtttggagggaagctcatagttatgaaagaaactacctccatgcctgcaagttttaacagtggaaatcagggtaactctagtagcacagtgtcggttcttaatctgttggaggtagtctttgataaagttgatccttcaagtgtcactaatggtagtgcacttagttatttccatgctctatgccgtcaacctgttcctggccctctggttggtggaagtgctgcatcaaaggatgtaaataagtggcttgatgaaatgattgcacggtacgagtcttcctctagtgaattccatagaggtgatactcgcaagttgcttatttcattgctgaagatactgtctcagcactatggaaaactgcgttcaccttttgcgtctgacccatcgcaagaggagacagatggtccagaaatggcagtaactaagctattttcatcgtgtaagagaagcactgttcatatgggagattatggatccctagttccctgcatgaaaagtattccttcagaaagtcagatgcaggctgttgcacaagaggtccaaagtcttctagtttctgggagaagaaaagaggcccttcactgtgcacaggcaggtcaactttggggacctgcaatcatactggcattgcagcttggtgataagttttatgtggatacagtgaagaaaatggcccacttccattttgtatctgggtcccctctgcgaacgctatgccttctcatcgctggacaacctgcagatgtttttaatgtagagaacaatgtcaacagtgactatggtgcatcccatcaacctgtggagcctggtcctaatatgttggatgattgggaggagaatttggctattattactgcaaacagaacagaaggtgacgttctagtaatcacccatcttggtgattgcctctggaaagaaaaaaatgagcagctgcccattcatgctatttagttgctgaactaaacattgattcatactcggaaagtgcaaggttatgcctcattggtgcagaccatttgaagtgtcctcgaacatttgccagccctgaagccattcagaggacagaggtttatgaatatgcgaaggtgcttggtaattctcaatatatcctactatcctttcagccatataagctgatatatgcatacatgcttgtggaagtggggaaagtttctgattctttgaggtattgccaagcgtctataaaggtactgaaagcctctggtcgtgcccctgaattggaggtgtggaaacaattattttcttcgctggaggagaggatacgcactcaccagcagggtggatatggcacaaatcttgccccaggaaaaatagttgggaagatttttacctcgcttgataaatctatatcccgcatgatgggtacaccatctgcaccacttccaccgttgccacatggatcttttagtgataaagagagccactctatacctgcggcagcaaaatttgttaatagccaatcggtaatggtcatgccatcgttaataccatctgcttcaatgcagtcaatgactgagatagcagaggatagtggtggcactggcaggaaaattgcacacaacagaagtgtttctgagccggactttggtagatcatccaaacagggtgctggtggatcagatggtacacagagcagtgcatcaggatccagcagttctcgatttggttggctagtgcagaagactatgggattagtgtcaaaatcccaccgccaggcaaaattaggggatcagaacaaattttactatgatgaaaaattgaagcggtgggtggaggaaggtgctgctgttcctgccgaagagcctcctcttcctccacctccaacaaaaccatctttccagaatggtatgctagacaataagttgaatggccccatgagcgtaagccatgctcccaatggagtcacagaatggaaatcctcaaattcttcagagcaaggtctgggtatgccgccaattccacctagccaaaaccagttttctgctcgtggacggatgggtgtccggtccagatatgttgacacattcaatagatcaggtgcatctggtgcaatgccatcatataacaaaccagctgctccatctatgacaccaccagctggtgccaagttcttcatgccaactgcagcacctgttgccgcggatcagatgataccacaccaagcagcagagatacacagtgaaaccatccatcaggatgagcggtcagcctcaccgccagcagaaacatcattttcttcaaccccaccacccacgcaatttccatcaccagtgcaatcaacaatttatcggcaatctagtatggagaacatctccaccccttaccagggttccggggtatcgtcattaagcaacgacagctcattctcaaaatctcgagccgcgtcctggagtgggacatactctgagcagtttaatgcttttgcgggcactatatcgcctgacagacagacgacgcattcaccactgatgcctggcaaaccaccacacagccgttccaacagcaactcatcagggcatctcaatggattggcagaggatcttcatgaggtcgagctgtaactggcgactggtcagcatgaccgtcgcaactcgtgtcttaaaggcagcgatgacaacccctccccaagcaggtgacagaaaagaaggtgcccttaaaatgctgaccacggggatgccgcagctggaatgggcttggtgtgactttgcacgagattctggggcgcgctctaaaccaccgaggtgcgtcaggcctgtactaatagagatgcagggtttttttttgtagccatatatacatatatgttggttttgtgttttagagagaagggaaagggttgggtgggcctttgtttacaggtgggaagggaagagaagcagcatgcagatgcccttgtacagataatctgcccctacccagtttgtttaaaacgcaaacaacgccattttggttttagttccctggagaaggatagaggagaaggtgtgtgtctttgtagtgtgagaagcatggctctgtagtgttgttgttatagtgtactactactgtgctagccagccgcatacacagactgtttattctttggagacgaatcaattctttcatcttgactagggcattattatttgtta

SEQ ID NO: 49211 - DNA, 2000 bp, Zea Mays
cgtgccgaagcactatgggccgtgccgtgcttagtgtcggcccatttagcacggcccgtttggccatctatacacagcagtcactgctcatcagcatacgggcagtcgggcactctctctccttccccgtccctgtcgccatctatcactttccccgtttgcgttttggcccgaatctccgtctccgtctccgtctccatctccatctcctagccgccgcggctccactcctcagtcctcagtccgaagcgaactctccctccgcatccactgccaccatgagccgcgatcgctacttccaccgcctcctcgacctccacctccacgccaacgacgacctcttcttccccttccctacccctgcctcgtcctgcccctacatcaccgcctcctccgcccaccaccgcttcctcctcgacgaccaccccttctacccaacctcctgcccgctcggcatcacctcccgctccccgatcgacgacaccttcgacctcgacctcctcctccccctccccctccacgccgccgtctccgcgcccccgtgcgcggccttcgacttcgaccccttcctcctcgacaccctcggccaccgcatctccgtcctcgagcgcgcgctcgccctcgccccaccccgccgcaagtacacctacgccgccgaggccaacggcaggaagctcaagtggaccgccgaggacaggcccgccgggggccgcaacctcaagtgggaggccgagctcaggaccccgcacaccgacggcttcgaccgcaagtggaagtgggagtccaaggagtccgccaccggttccaccaaggtcaagtgggccaaggagatcaaggggaagggctgcctcgagccttggtccaactcctactccgtcgaggagacctacggtgaggatgaccatgccgacgacgacagggagaagaagaaacccactggcgtccagaagaaagtcaagggggaaaacaagcagcagcagaagaagcagggcaatgtggagatcgtcgagatcgaggacaacactgccggatgcgtcgccatcagaaaggcttttgaaatgaaccactgcaagggcaagaggaaggaactttccccacaggatgccgcactgctcatccagatgaactacagggcgcacctggcccatcgctcccaggtgctccgttgccttcgcgacctcgccgtcgccaaggccaagctcaaggagatcaggtccttcttctacaacatcacataccgccgccgcatcgcatatgacaatgaagagcgccagaggtttgctgagaagatcattgtcctgctactgacagttgatgcccttgagttattcaccatttgagccacctcacaattccatgcaccattagctaagctgtcgatatatgtgatggatgacgtctgcggaggacctcctatactccctataggtccaaattctaagtccttcaggaaaagggaccggactacatggtccgcaacgcaaggaggtccatgctggaggagctggaggggatgctggagatcgtggagcctcagccgccggggaagccgaggacgcttagccgcaggaggttcgatctcccagaaggcggagccatcgaaaaggagacgagggaggagggcaagtgaagtgcatcggtgggtggtggcatgcttgggcagtttggtatgcgcgatgcggactatagagtttgagtttgtgctgctaccgaaccgtggaccaccttaccccgttgagatgtttgatagctggactttttgtgctgttgtatttgtagaccagaacgttgttctttgtaataaattggcgtgtgctgctttttgctaatattcgcttggctttaatctgtaccgtgttctactacctgaacaatgtttttttctcggtggactgaagtatcagtttgaatagctagctttaatttgaagcgaacaggctttgtacttttgaattctggcatcttgaatgaattttcttgaagtaccctttttattcttt

SEQ ID NO: 49212 - DNA, 1826 bp, Zea Mays
ccaaattccaattcaaccccctctctctactctgctcttcaaatcatcaccaccgcttcaccgctcgcgccagccaatgtcaggcgacggcgacggcgacgtgcgcggcctcgaggcgacggctgccgccgcggcagaggcgacgcgggagctgcaggaggcggccgcggccctcgtcgcaacccgcgccgccgaggaggacgcgctgcgccgcagcgtcgtggcgctggacaccgacgtccgccgcctccagggctcgctccacctcgacccctccacgctcgacaaggtcctcatcgcctcgtcttctgcccttctcttcctccacctcttctcctgctaggctctggctcatgaaagcgcggttgctcctcccgcgtctcagatcgcgattagcttgacgacgcggagttatgtccctacggcgaggattcccatccgttgctctccgtgccaatctcgtgcatggcatggagatgcctgcctacacgattaactgggttgccttgtttcgtccacattttttgatgatgctggttgtggaatggatacgccccactactgtttcggatgttccaggataagagcacgtccaattctggtagcttgtcctctgtctgtgtctcataagctgggactgggaggagttgtgtcaacacgacttctatagtgcattcaaagtttcaaacaccccctaattattattctcatgatcatacgcctgtagtactccaatccagtcaacctcctgtacaacgagggacaataccagagccagaaacacttggaacgggcagaagcgtaccaattaataaaatggattcaaacaataggaatgcctcgccggctgcccaaagaagtaaagagcataccttatatttttcatgggtcaatgccaaataaaaggcaatgatacgaacacagtacgttcaaacattcttttgtgtcgcttgttgcttcatgttttacctagttagcttgttatacaactattaagcacggttgttgtttgttggtatatgatccgatattccgacgctattggtttagctttgaaacctagtttttttacattgttgttgctcctactcgtactgatacaccggctcctccactgttggaaggaaaatcagatgccaatgaaattacaacagcaagaatcagcagtggaacaacagcaagggggagaggaaaagctccccgaaaatctcctcctctactttgagcaaatcctccacgatgacccactcatcgatgaggtggggttcttgcacccaacacaattctgctcactagattgcgcccgagatggtgactccgcttcacaatctacagagttccattgcgcaagatacttctggtgcagagaccacaagcttgccatctccgccgagatcctccccgagctttaccatgctgctcgggatgcctactacaacgcaagggatgccccactatcgcgcactaatctcatgaggcacaccaaggcactgctcatactttgtcctgacctactcactgcatggaactccaggaaaatggtgctatcagcgttgtatgatttcacaaagctcaaggatgaactgcaattgtgtgccttgatcctttcctactctccaaagaacgagagcacatggagccataggagatgggtgataaaacaagttgctgagcaacatcaagatatgttggagcttatagggaatgaatccatactggtcaaagagatagcagagaaatcgaaaatgaactatcgtgcatggaggcatcgatgttggcttattccttacatgacaaggaaacaattatcaatttctgttttctga

SEQ ID NO: 49213 - DNA, 1911 bp, Zea Mays
ccaaattccaattcaaccccctctctctactctgctcttcaaatcatcaccaccgcttcaccgctcgcgccagccaatgtcaggcgacggcgacggcgacgtgcgcggcctcgaggcgacggctgccgccgcggcagaggcgacgcgggagctgcaggaggcggccgcggccctcgtcgcaacccgcgccgccgaggaggacgcgctgcgccgcagcgtcgtggcgctggacaccgacgtccgccgcctccagggctcgctccacctcgacccctccacgctcgacaaggtcctcatcgcctcgtcttctgcccttctcttcctccacctcttctcctgctaggctctggctcatgaaagcgcggttgctcctcccgcgtctcagatcgcgattagcttgacgacgcggagttatgtccctacggcgaggattcccatccgttgctctccgtgccaatctcgtgcatggcatggagatgcctgcctacacgattaactgggttgccttgtttcgtccacattttttgatgatgctggttgtggaatggatacgccccactactgtttcggatgttccaggataagagcacgtccaattctggtagcttgtcctctgtctgtgtctcataagctgggactgggaggagttgtgtcaacacgacttctatagtgcattcaaagtttcaaacaccccctaattattattctcatgatcatacgcctgtagtactccaatccagtcaacctcctgtacaacgagggacaataccagagccagaaacacttggaacgggcagaagcgtaccaattaataaaatggattcaaacaataggaatgcctcgccggctgcccaaagaagtaaagagcataccttatatttttcatgggtcaatgccaaataaaaggcaatgatacgaacacagtacgttcaaacattcttttgtgtcgcttgttgcttcatgttttacctagttagcttgttatacaactattaagcacggttgttgtttgttggtatatgatccgatattccgacgctattggtttagctttgaaacctagtttttttacattgttgttgctcctactcgtactgatacaccggctcctccactgttggaaggaaaatcagatgccaatgaaattacaacagcaagaatcagcagtggaacaacagcaagggggagaggaaaagctccccgaaaatctcctcctctactttgagcaaatcctccacgatgacccactcatagttccattgcgcaagatacttctggtgcagagaccacaagcttgccatctccgccgagatcctccccgagctttaccatgctgctcgggatgcctactacaacgcaagggatgccccactatcgcgcactaatctcatgaggcacaccaaggcactgctcatactttgtcctgacctactcactgcatggaactccaggaaaatggtgctatcagcgttgtatgatttcacaaagctcaaggatgaactgcaattgtgtgccttgatcctttcctactctccaaagaacgagagcacatggagccatagatgggtgataaaacaagttgctgagcaacatcaagatatgttggagcttatagggaatgaatccatactggtcaaagagatagcagagaaatcgaaaatgaactatcgtgcatggaggcatcgatgttggcttattccttacatgacaaggaaacaagtgctggatgaactgaatgagtcaacaagatggagtgagctacatgttgctgacaactgctgcttccactatcgaagatctttgctgcttgcgctactagacaacttctttgggaatgaagaggattcccttagttgggagtcagatatttgcttgctatggaagtgctgcaaagttgattgcatatgacct

SEQ ID NO: 49214 - DNA, 2083 bp, Zea Mays
ccaaattccaattcaaccccctctctctactctgctcttcaaatcatcaccaccgcttcaccgctcgcgccagccaatgtcaggcgacggcgacggcgacgtgcgcggcctcgaggcgacggctgccgccgcggcagaggcgacgcgggagctgcaggaggcggccgcggccctcgtcgcaacccgcgccgccgaggaggacgcgctgcgccgcagcgtcgtggcgctggacaccgacgtccgccgcctccagggctcgctccacctcgacccctccacgctcgacaaggtcctcatcgcctcgtcttctgcccttctcttcctccacctcttctcctgctaggctctggctcatgaaagcgcggttgctcctcccgcgtctcagatcgcgattagcttgacgacgcggagttatgtccctacggcgaggattcccatccgttgctctccgtgccaatctcgtgcatggcatggagatgcctgcctacacgattaactgggttgccttgtttcgtccacattttttgatgatgctggttgtggaatggatacgccccactactgtttcggatgttccaggataagagcacgtccaattctggtagcttgtcctctgtctgtgtctcataagctgggactgggaggagttgtgtcaacacgacttctatagtgcattcaaagtttcaaacaccccctaattattattctcatgatcatacgcctgtagtactccaatccagtcaacctcctgtacaacgagggacaataccagagccagaaacacttggaacgggcagaagcgtaccaattaataaaatggattcaaacaataggaatgcctcgccggctgcccaaagaagtaaagagcataccttatatttttcatgggtcaatgccaaataaaaggcaatgatacgaacacagtacgttcaaacattcttttgtgtcgcttgttgcttcatgttttacctagttagcttgttatacaactattaagcacggttgttgtttgttggtatatgatccgatattccgacgctattggtttagctttgaaacctagtttttttacattgttgttgctcctactcgtactgatacaccggctcctccactgttggaaggaaaatcagatgccaatgaaattacaacagcaagaatcagcagtggaacaacagcaagggggagaggaaaagctccccgaaaatctcctcctctactttgagcaaatcctccacgatgacccactcatcgatgaggtggggttcttgcacccaacacaattctgctcactagattgcgcccgagatggtgactccgcttcacaatctacagagttccattgcgcaagatacttctggtgcagagaccacaagcttgccatctccgccgagatcctccccgagctttaccatgctgctcgggatgcctactacaacgcaagggatgccccactatcgcgcactaatctcatgaggcacaccaaggcactgctcatactttgtcctgacctactcactgcatggaactccaggaaaatggtgctatcagcgttgtatgatttcacaaagctcaaggatgaactgcaattgtgtgccttgatcctttcctactctccaaagaacgagagcacatggagccatagacaattcccatctatttggactttggagctgattttgatataataaaactaaactgcatggagtttgaaataactgtctgccacaggagatgggtgataaaacaagttgctgagcaacatcaagatatgttggagcttatagggaatgaatccatactggtcaaagagatagcagagaaatcgaaaatgaactatcgtgcatggaggcatcgatgttggcttattccttacatgacaaggaaacaagtgctggatgaactgaatgagtcaacaagatggagtgagctacatgttgctgacaactgctgcttccactatcgaagatctttgctgcttgcgctactagacaacttctttgggaatgaagaggattcccttagttgggagtcagatatttgcttgctatggaagtgctgcaaagttgattgcatatgacct

SEQ ID NO: 49215 - DNA, 2640 bp, Zea Mays
ccaaattccaattcaaccccctctctctactctgctcttcaaatcatcaccaccgcttcaccgctcgcgccagccaatgtcaggcgacggcgacggcgacgtgcgcggcctcgaggcgacggctgccgccgcggcagaggcgacgcgggagctgcaggaggcggccgcggccctcgtcgcaacccgcgccgccgaggaggacgcgctgcgccgcagcgtcgtggcgctggacaccgacgtccgccgcctccagggctcgctccacctcgacccctccacgctcgacaaggtcctcatcgcctcgtcttctgcccttctcttcctccacctcttctcctgctaggctctggctcatgaaagcgcggttgctcctcccgcgtctcagatcgcgattagcttgacgacgcggagttatgtccctacggcgaggattcccatccgttgctctccgtgccaatctcgtgcatggcatggagatgcctgcctacacgattaactgggttgccttgtttcgtccacattttttgatgatgctggttgtggaatggatacgccccactactgtttcggatgttccaggataagagcacgtccaattctggtagcttgtcctctgtctgtgtctcataagctgggactgggaggagttgtgtcaacacgacttctatagtgcattcaaagtttcaaacaccccctaattattattctcatgatcatacgcctgtagtactccaatccagtcaacctcctgtacaacgagggacaataccagagccagaaacacttggaacgggcagaagcgtaccaattaataaaatggattcaaacaataggaatgcctcgccggctgcccaaagaagtaaagagcataccttatatttttcatgggtcaatgccaaataaaaggcaatgatacgaacacagtacgttcaaacattcttttgtgtcgcttgttgcttcatgttttacctagttagcttgttatacaactattaagcacggttgttgtttgttggtatatgatccgatattccgacgctattggtttagctttgaaacctagtttttttacattgttgttgctcctactcgtactgatacaccggctcctccactgttggaaggaaaatcagatgccaatgaaattacaacagcaagaatcagcagtggaacaacagcaagggggagaggaaaagctccccgaaaatctcctcctctactttgagcaaatcctccacgatgacccactcatagttccattgcgcaagatacttctggtgcagagaccacaagcttgccatctccgccgagatcctccccgagctttaccatgctgctcgggatgcctactacaacgcaagggatgccccactatcgcgcactaatctcatgaggcacaccaaggcactgctcatactttgtcctgacctactcactgcatggaactccaggaaaatggtgctatcagcgttgtatgatttcacaaagctcaaggatgaactgcaattgtgtgccttgatcctttcctactctccaaagaacgagagcacatggagccatagacaattcccatctatttggactttggagctgattttgatataataaaactaaactgcatggagtttgaaataactgtctgccacaggagatgggtgataaaacaagttgctgagcaacatcaagatatgttggagcttatagggaatgaatccatactggtcaaagagatagcagagaaatcgaaaatgaactatcgtgcatggaggcatcgatgttggcttattccttacatgacaaggaaacaagtgctggatgaactgaatgagtcaacaagatggagtgagctacatgttgctgacaactgctgcttccactatcgaagatctttgctgcttgcgctactagacaacttctttgggaatgaagaggattcccttagttgggagtcagatatttgcttgctatggaagtgctgcaaagttgattgcatatgacctgacaggaggagcttaggtgggatgagatgctgatcaaacgctaccaggggagagagtcgttatggaaccaccgtcggttcctttcacacttgtggatacaacacttgctcactgttgaaggaaactggcccgcaacgacatcccagatggatatgtttgtcatccaggagatacaactgctgtcagagtgcctgcatgatcctgtggatgagtttgaggagtcgcgtgtccaagcagagctttcagcgctctacattatgtggataacaaaggcaatcagcagctggttttacccagcttcttgcttatcagtgcgcatttgctagcatagattcttcccctcccaggggttttgtgttaacagggaaattgctgtatgttttgttggatgcagcaagtcccggatgtgaaggggaagctggaagagaggttgcattttgcctccatggggaggctgaaggacgtgctggcaggagcctgcaggccagagaagaggttttggatgaatttgctcaacctggctgatcaatccagtgacgtacaataatacatgacctttcttgttgagtttgagccgtcaacatacatgacatggacgccaagctcttgcttcaggtcctgtctcccggatttctgccaa

SEQ ID NO: 49216 - DNA, 2368 bp, Zea Mays
ccaaattccaattcaaccccctctctctactctgctcttcaaatcatcaccaccgcttcaccgctcgcgccagccaatgtcaggcgacggcgacggcgacgtgcgcggcctcgaggcgacggctgccgccgcggcagaggcgacgcgggagctgcaggaggcggccgcggccctcgtcgcaacccgcgccgccgaggaggacgcgctgcgccgcagcgtcgtggcgctggacaccgacgtccgccgcctccagggctcgctccacctcgacccctccacgctcgacaaggtcctcatcgcctcgtcttctgcccttctcttcctccacctcttctcctgctaggctctggctcatgaaagcgcggttgctcctcccgcgtctcagatcgcgattagcttgacgacgcggagttatgtccctacggcgaggattcccatccgttgctctccgtgccaatctcgtgcatggcatggagatgcctgcctacacgattaactgggttgccttgtttcgtccacattttttgatgatgctggttgtggaatggatacgccccactactgtttcggatgttccaggataagagcacgtccaattctggtagcttgtcctctgtctgtgtctcataagctgggactgggaggagttgtgtcaacacgacttctatagtgcattcaaagtttcaaacaccccctaattattattctcatgatcatacgcctgtagtactccaatccagtcaacctcctgtacaacgagggacaataccagagccagaaacacttggaacgggcagaagcgtaccaattaataaaatggattcaaacaataggaatgcctcgccggctgcccaaagaagtaaagagcataccttatatttttcatgggtcaatgccaaataaaaggcaatgatacgaacacagaaaatcagatgccaatgaaattacaacagcaagaatcagcagtggaacaacagcaagggggagaggaaaagctccccgaaaatctcctcctctactttgagcaaatcctccacgatgacccactcatcgatgaggtggggttcttgcacccaacacaattctgctcactagattgcgcccgagatggtgactccgcttcacaatctacagagttccattgcgcaagatacttctggtgcagagaccacaagcttgccatctccgccgagatcctccccgagctttaccatgctgctcgggatgcctactacaacgcaagggatgccccactatcgcgcactaatctcatgaggcacaccaaggcactgctcatactttgtcctgacctactcactgcatggaactccaggaaaatggtgctatcagcgttgtatgatttcacaaagctcaaggatgaactgcaattgtgtgccttgatcctttcctactctccaaagaacgagagcacatggagccatagacaattcccatctatttggactttggagctgattttgatataataaaactaaactgcatggagtttgaaataactgtctgccacaggagatgggtgataaaacaagttgctgagcaacatcaagatatgttggagcttatagggaatgaatccatactggtcaaagagatagcagagaaatcgaaaatgaactatcgtgcatggaggcatcgatgttggcttattccttacatgacaaggaaacaagtgctggatgaactgaatgagtcaacaagatggagtgagctacatgttgctgacaactgctgcttccactatcgaagatctttgctgcttgcgctactagacaacttctttgggaatgaagaggattcccttagttgggagtcagatatttgcttgctatggaaggaggagcttaggtgggatgagatgctgatcaaacgctaccaggggagagagtcgttatggaaccaccgtcggttcctttcacacttgtggatacaacacttgctcactgttgaaggaaactggcccgcaacgacatcccagatggatatgtttgtcatccaggagatacaactgctgtcagagtgcctgcatgatcctgtggatgagtttgaggagtcgcgtgtccaagcagagctttcagcgctctacattatgtggataacaaagcaagtcccggatgtgaaggggaagctggaagagaggttgcattttgcctccatggggaggctgaaggacgtgctggcaggagcctgcaggccagagaagaggttttggatgaatttgctcaacctggctgatcaatccagtgacgtacaataatacatgacctttcttgttgagtttgagccgtcaacatacatgacatggacgccaagctcttgcttcaggtcctgtctcccggatttctgccaa

SEQ ID NO: 49217 - DNA, 1237 bp, Zea Mays
aaattccaattcaaccccctctctctactctgctcttcaaatcatcaccaccgcttcaccgctcgcgccagccaatgtcaggcgacggcgacggcgacgtgcgcggcctcgaggcgacggctgccgccgcggcagaggcgacgcgggagctgcaggaggcggccgcggccctcgtcgcaacccgcgccgccgaggaggacgcgctgcgccgcagcgtcgtggcgctggacaccgacgtccgccgcctccagggctcgctccacctcgacccctccacgctcgacaagatgccaatgaaattacaacagcaagaatcagcagtggaacaacagcaagggggagaggaaaagctccccgaaaatctcctcctctactttgagcaaatcctccacgatgacccactcatcgatgaggtggggttcttgcacccaacacaattctgctcactagattgcgcccgagatggtgactccgcttcacaatctacagagttccattgcgcaagatacttctggtgcagagaccacaagcttgccatctccgccgagatcctccccgagctttaccatgctgctcgggatgcctactacaacgcaagggatgccccactatcgcgcactaatctcatgaggcacaccaaggcactgctcatactttgtcctgacctactcactgcatggaactccaggaaaatggtgctatcagcgttgtatgatttcacaaagctcaaggatgaactgcaattgtgtgccttgatcctttcctactctccaaagaacgagagcacatggagccatagacaattcccatctatttggactttggagctgattttgatataataaaactaaactgcatggagtttgaaataactgtctgccacaggagatgggtgataaaacaagttgctgagcaacatcaagatatgttggagcttatagggaatgaatccatactggtcaaagagatagcagagaaatcgaaaatgaactatcgtgcatggaggcatcgatgttggcttattccttacatgacaaggaaacaagtgctggatgaactgaatgagtcaacaagatggagtgagctacatgttgctgacaactgctgcttccactatcgaagatctttgctgcttgcgctactagacaacttctttgggaatgaagaggattcccttagttgggagtcagatatttgcttgctatggaagtgctgcaaagttgattgcatatgacct

SEQ ID NO: 49218 - DNA, 1485 bp, Zea Mays
agccaatgtcaggcgacggcgacggcgacgtgcgcggcctcgaggcgacggctgccgccgcggcagaggcgacgcgggagctgcaggaggcggccgcggccctcgtcgcaacccgcgccgccgaggaggacgcgctgcgccgcagcgtcgtggcgctggacaccgacgtccgccgcctccagggctcgctccacctcgacccctccacgctcgacaagatgccaatgaaattacaacagcaagaatcagcagtggaacaacagcaagggggagaggaaaagctccccgaaaatctcctcctctactttgagcaaatcctccacgatgacccactcatagttccattgcgcaagatacttctggtgcagagaccacaagcttgccatctccgccgagatcctccccgagctttaccatgctgctcgggatgcctactacaacgcaagggatgccccactatcgcgcactaatctcatgaggcacaccaaggcactgctcatactttgtcctgacctactcactgcatggaactccaggaaaatggtgctatcagcgttgtatgatttcacaaagctcaaggatgaactgcaattgtgtgccttgatcctttcctactctccaaagaacgagagcacatggagccataggagatgggtgataaaacaagttgctgagcaacatcaagatatgttggagcttatagggaatgaatccatactggtcaaagagatagcagagaaatcgaaaatgaactatcgtgcatggaggcatcgatgttggcttattccttacatgacaaggaaacaagtgctggatgaactgaatgagtcaacaagatggagtgagctacatgttgctgacaactgctgcttccactatcgaagatctttgctgcttgcgctactagacaacttctttgggaatgaagaggattcccttagttgggagtcagatatttgcttgctatggaaggaggagcttaggtgggatgagatgctgatcaaacgctaccaggggagagagtcgttatggaaccaccgtcggttcctttcacacttgtggatacaacacttgctcactgttgaaggaaactggcccgcaacgacatcccagatggatatgtttgtcatccaggagatacaactgctgtcagagtgcctgcatgatcctgtggatgagtttgaggagtcgcgtgtccaagcagagctttcagcgctctacattatgtggataacaaagcaagtcccggatgtgaaggggaagctggaagagaggttgcattttgcctccatggggaggctgaaggacgtgctggcaggagcctgcaggccagagaagaggttttggatgaatttgctcaacctggctgatcaatccagtgacgtacaataatacatgacctttcttgttgagtttgagccgtcaacatacatgacatggacgccaagctcttgcttcaggtcctgtctcccggatttctgccaa

SEQ ID NO: 49219 - DNA, 1480 bp, Zea Mays
ggccctcgtcgcaacccgcgccgccgaggaggacgcgctgcgccgcagcgtcgtggcgctggacaccgacgtccgccgcctccagggctcgctccacctcgacccctccacgctcgacaaggaaaatcagatgccaatgaaattacaacagcaagaatcagcagtggaacaacagcaagggggagaggaaaagctccccgaaaatctcctcctctactttgagcaaatcctccacgatgacccactcatcgatgaggtggggttcttgcacccaacacaattctgctcactagattgcgcccgagatggtgactccgcttcacaatctacagagttccattgcgcaagatacttctggtgcagagaccacaagcttgccatctccgccgagatcctccccgagctttaccatgctgctcgggatgcctactacaacgcaagggatgccccactatcgcgcactaatctcatgaggcacaccaaggcactgctcatactttgtcctgacctactcactgcatggaactccaggaaaatggtgctatcagcgttgtatgatttcacaaagctcaaggatgaactgcaattgtgtgccttgatcctttcctactctccaaagaacgagagcacatggagccataggagatgggtgataaaacaagttgctgagcaacatcaagatatgttggagcttatagggaatgaatccatactggtcaaagagatagcagagaaatcgaaaatgaactatcgtgcatggaggcatcgatgttggcttattccttacatgacaaggaaacaagtgctggatgaactgaatgagtcaacaagatggagtgagctacatgttgctgacaactgctgcttccactatcgaagatctttgctgcttgcgctactagacaacttctttgggaatgaagaggattcccttagttgggagtcagatatttgcttgctatggaaggaggagcttaggtgggatgagatgctgatcaaacgctaccaggggagagagtcgttatggaaccaccgtcggttcctttcacacttgtggatacaacacttgctcactgttgaaggaaactggcccgcaacgacatcccagatggatatgtttgtcatccaggagatacaactgctgtcagagtgcctgcatgatcctgtggatgagtttgaggagtcgcgtgtccaagcagagctttcagcgctctacattatgtggataacaaagcaagtcccggatgtgaaggggaagctggaagagaggttgcattttgcctccatggggaggctgaaggacgtgctggcaggagcctgcaggccagagaagaggttttggatgaatttgctcaacctggctgatcaatccagtgacgtacaataatacatgacctttcttgttgagtttgagccgtcaacatacatgacatggacgccaagctcttgcttcaggtcctgtctcccggatttctgccaa

SEQ ID NO: 49220 - DNA, 1451 bp, Zea Mays
cgaggaggacgcgctgcgccgcagcgtcgtggcgctggacaccgacgtccgccgcctccagggctcgctccacctcgacccctccacgctcgacaaggtccatgccaatgaaattacaacagcaagaatcagcagtggaacaacagcaagggggagaggaaaagctccccgaaaatctcctcctctactttgagcaaatcctccacgatgacccactcatcgatgaggtggggttcttgcacccaacacaattctgctcactagattgcgcccgagatggtgactccgcttcacaatctacagagttccattgcgcaagatacttctggtgcagagaccacaagcttgccatctccgccgagatcctccccgagctttaccatgctgctcgggatgcctactacaacgcaagggatgccccactatcgcgcactaatctcatgaggcacaccaaggcactgctcatactttgtcctgacctactcactgcatggaactccaggaaaatggtgctatcagcgttgtatgatttcacaaagctcaaggatgaactgcaattgtgtgccttgatcctttcctactctccaaagaacgagagcacatggagccataggagatgggtgataaaacaagttgctgagcaacatcaagatatgttggagcttatagggaatgaatccatactggtcaaagagatagcagagaaatcgaaaatgaactatcgtgcatggaggcatcgatgttggcttattccttacatgacaaggaaacaagtgctggatgaactgaatgagtcaacaagatggagtgagctacatgttgctgacaactgctgcttccactatcgaagatctttgctgcttgcgctactagacaacttctttgggaatgaagaggattcccttagttgggagtcagatatttgcttgctatggaaggaggagcttaggtgggatgagatgctgatcaaacgctaccaggggagagagtcgttatggaaccaccgtcggttcctttcacacttgtggatacaacacttgctcactgttgaaggaaactggcccgcaacgacatcccagatggatatgtttgtcatccaggagatacaactgctgtcagagtgcctgcatgatcctgtggatgagtttgaggagtcgcgtgtccaagcagagctttcagcgctctacattatgtggataacaaagcaagtcccggatgtgaaggggaagctggaagagaggttgcattttgcctccatggggaggctgaaggacgtgctggcaggagcctgcaggccagagaagaggttttggatgaatttgctcaacctggctgatcaatccagtgacgtacaataatacatgacctttcttgttgagtttgagccgtcaacatacatgacatggacgccaagctcttgcttcaggtcctgtctcccggatttctgccaa

SEQ ID NO: 49221 - DNA, 1529 bp, Zea Mays
ctgcgccgcagcgtcgtggcgctggacaccgacgtccgccgcctccagggctcgctccacctcgacccctccacgctcgacaaggaaaatcagatgccaatgaaattacaacagcaagaatcagcagtggaacaacagcaagggggagaggaaaagctccccgaaaatctcctcctctactttgagcaaatcctccacgatgacccactcatcgatgaggtggggttcttgcacccaacacaattctgctcactagattgcgcccgagatggtgactccgcttcacaatctacagagttccattgcgcaagatacttctggtgcagagaccacaagcttgccatctccgccgagatcctccccgagctttaccatgctgctcgggatgcctactacaacgcaagggatgccccactatcgcgcactaatctcatgaggcacaccaaggcactgctcatactttgtcctgacctactcactgcatggaactccaggaaaatggtgctatcagcgttgtatgatttcacaaagctcaaggatgaactgcaattgtgtgccttgatcctttcctactctccaaagaacgagagcacatggagccatagacaattcccatctatttggactttggagctgattttgatataataaaactaaactgcatggagtttgaaataactgtctgccacaggagatgggtgataaaacaagttgctgagcaacatcaagatatgttggagcttatagggaatgaatccatactggtcaaagagatagcagagaaatcgaaaatgaactatcgtgcatggaggcatcgatgttggcttattccttacatgacaaggaaacaagtgctggatgaactgaatgagtcaacaagatggagtgagctacatgttgctgacaactgctgcttccactatcgaagatctttgctgcttgcgctactagacaacttctttgggaatgaagaggattcccttagttgggagtcagatatttgcttgctatggaaggaggagcttaggtgggatgagatgctgatcaaacgctaccaggggagagagtcgttatggaaccaccgtcggttcctttcacacttgtggatacaacacttgctcactgttgaaggaaactggcccgcaacgacatcccagatggatatgtttgtcatccaggagatacaactgctgtcagagtgcctgcatgatcctgtggatgagtttgaggagtcgcgtgtccaagcagagctttcagcgctctacattatgtggataacaaagcaagtcccggatgtgaaggggaagctggaagagaggttgcattttgcctccatggggaggctgaaggacgtgctggcaggagcctgcaggccagagaagaggttttggatgaatttgctcaacctggctgatcaatccagtgacgtacaataatacatgacctttcttgttgagtttgagccgtcaacatacatgacatggacgccaagctcttgcttcaggtcctgtctcccggatttctgccaa

SEQ ID NO: 49222 - DNA, 1425 bp, Zea Mays
agcgtcgtggcgctggacaccgacgtccgccgcctccagggctcgctccacctcgacccctccacgctcgacaagatgccaatgaaattacaacagcaagaatcagcagtggaacaacagcaagggggagaggaaaagctccccgaaaatctcctcctctactttgagcaaatcctccacgatgacccactcatcgatgaggtggggttcttgcacccaacacaattctgctcactagattgcgcccgagatggtgactccgcttcacaatctacagagttccattgcgcaagatacttctggtgcagagaccacaagcttgccatctccgccgagatcctccccgagctttaccatgctgctcgggatgcctactacaacgcaagggatgccccactatcgcgcactaatctcatgaggcacaccaaggcactgctcatactttgtcctgacctactcactgcatggaactccaggaaaatggtgctatcagcgttgtatgatttcacaaagctcaaggatgaactgcaattgtgtgccttgatcctttcctactctccaaagaacgagagcacatggagccataggagatgggtgataaaacaagttgctgagcaacatcaagatatgttggagcttatagggaatgaatccatactggtcaaagagatagcagagaaatcgaaaatgaactatcgtgcatggaggcatcgatgttggcttattccttacatgacaaggaaacaagtgctggatgaactgaatgagtcaacaagatggagtgagctacatgttgctgacaactgctgcttccactatcgaagatctttgctgcttgcgctactagacaacttctttgggaatgaagaggattcccttagttgggagtcagatatttgcttgctatggaaggaggagcttaggtgggatgagatgctgatcaaacgctaccaggggagagagtcgttatggaaccaccgtcggttcctttcacacttgtggatacaacacttgctcactgttgaaggaaactggcccgcaacgacatcccagatggatatgtttgtcatccaggagatacaactgctgtcagagtgcctgcatgatcctgtggatgagtttgaggagtcgcgtgtccaagcagagctttcagcgctctacattatgtggataacaaagcaagtcccggatgtgaaggggaagctggaagagaggttgcattttgcctccatggggaggctgaaggacgtgctggcaggagcctgcaggccagagaagaggttttggatgaatttgctcaacctggctgatcaatccagtgacgtacaataatacatgacctttcttgttgagtttgagccgtcaacatacatgacatggacgccaagctcttgcttcaggtcctgtctcccggatttctgccaa

SEQ ID NO: 49223 - DNA, 1304 bp, Zea Mays
ccacctcgacccctccacgctcgacaaggaaaatcagatgccaatgaaattacaacagcaagaatcagcagtggaacaacagcaagggggagaggaaaagctccccgaaaatctcctcctctactttgagcaaatcctccacgatgacccactcatagttccattgcgcaagatacttctggtgcagagaccacaagcttgccatctccgccgagatcctccccgagctttaccatgctgctcgggatgcctactacaacgcaagggatgccccactatcgcgcactaatctcatgaggcacaccaaggcactgctcatactttgtcctgacctactcactgcatggaactccaggaaaatggtgctatcagcgttgtatgatttcacaaagctcaaggatgaactgcaattgtgtgccttgatcctttcctactctccaaagaacgagagcacatggagccataggagatgggtgataaaacaagttgctgagcaacatcaagatatgttggagcttatagggaatgaatccatactggtcaaagagatagcagagaaatcgaaaatgaactatcgtgcatggaggcatcgatgttggcttattccttacatgacaaggaaacaagtgctggatgaactgaatgagtcaacaagatggagtgagctacatgttgctgacaactgctgcttccactatcgaagatctttgctgcttgcgctactagacaacttctttgggaatgaagaggattcccttagttgggagtcagatatttgcttgctatggaaggaggagcttaggtgggatgagatgctgatcaaacgctaccaggggagagagtcgttatggaaccaccgtcggttcctttcacacttgtggatacaacacttgctcactgttgaaggaaactggcccgcaacgacatcccagatggatatgtttgtcatccaggagatacaactgctgtcagagtgcctgcatgatcctgtggatgagtttgaggagtcgcgtgtccaagcagagctttcagcgctctacattatgtggataacaaagcaagtcccggatgtgaaggggaagctggaagagaggttgcattttgcctccatggggaggctgaaggacgtgctggcaggagcctgcaggccagagaagaggttttggatgaatttgctcaacctggctgatcaatccagtgacgtacaataatacatgacctttcttgttgagtttgagccgtcaacatacatgacatggacgccaagctcttgcttcaggtcctgtctcccggatttctgccaa

SEQ ID NO: 49224 - DNA, 2255 bp, Zea Mays
gcgtgtggtcgcgcgtgatgcggaccagttccaggttccagcgagagtgcgcggatgtcggcggcgcggccttggcctagtgcgcaaacaaggaggggggagggccgcgggcaggcggccttgacttgcggcgcgggcaccgccatcgctgtctgaggccgcgcgggctcgctcgctcgctcgcaaactagggtcggtggaccgtgcttgcgcacgttttctcccctcctcctcgcccaccgctgccaccaatcacgccgctgccggctcagccgttggagccgcctcgatccggactcacccgcgttggacctctccgttcccctctactaggaattggagatcggtccagatacctctcacaattttgcctctatctatttgacttttcaaagagagattaatactatacccctactggctaaagggttacagagtattcctatggacatgatatcatcctgtcccatctgcaatatacaagttcttacggttgagctggaatggcatgccaatagccactttgatgacgatcaactccaaagggacatcgaattagcacatcagatagcagttgctgaatcaagtacagataccatgaatgacccaaaacattatagtggatcattcactagtgactctaatactataggggcctcatcgagtcatagtggatactcacaccattacagtgagctattggatgaacaaatctcttgtatggtcagagcacaaattcgaagcaaagttcaagaagtggaaggcggtattatgagcttgttgaggagctgcttggagtcagaagctggttcctcaaaaagtatgatatcaggctatattgaccatcatcagagtctttcatcagaagataagggatggggctgtggatggagaaatattcagatgctgagctctcatctattgaagcaaagacaagaagctagagaagtattatttggtggttctggatttgttcctgacatcccttcactccagaggtggcttgagattgcttgggataaaaaatttgatacgattggctccagccactttcacaacaaagtttatggtgccaagaagtggatagggactacagaatgtgctaccctcttccgctcttttggcctccgtgcaaagattgtagattttgatagcacagaatcatccgacctccaaagtaagaacagtagccatgcagcaagtcaagtacgaggacttatggataagttcttaataaagagtaattcccctaaatcatcgtctgaattttgtcaagaggatgctgaaagtatgagaggccaacacgcccttgttgactgggtttggaactattttgcatgtgagcgctctgatagattaaccacacagcgtgccactgtcagcaataaaacaccactctattttcaacatcaaggtcattcaaggacaattgttgggattcaaaaggaaatggttcaccgtggatctcaagaacaatacacccttttgattttagatcctggtcatagaactgcagatctagaaaggtccctaagaagcaaaaatggatggcagcgtctggtgaagagaggtgtccacacgctcaggaagccacagtatcagttcagaagagatggagcaactgaagactattgatagtatgcttgtcaggttttaggttcctgaaaacaggatgaggattatatgtgttttgcacacagggcactcccctggttgaagaaacaagaacatctaatccattgccgaacggtgcgctgtacgaatgacacagcaaggatgggcctgcagaaagatctttgacgctgcctaactgaatctgcttgcagactggatctactgttgtttggaggaccttagaagggtcctgactgctttcgtaactggacctgcccgttgggcttgttcggttatctgaacgactgaacctgtggtgtaggtaaacgaagcagagcttgatgtacagtacagtcgcttgtgttgaagtggagagaataaaagtgtttgtacatataataacatcctgcagttgttaatcttttgttacacatctgatgccgcccgcgcactcagctcagttgactggaatattgactcaaggatcgtattctgcacaagttggaatctggccatatgtttgttgtttgttgggtgtcgagccatcccttctttcgattaaatatagtcgcacgtatgagtacaaaatttgttgatcctatgtgtatttgcagtacggcctgttttaaggggcatttggc

SEQ ID NO: 49225 - DNA, 2250 bp, Zea Mays
gcgtgtggtcgcgcgtgatgcggaccagttccaggttccagcgagagtgcgcggatgtcggcggcgcggccttggcctagtgcgcaaacaaggaggggggagggccgcgggcaggcggccttgacttgcggcgcgggcaccgccatcgctgtctgaggccgcgcgggctcgctcgctcgctcgcaaactagggtcggtggaccgtgcttgcgcacgttttctcccctcctcctcgcccaccgctgccaccaatcacgccgctgccggctcagccgttggagccgcctcgatccggactcacccgcgttggacctctccgttcccctctactaggaattggagatcggtccagatacctctcacaattttgcctctatctatttgacttttcaaagagagattaatactatacccctactggctaaagggttacagagtattcctatggacatgatatcatcctgtcccatctgcaatatacaagttcttacggttgagctggaatggcatgccaatagccactttgatgacgatcaactccaaagggacatcgaattagcacatcagatagcagttgctgaatcaagtacagataccatgaatgacccaaaacattatagtggatcattcactagtgactctaatactataggggcctcatcgagtcatagtggatactcacaccattacagtgagctattggatgaacaaatctcttgtatggtcagagcacaaattcgaagcaaagttcaagaagtggaaggcggtattatgagcttgttgaggagctgcttggagtcagaagctggttcctcaaaaagtatgatatcaggctatattgaccatcatcagagtctttcatcagaagataagggatggggctgtggatggagaaatattcagatgctgagctctcatctattgaagcaaagacaagaagctagagaagtattatttggtggttctggatttgttcctgacatcccttcactccagaggtggcttgagattgcttgggataaaaaatttgatacgattggctccagccactttcacaacaaagtttatggtgccaagaagtggatagggactacagaatgtgctaccctcttccgctcttttggcctccgtgcaaagattgtagattttgatagcacagaatcatccgacctccaaagtaagaacagtagccatgcagcaagtcaagtacgaggacttatggataagttcttaataaagagtaattcccctaaatcatcgtctgaattttgtcaagaggatgctgaaagtatgagaggccaacacgcccttgttgactgggtttggaactattttgcatgtgagcgctctgatagattaaccacacagcgtgccactgtcagcaataaaacaccactctattttcaacatcaaggtcattcaaggacaattgttgggattcaaaaggaaatggttcaccgtggatctcaagaacaatacacccttttgattttagatcctggtcatagaactgcagatctagaaaggtccctaagaagcaaaaatggatggcagcgtctggtgaagagaggtgtccacacgctcaggaagccacagtatcagaagagatggagcaactgaagactattgatagtatgcttgtcaggttttaggttcctgaaaacaggatgaggattatatgtgttttgcacacagggcactcccctggttgaagaaacaagaacatctaatccattgccgaacggtgcgctgtacgaatgacacagcaaggatgggcctgcagaaagatctttgacgctgcctaactgaatctgcttgcagactggatctactgttgtttggaggaccttagaagggtcctgactgctttcgtaactggacctgcccgttgggcttgttcggttatctgaacgactgaacctgtggtgtaggtaaacgaagcagagcttgatgtacagtacagtcgcttgtgttgaagtggagagaataaaagtgtttgtacatataataacatcctgcagttgttaatcttttgttacacatctgatgccgcccgcgcactcagctcagttgactggaatattgactcaaggatcgtattctgcacaagttggaatctggccatatgtttgttgtttgttgggtgtcgagccatcccttctttcgattaaatatagtcgcacgtatgagtacaaaatttgttgatcctatgtgtatttgcagtacggcctgttttaaggggcatttggc

SEQ ID NO: 49226 - DNA, 2214 bp, Zea Mays
gcgtgtggtcgcgcgtgatgcggaccagttccaggttccagcgagagtgcgcggatgtcggcggcgcggccttggcctagtgcgcaaacaaggaggggggagggccgcgggcaggcggccttgacttgcggcgcgggcaccgccatcgctgtctgaggccgcgcgggctcgctcgctcgctcgcaaactagggtcggtggaccgtgcttgcgcacgttttctcccctcctcctcgcccaccgctgccaccaatcacgccgctgccggctcagccgttggagccgcctcgatccggactcacccgcgttggacctctccgttcccctctactaggaattggagatcggtccagatacctctcacaattttgcctctatctatttgacttttcaaagagagattaatactatacccctactggctaaagggttacagagtattcctatggacatgatatcatcctgtcccatctgcaatatacaagttcttacggttgagctggaatggcatgccaatagccactttgatgacgatcaactccaaagggacatcgaattagcacatcagatagcagttgctgaatcaagtacagataccatgaatgacccaaaacattatagtggatcattcactagtgactctaatactataggggcctcatcgagtcatagtggatactcacaccattacagtgagctattggatgaacaaatctcttgtatggtcagagcacaaattcgaagcaaagttcaagaagtggaaggcggtattatgagcttgttgaggagctgcttggagtcagaagctggttcctcaaaaagtatgatatcaggctatattgaccatcatcagagtctttcatcagaagataagggatggggctgtggatggagaaatattcagatgctgagctctcatctattgaagcaaagacaagaagctagagaagtattatttggtggttctggatttgttcctgacatcccttcactccagaggtggcttgagattgcttgggataaaaaatttgatacgattggctccagccactttcacaacaaagtttatggtgccaagaagtggatagggactacagaatgtgctaccctcttccgctcttttggcctccgtgcaaagattgtagattttgatagcacagaatcatccgacctccaaagtaagaacagtagccatgcagcaagtcaagtacgaggacttatggataagttcttaataaagagtaattcccctaaatcatcgtctgaattttgtcaagaggatgctgaaagtatgagaggccaacacgcccttgttgactgggtttggaactattttgcatgtgagcgctctgatagattaaccacacagcgtgccactgtcagcaataaaacaccactctattttcaacatcaaggtcattcaaggacaattgttgggattcaaaaggaaatggttcaccgtggatctcaagaacaatacacccttttgattttagatcctggtcatagaactgcagatctagaaaggtccctaagaagcaaaaatggatggcagcgtctggtgaagagaggtgtccacacgctcaggaagccacagtatcagaagagatggagcaactgaagactattgatagtatgcttgtcaggttttaggttcctgggcactcccctggttgaagaaacaagaacatctaatccattgccgaacggtgcgctgtacgaatgacacagcaaggatgggcctgcagaaagatctttgacgctgcctaactgaatctgcttgcagactggatctactgttgtttggaggaccttagaagggtcctgactgctttcgtaactggacctgcccgttgggcttgttcggttatctgaacgactgaacctgtggtgtaggtaaacgaagcagagcttgatgtacagtacagtcgcttgtgttgaagtggagagaataaaagtgtttgtacatataataacatcctgcagttgttaatcttttgttacacatctgatgccgcccgcgcactcagctcagttgactggaatattgactcaaggatcgtattctgcacaagttggaatctggccatatgtttgttgtttgttgggtgtcgagccatcccttctttcgattaaatatagtcgcacgtatgagtacaaaatttgttgatcctatgtgtatttgcagtacggcctgttttaaggggcatttggc

SEQ ID NO: 49227 - DNA, 2735 bp, Zea Mays
gcgtgtggtcgcgcgtgatgcggaccagttccaggttccagcgagagtgcgcggatgtcggcggcgcggccttggcctagtgcgcaaacaaggaggggggagggccgcgggcaggcggccttgacttgcggcgcgggcaccgccatcgctgtctgaggccgcgcgggctcgctcgctcgctcgcaaactagggtcggtggaccgtgcttgcgcacgttttctcccctcctcctcgcccaccgctgccaccaatcacgccgctgccggctcagccgttggagccgcctcgatccggactcacccgcgttggacctctccgttcccctctactaggaattggagatcggtccagatacctctcacaattttgcctctatctatttgacttttcaaagagagattaatactatacccctactggctaaagggttacagagtattcctatggacatgatatcatcctgtcccatctgcaatatacaagttcttacggttgagctggaatggcatgccaatagccactttgatgacgatcaactccaaagggacatcgaattagcacatcagatagcagttgctgaatcaagtacagataccatgaatgacccaaaacattatagtggatcattcactagtgactctaatactataggggcctcatcgagtcatagtggatactcacaccattacagtgagctattggatgaacaaatctcttgtatggtcagagcacaaattcgaagcaaagttcaagaagtggaaggcggtattatgagcttgttgaggagctgcttggagtcagaagctggttcctcaaaaagtatgatatcaggctatattgaccatcatcagagtctttcatcagaagataagggatggggctgtggatggagaaatattcagatgctgagctctcatctattgaagcaaagacaagaagctagagaagtattatttggtggttctggatttgttcctgacatcccttcactccagaggtggcttgagattgcttgggataaaaaatttgatacgattggctccagccactttcacaacaaagtttatggtgccaagaagtggatagggactacagaatgtgctaccctcttccgctcttttggcctccgtgcaaagattgtagattttgatagcacagaatcatccgacctccaaagtaagaacagtagccatgcagcaagtcaagtacgaggacttatggataagttcttaataaagagtaattcccctaaatcatcgtctgaattttgtcaagaggatgctgaaagtatgagaggccaacacgcccttgttgactgggtttggaactattttgcatgtgagcgctctgatagattaaccacacagcgtgccactgtcagcaataaaacaccactctattttcaacatcaaggtcattcaaggacaattgttgggattcaaaaggaaatggttcaccgtggatctcaagaacaatacacccttttgattttagatcctggtcatgtaagttacagttaccactcattttattggtctgaactatttcccctttattgtcacttagctgtgatttagtttcacattctatttgaagctcagctcatggtgtaagttggtttgtttcactagtgactctaatactgtttggtattttcgttctttacactttttgctgaacaatcactttgaatatcaccaacataaactgaacatctggtgtctacctcggcatgcatgtatgtttaaccctgtagaaaatcttgaggcccacttgcttctcatgtgaatggactcttgccttgtggtattgattgagaaacagcaacttagatttcaaaagcacctgcccacattcggtgtaacaagtcgttgttttgatgtgttgcggtgtattgtgcattatattttctttgcccgattcctttttaagtatgcatagtctattttgaaacttctagaatagactatgaattgttgtttctccatcagtatgctattcaaatgttttcccgtaatatgccacagagaactgcagatctagaaaggtccctaagaagcaaaaatggatggcagcgtctggtgaagagaggtgtccacacgctcaggaagccacagtatcagttatgttatgtggatcctggaattgctagttcagaagagatggagcaactgaagactattgatagtatgcttgtcaggttttaggttcctgggcactcccctggttgaagaaacaagaacatctaatccattgccgaacggtgcgctgtacgaatgacacagcaaggatgggcctgcagaaaactggatctactgttgtttggaggaccttagaagggtcctgactgctttcgtaactggacctgcccgttgggcttgttcggttatctgaacgactgaacctgtggtgtaggtaaacgaagcagagcttgatgtacagtacagtcgcttgtgttgaagtggagagaataaaagtgtttgtacatataataacatcctgcagttgttaatcttttgttacacatctgatgccgcccgcgcactcagctcagttgactggaatattgactcaaggatcgtattctgcacaagttggaatctggccatatgtttgttgtttgttgggtgtcgagccatcccttctttcgattaaatatagtcgcacgtatgagtacaaaatttgttgatcctatgtgtatttgcagtacggcctgttttaaggggcatttggc

SEQ ID NO: 49228 - DNA, 2045 bp, Zea Mays
gtatgcgtctctttttcttagtcaatcgacctatctatccgcgcgctacagagtcttctgcttttccaacttcatgcctgctgcttgcgatggacgaaaacgtaatcgttgttcatcatttaacggattttgctatgctacttcatcatgcttcaaacggagacctactaggagatcggtccagatacctctcacaattttgcctctatctatttgacttttcaaagagagattaatactatacccctactggctaaagggttacagagtattcctatggacatgatatcatcctgtcccatctgcaatatacaagttcttacggttgagctggaatggcatgccaatagccactttgatgacgatcaactccaaagggacatcgaattagcacatcagatagcagttgctgaatcaagtacagataccatgaatgacccaaaacattatagtggatcattcactagtgactctaatactataggggcctcatcgagtcatagtggatactcacaccattacagtgagctattggatgaacaaatctcttgtatggtcagagcacaaattcgaagcaaagttcaagaagtggaaggcggtattatgagcttgttgaggagctgcttggagtcagaagctggttcctcaaaaagtatgatatcaggctatattgaccatcatcagagtctttcatcagaagataagggatggggctgtggatggagaaatattcagatgctgagctctcatctattgaagcaaagacaagaagctagagaagtattatttggtggttctggatttgttcctgacatcccttcactccagaggtggcttgagattgcttgggataaaaaatttgatacgattggctccagccactttcacaacaaagtttatggtgccaagaagtggatagggactacagaatgtgctaccctcttccgctcttttggcctccgtgcaaagattgtagattttgatagcacagaatcatccgacctccaaagtaagaacagtagccatgcagcaagtcaagtacgaggacttatggataagttcttaataaagagtaattcccctaaatcatcgtctgaattttgtcaagaggatgctgaaagtatgagaggccaacacgcccttgttgactgggtttggaactattttgcatgtgagcgctctgatagattaaccacacagcgtgccactgtcagcaataaaacaccactctattttcaacatcaaggtcattcaaggacaattgttgggattcaaaaggaaatggttcaccgtggatctcaagaacaatacacccttttgattttagatcctggtcatagaactgcagatctagaaaggtccctaagaagcaaaaatggatggcagcgtctggtgaagagaggtgtccacacgctcaggaagccacagtatcagttatgttatgtggatcctggaattgctagttcagaagagatggagcaactgaagactattgatagtatgcttgtcaggttttaggttcctgggcactcccctggttgaagaaacaagaacatctaatccattgccgaacggtgcgctgtacgaatgacacagcaaggatgggcctgcagaaaactggatctactgttgtttggaggaccttagaagggtcctgactgctttcgtaactggacctgcccgttgggcttgttcggttatctgaacgactgaacctgtggtgtaggtaaacgaagcagagcttgatgtacagtacagtcgcttgtgttgaagtggagagaataaaagtgtttgtacatataataacatcctgcagttgttaatcttttgttacacatctgatgccgcccgcgcactcagctcagttgactggaatattgactcaaggatcgtattctgcacaagttggaatctggccatatgtttgttgtttgttgggtgtcgagccatcccttctttcgattaaatatagtcgcacgtatgagtacaaaatttgttgatcctatgtgtatttgcagtacggcctgttttaaggggcatttggc

SEQ ID NO: 49229 - DNA, 2016 bp, Zea Mays
gtatgcgtctctttttcttagtcaatcgacctatctatccgcgcgctacagagtcttctgcttttccaacttcatgcctgctgcttgcgatggacgaaaacgtaatcgttgttcatcatttaacggattttgctatgctacttcatcatgcttcaaacggagacctactaggagatcggtccagatacctctcacaattttgcctctatctatttgacttttcaaagagagattaatactatacccctactggctaaagggttacagagtattcctatggacatgatatcatcctgtcccatctgcaatatacaagttcttacggttgagctggaatggcatgccaatagccactttgatgacgatcaactccaaagggacatcgaattagcacatcagatagcagttgctgaatcaagtacagataccatgaatgacccaaaacattatagtggatcattcactagtgactctaatactataggggcctcatcgagtcatagtggatactcacaccattacagtgagctattggatgaacaaatctcttgtatggtcagagcacaaattcgaagcaaagttcaagaagtggaaggcggtattatgagcttgttgaggagctgcttggagtcagaagctggttcctcaaaaagtatgatatcaggctatattgaccatcatcagagtctttcatcagaagataagggatggggctgtggatggagaaatattcagatgctgagctctcatctattgaagcaaagacaagaagctagagaagtattatttggtggttctggatttgttcctgacatcccttcactccagaggtggcttgagattgcttgggataaaaaatttgatacgattggctccagccactttcacaacaaagtttatggtgccaagaagtggatagggactacagaatgtgctaccctcttccgctcttttggcctccgtgcaaagattgtagattttgatagcacagaatcatccgacctccaaagtaagaacagtagccatgcagcaagtcaagtacgaggacttatggataagttcttaataaagagtaattcccctaaatcatcgtctgaattttgtcaagaggatgctgaaagtatgagaggccaacacgcccttgttgactgggtttggaactattttgcatgtgagcgctctgatagattaaccacacagcgtgccactgtcagcaataaaacaccactctattttcaacatcaaggtcattcaaggacaattgttgggattcaaaaggaaatggttcaccgtggatctcaagaacaatacacccttttgattttagatcctggtcatagaactgcagatctagaaaggtccctaagaagcaaaaatggatggcagcgtctggtgaagagaggtgtccacacgctcaggaagccacagtatcagttcagaagagatggagcaactgaagactattgatagtatgcttgtcaggttttaggttcctgggcactcccctggttgaagaaacaagaacatctaatccattgccgaacggtgcgctgtacgaatgacacagcaaggatgggcctgcagaaaactggatctactgttgtttggaggaccttagaagggtcctgactgctttcgtaactggacctgcccgttgggcttgttcggttatctgaacgactgaacctgtggtgtaggtaaacgaagcagagcttgatgtacagtacagtcgcttgtgttgaagtggagagaataaaagtgtttgtacatataataacatcctgcagttgttaatcttttgttacacatctgatgccgcccgcgcactcagctcagttgactggaatattgactcaaggatcgtattctgcacaagttggaatctggccatatgtttgttgtttgttgggtgtcgagccatcccttctttcgattaaatatagtcgcacgtatgagtacaaaatttgttgatcctatgtgtatttgcagtacggcctgttttaaggggcatttggc

SEQ ID NO: 49230 - DNA, 2081 bp, Zea Mays
gtatgcgtctctttttcttagtcaatcgacctatctatccgcgcgctacagagtcttctgcttttccaacttcatgcctgctgcttgcgatggacgaaaacgtaatcgttgttcatcatttaacggattttgctatgctacttcatcatgcttcaaacggagacctactaggagatcggtccagatacctctcacaattttgcctctatctatttgacttttcaaagagagattaatactatacccctactggctaaagggttacagagtattcctatggacatgatatcatcctgtcccatctgcaatatacaagttcttacggttgagctggaatggcatgccaatagccactttgatgacgatcaactccaaagggacatcgaattagcacatcagatagcagttgctgaatcaagtacagataccatgaatgacccaaaacattatagtggatcattcactagtgactctaatactataggggcctcatcgagtcatagtggatactcacaccattacagtgagctattggatgaacaaatctcttgtatggtcagagcacaaattcgaagcaaagttcaagaagtggaaggcggtattatgagcttgttgaggagctgcttggagtcagaagctggttcctcaaaaagtatgatatcaggctatattgaccatcatcagagtctttcatcagaagataagggatggggctgtggatggagaaatattcagatgctgagctctcatctattgaagcaaagacaagaagctagagaagtattatttggtggttctggatttgttcctgacatcccttcactccagaggtggcttgagattgcttgggataaaaaatttgatacgattggctccagccactttcacaacaaagtttatggtgccaagaagtggatagggactacagaatgtgctaccctcttccgctcttttggcctccgtgcaaagattgtagattttgatagcacagaatcatccgacctccaaagtaagaacagtagccatgcagcaagtcaagtacgaggacttatggataagttcttaataaagagtaattcccctaaatcatcgtctgaattttgtcaagaggatgctgaaagtatgagaggccaacacgcccttgttgactgggtttggaactattttgcatgtgagcgctctgatagattaaccacacagcgtgccactgtcagcaataaaacaccactctattttcaacatcaaggtcattcaaggacaattgttgggattcaaaaggaaatggttcaccgtggatctcaagaacaatacacccttttgattttagatcctggtcatagaactgcagatctagaaaggtccctaagaagcaaaaatggatggcagcgtctggtgaagagaggtgtccacacgctcaggaagccacagtatcagttatgttatgtggatcctggaattgctagttcagaagagatggagcaactgaagactattgatagtatgcttgtcaggttttaggttcctgaaaacaggatgaggattatatgtgttttgcacacagggcactcccctggttgaagaaacaagaacatctaatccattgccgaacggtgcgctgtacgaatgacacagcaaggatgggcctgcagaaaactggatctactgttgtttggaggaccttagaagggtcctgactgctttcgtaactggacctgcccgttgggcttgttcggttatctgaacgactgaacctgtggtgtaggtaaacgaagcagagcttgatgtacagtacagtcgcttgtgttgaagtggagagaataaaagtgtttgtacatataataacatcctgcagttgttaatcttttgttacacatctgatgccgcccgcgcactcagctcagttgactggaatattgactcaaggatcgtattctgcacaagttggaatctggccatatgtttgttgtttgttgggtgtcgagccatcccttctttcgattaaatatagtcgcacgtatgagtacaaaatttgttgatcctatgtgtatttgcagtacggcctgttttaaggggcatttggc

SEQ ID NO: 49231 - DNA, 3961 bp, Zea Mays
aaaaccgaaatccaaattccaattcaatccctccgtcgctcgctccaatcatccccaccgcttcaccgcccgcgccacccaatgtcaggcgacggcgacgcgcgcggcctcgaggcagcggcggccaccgcggcagaggcggcgcgggagctgcgcgaggcggccgcggccctcgtcgccacccgcgccgctgaggaggacgcgctgcgccgccgcgccgtggcgctcgaagccgacgtccgccgcctccaggcctcgctccacgccctcgatccctccacgctcgacaaggtcgaggaggaattggagcgtgccagggtggcaatcacggatagtgatgtggcttcgtttcttcccagcaagcggaatggcaagtttcttaagacatttctaggccctgtgaatgtgcgggtggcgaggaaggaagataaactcaaaatcaaggatgagtacaacaattatagggataggacagcctataagtttctgttatttccatctatcctcctcctactgagatggtggatatgggatggatgccttccagcattggctgttcaaatttaccaggcttggttactatacctgtacacaagctttgctttgcgtgagaatgtattaattgcgaatggaagtgacattcgtccatggtggatatatcatcactatctagcaatgctgatggctcttattagccttacatgggagataaagggacagcctgattgttctagcaagcagaggggggtgcaacttttcttgcgctgggcaatcatgcaaggcattgcaatgcatctacagaatagataccagcggcaaagattgcgtactcgaatagctctaggaaaggtaaggccttgtttgaatttaagcattggaaacttttaatatcaatacatagattaagtgtatatcatgtaagtaatccaaacacgatcctaactgaaattacaaaaaggtcattgcatatgatgaaacatttttcgaaccaaggaaagttttccgtttccattagcgtcatagtggaaatttggatatgacaaaattggatgcatggggattttttctctctcgaaagcgcaggagaactgcacgattatatatttaagaagaaagagataaggtccaaaaggaccagtacatcactaggtgcttacaaagaacaactcaagttaatcaatgtttctctgatttagtacattaaaaaagaaacaggcagtgaattatcttaaaagaagtcttgtgggcagagctaattggtagaatgtgaacctgtgaagagtattgtgtcatatcattatctaatacctttttaaggttaacttaacttctctcccaattaacaaggctaaaagaatggatgtcgttgctggcgaaacagctggtgtggaggggcagctcttgctgctatatcctgtccttttcatattacagggtttcgaagcatatgttggagttttgcttcttcagacggctttgcatgggcttgcttccgaatggcaggtcttagtctgcgggatcttgctggtggttatggcagtcggcaactttgtccacactatggagacactggtactgaaactgaggtttaaagcaaagatgaagaaagcgaagagcagacaggatcgcccgcatcaaaattgacaggcatcatcgtccttggaaaacaaggatgctgacaccgcctcttttgtaaatcctttgacccacattaacattttttgcctgcttgtcattctctctctcttttttttttggtaattggccctgtaacattgaagttgatattccacacaacacggtggatgaaaccatatttgttcgctcttggatgagaactgagtttggcatgtactatatatttttctgtatgaaacctctgggttctgaaataagatgatgtgtatctgaagctgtgaattgacagaggggctctatacaaataatggagcagaggcttttgtaaggtcagatgttgtcatgtagtgtacttgttatacagagatcggtatgaatggttagcagatctttcttttcaacaatcataatatgaggtgtctggtcctccaaaagctttcggccacaacctgaatgacaagcactcccctgcctctgcctgctacacaggatcactcaatcattgaggggcgatagtgtcttgatggtttgaggtcatggtacaatgcaaaggatagtgtctcgggactaatccatttttcttacaatcctaaattttgtacccctaactaataaacatcaaggacaatgcaaggaatcatgtgagctccagcagcttgctgagctggatatggtggccgtaacccgccttggcgatggacctcgccgctttctccgcgatggcggcgcgcacctgcgccatcgacggccggagcccgggctgcgcggccaggcactccacggcgagctcggccacgctggcggcctcctcctcgtcgagcccgccgtccccgagcctgccgtcgacgagccccgccaccccgcgctccctgacccgcggcaggatccgcgccgtcaggttctgggcctcggacgccggcggcaggccggtgacggcctcgagcagcagtacgccgaagccgtacacgtcggacttggtggacacgatgcccgtgcggaggaagaaggggtcggcgtagcccggcgatcccacggcggcgcgcgccggcgccacggccgccgagaagccctcgcaggcggagcccaggtcgcagagccgcgcgccgccgtcgaagaggagcacgttggacgccgacacgtcgccgtgcaccacggcggtggaggtgccgccgccgccgccgcagtgcaggtgctccaacgcgcacgccacgtcgtggagggcgcgcatgcgctgcgcccacggcagcggggcggccgccgtgccgtggagcgcgtccgccagcgtgccgccggcgaggtactccagcaccagcgcgccttcttcctctgcatgcatgcagtaacaatcattagtttaccactctactcgactcgacatgggtaaattcacttgggatgggaatgggacagcgaggcgacgaccaagctgaagtgcagcgcaggtttgacgagaggaggtgggggagtcgccgtacaaaaaataaatgaataaatagcggttgctctcaactctcgttaggtagggagtaaagtgatgtcacgcgcgcggcaatttggaaatgcattttttttccagatcactactataaagcctgctcgatcaggtcgtctacccattcgtttccctttctttttgggtagtatattatttcttttgttttttcgttaaaaaaaacatgagcttgactgacttcgtgtgctaataagcaaagtgtaaacagaatagtatataaaaaaaagaaaaaaacatatatttaatttgcaccgtggtcgtcggagtaggcgaggagcgcgacgatgttggggtgtcggaggcggcggagcaggtccagctcctgccggaaggcgcgcagccggcgctcgccgccgcaccagcggtgcaccttgacggcgacgggcgagccgtcaaggagcctggcgaggtagactgcgctggagccgccgcggcccaccacggcggactcgtcgaacccgcctgtcagcgcctccacctcccgccacgccagccgccgcggcgcctcctcctcctccttcttgacggctattgacgctgctcgctgctgctgctggttggccgctggcggtggctgacgatggcgtggcgctgctgctcgcgcctcggcgccggaggccaggaagtggcggatgaggaggaaggcgatggcgccggaggccagcaggaggacgcagcagaagagcaaggagagcgccacggccacgtccatggcgcgcgccccccggccggcctctcgctctcgctctcgctgctgtcagaagccagcagccgcccacaacgtaacacggaaccggaaggaaaagtggt

SEQ ID NO: 49232 - DNA, 3506 bp, Zea Mays
aaaaccgaaatccaaattccaattcaatccctccgtcgctcgctccaatcatccccaccgcttcaccgcccgcgccacccaatgtcaggcgacggcgacgcgcgcggcctcgaggcagcggcggccaccgcggcagaggcggcgcgggagctgcgcgaggcggccgcggccctcgtcgccacccgcgccgctgaggaggacgcgctgcgccgccgcgccgtggcgctcgaagccgacgtccgccgcctccaggcctcgctccacgccctcgatccctccacgctcgacaaggtcgaggaggaattggagcgtgccagggtggcaatcacggatagtgatgtggcttcgtttcttcccagcaagcggaatggcaagtttcttaagacatttctaggccctgtgaatgtgcgggtggcgaggaaggaagataaactcaaaatcaaggatgagtacaacaattatagggataggacagcctataagtttctgttatttccatctatcctcctcctactgagatggtggatatatcatcactatctagcaatgctgatggctcttattagccttacatgggagataaagggacagcctgattgttctagcaagcaggtacttgttcttttttatgggaagaagcactaatgctggcatcgtttggtaaatcttctaatgttgcactcaaacaataatatttttgcagaggggggtgcaacttttcttgcgctgggcaatcatgcaaggcattgcaatgcatctacagaatagataccagcggcaaagattgcgtactcgaatagctctaggaaaggctaaaagaatggatgtcgttgctggcgaaacagctggtgtggaggggcagctcttgctgctatatcctgtccttttcatattacaggtatgttgcgtgtgcaattcgaatcatggcagatccgggtgttttgtcgaactgagttgccactcgaaccctccagaataaggtttcgaagcatatgttggagttttgcttcttcagacggctttgcatgggcttgcttccgaatggcaggtcttagtctgcgggatcttgctggtggttatggcagtcggcaactttgtccacactatggagacactggtactgaaactgaggtttaaagcaaagatgaagaaagcgaagagcagacaggatcgcccgcatcaaaattgacaggcatcatcgtccttggaaaacaaggatgctgacaccgcctcttttgtaaatcctttgacccacattaacattttttgcctgcttgtcattctctctctcttttttttttggtaattggccctgtaacattgaagttgatattccacacaacacggtggatgaaaccatatttgttcgctcttggatgagaactgagtttggcatgtactatatatttttctgtatgaaacctctgggttctgaaataagatgatgtgtatctgaagctgtgaattgacagaggggctctatacaaataatggagcagaggcttttgtaaggtcagatgttgtcatgtagtgtacttgttatacagagatcggtatgaatggttagcagatctttcttttcaacaatcataatatgaggtgtctggtcctccaaaagctttcggccacaacctgaatgacaagcactcccctgcctctgcctgctacacaggatcactcaatcattgaggggcgatagtgtcttgatggtttgaggtcatggtacaatgcaaaggatagtgtctcgggactaatccatttttcttacaatcctaaattttgtacccctaactaataaacatcaaggacaatgcaaggaatcatgtgagctccagcagcttgctgagctggatatggtggccgtaacccgccttggcgatggacctcgccgctttctccgcgatggcggcgcgcacctgcgccatcgacggccggagcccgggctgcgcggccaggcactccacggcgagctcggccacgctggcggcctcctcctcgtcgagcccgccgtccccgagcctgccgtcgacgagccccgccaccccgcgctccctgacccgcggcaggatccgcgccgtcaggttctgggcctcggacgccggcggcaggccggtgacggcctcgagcagcagtacgccgaagccgtacacgtcggacttggtggacacgatgcccgtgcggaggaagaaggggtcggcgtagcccggcgatcccacggcggcgcgcgccggcgccacggccgccgagaagccctcgcaggcggagcccaggtcgcagagccgcgcgccgccgtcgaagaggagcacgttggacgccgacacgtcgccgtgcaccacggcggtggaggtgccgccgccgccgccgcagtgcaggtgctccaacgcgcacgccacgtcgtggagggcgcgcatgcgctgcgcccacggcagcggggcggccgccgtgccgtggagcgcgtccgccagcgtgccgccggcgaggtactccagcaccagcgcgccttcttcctctgcatgcatgcagtaacaatcattagtttaccactctactcgactcgacatgggtaaattcacttgggatgggaatgggacagcgaggcgacgaccaagctgaagtgcagcgcaggtttgacgagaggaggtgggggagtcgccgtacaaaaaataaatgaataaatagcggttgctctcaactctcgttaggtagggagtaaagtgatgtcacgcgcgcggcaatttggaaatgcattttttttccagatcactactataaagcctgctcgatcaggtcgtctacccattcgtttccctttctttttgggtagtatattatttcttttgttttttcgttaaaaaaaacatgagcttgactgacttcgtgtgctaataagcaaagtgtaaacagaatagtatataaaaaaaagaaaaaaacatatatttaatttgcaccgtggtcgtcggagtaggcgaggagcgcgacgatgttggggtgtcggaggcggcggagcaggtccagctcctgccggaaggcgcgcagccggcgctcgccgccgcaccagcggtgcaccttgacggcgacgggcgagccgtcaaggagcctggcgaggtagactgcgctggagccgccgcggcccaccacggcggactcgtcgaacccgcctgtcagcgcctccacctcccgccacgccagccgccgcggcgcctcctcctcctccttcttgacggctattgacgctgctcgctgctgctgctggttggccgctggcggtggctgacgatggcgtggcgctgctgctcgcgcctcggcgccggaggccaggaagtggcggatgaggaggaaggcgatggcgccggaggccagcaggaggacgcagcagaagagcaaggagagcgccacggccacgtccatggcgcgcgccccccggccggcctctcgctctcgctctcgctgctgtcagaagccagcagccgcccacaacgtaacacggaaccggaaggaaaagtggt

SEQ ID NO: 49233 - DNA, 899 bp, Zea Mays
ctttatcctatccaccgctgttctccttcattctcatttcttgcacgccgacaccagcccctccattttctattggccgccccttgctccctcccatggggctccccctcgatccctctccatggcatggatcagccccagcttcccatggatgtcgccctcctctccctgatggctggcatctccactccctgcagcaaggacgctttcctctgctccctgctcttcctcccatggccaacccatgttgtggtgctcgccctggctccagccccttccacagtcggcaccctccccatctgctgcagattggagaagaggaaccccaggttttgcgtagagaggaaatccatgtggcgtgtgctaggtgtttgatagaatggatgaatcagagatccttgttgctcttgcgaattccgagtctatttagtgttggacgccaatcactcaacacgaaccagcggcggtgctctctgcacaggggcagatggtccgcggctaggggtcggacggtctgcgacctggcgcgaggctagggtttcctgcctgacggccagatggtccacgccctcgggccggatggtccgcgcgtggcgcaggggcggcggaagatcaccggcggcgcctggatctcactcccaggagggaccccatcggggaggagagatcctaggtgacgtctaggctcggacagaccgacctagactcctctaatcgacgtagagtcgaagagaagcggagaatttggggattgagaggctaaactagaattagactagaattactcctaattgtacaggaaataaatacgagataaaagtgttattgattcgattgataattacaaatcggtcgtatacctctgtatttatagaggagtgggctggaccctttacaaa

SEQ ID NO: 49234 - DNA, 1500 bp, Zea Mays
ctttatcctatccaccgctgttctccttcattctcatttcttgcacgccgacaccagcccctccattttctattggccgccccttgctccctcccatggggctccccctcgatccctctccatggcatggatcagccccagcttcccatggatgtcgccctcctctccctgatggctggcatctccactccctgcagcaaggacgctttcctctgctccctgctcttcctcccatggccaacccatgttgtggtgctcgccctggctccagccccttccacagtcggcaccctccccatctgctgcagattggagaagaggaaccccaggttttgcgtagagaggaaatccatgtggcgtgtgctaggtgtttgatagaatggatgaatcagagatccttgttgctcttgcgaattccgagtctatttagtgttggtaagttaattcattattaatgttgattgaattattagatgaatggaatagatatgttttatgaatatatatatatatgaatcatgagtcagtggtaatacctcttcgtggatagtgacatgattgtattcatgattatggttaaaataagtgatgacggtattgtagttcgaacctgcacttacagttttgattgtgcaactaattgagtgaagtaaatcatgttttttatggatgtgttatatataaaagttgtagctaacttctatatcttgcttctgtaaaaatttcttgaccataggtttagtagtttaggatttatgatttttccaaatcaagtctcaaaatctgtccaaattatgtacaaatttcgaagatgacattgtttgcccaagttaaactgagaatcaacccttaataaatatataagaattgttgtactttccttaagctttcctaaatgtcttggatcaccctttttggtggattagaggccaagttatagctgtttgaaacttggagtctgaatctgtccaaatctggacagagaagactgtttgtgttaactgaccttgctacgtatttgttgacacctttttaggacgccaatcactcaacacgaaccagcggcggtgctctctgcacaggggcagatggtccgcggctaggggtcggacggtctgcgacctggcgcgaggctagggtttcctgcctgacggccagatggtccacgccctcgggccggatggtccgcgcgtggcgcaggggcggcggaagatcaccggcggcgcctggatctcactcccaggagggaccccatcggggaggagagatcctaggtgacgtctaggctcggacagaccgacctagactcctctaatcgacgtagagtcgaagagaagcggagaatttggggattgagaggctaaactagaattagactagaattactcctaattgtacaggaaataaatacgagataaaagtgttattgattcgattgataattacaaatcggtcgtatacctctgtatttatagaggagtgggctggaccctttacaaa

SEQ ID NO: 49235 - DNA, 2534 bp, Zea Mays
gcaaaatcctccgacctcgctcgcgccaccgaaaaccaaacgaggaaaaatgccgtccccgtccctcctcctccgcgctcctcctctctgcccctccccgtcccaccccccgcgccgcttcgctcccccctccctcatcacctcgtctccgcctgcccgcctcctccctctgcgcctgccctccgccgcgtcccgccacacgcctcgcgccggtgacacgcgcgtgcccgacgacctcatcccgatcgcgcgctgctacgagggccgccttgctcgactcgagctcgccggcgccgcgcgccgggaacaggccgtcgcggcagcggccgcggccggcggaggggcttcggcggaggaccacctcgccgccggctccgacgccatggtcgtcgaggcattcctccccgggccccatggcggtgggacgaccgcttcctccacgcgagtgattttgcaagccaaggaagttaaagataaggccagtaagatagagaaacagttcggatctgattttttctttgcaaatcaacctgattcagagagtatgttggctatggcctttaagcaagttgtaattcagcggctctcaaactttcggctcgaggtcttccccccaggttcagagagagacttccaagattttggcaaaccccgaaaggggtctttggattgtagtatcagctcatcagatggaaaacttctgtcttctcttgctgaggccattttctcctgtgtcattgaggatgtcagaaaaaatcattttgggagcataggcagtttttttcagaagcgacagctcaactgctcaatggattcctcagtttgtatacacaaaacttctgaggcagaagtagtgaaaaatgctaagaggtgtctggagatcgttagtttaatgaagtcttctcatgaagtacgtgaaacaaagaatggatggtggccacctccacatcatgaaagtttggtgaagattgggggtcctgagttagtgctttgggccaatgagtacattcctacttataagctgcaaattaatgccaacgcattggagaattctaatcttgaagttgaaggtctttatgagttagaaagtaataggcgggaagttctcttaacccactcacaactggtggaactagggaacgttctagacatgtactttgaagatcaattcacattaccaggcaaaacattccatccttattggaatccagatctgtcaaagattaaaaagaacaatttatgctggcctcaatcctttagagacaaaaggctattcaaggaaagttcaaatgcctcattatctcagaactattgttccgatatcaagtctctttataacagtgaggtacaagcttattgcatgtcacttgttaagaaaatgaaagactcgtatggctgccctggtgatgtaatggttgattctcacattggagcatgggttggagaactacctaactgcttcaaggcaatcagtagtgaggatgctgctgcttctggctcttttcagtatcctgacactcttagccaagaaaatcaatcccagccagtgccagttaatactaagatgtctcatttggaacaaaatgatagaacccaggaatttcctctgcagaatattgctagttttcaggtggtcatgtcagaagaaggtaaagtagtgggatttcagccaactaacctcccagctgtgaaccattgggcaacaaacccactagcaacacttctgtatcaaggacggtcactttctccaggcattatagaacccaggctcaaaatttctcgtccagctaaggctgccccgatcgaattattgatgtcagtaaatcaagattccttttttgctttggcaaggcctgttgaagacccaaggtagcagagcgagcttcctcagattgattctactgcaagattgtgaacagttccaaagatgtgaaacgaaacaaatagtggcagctgagcctgaacaggatttaacaaggtgcctgagttatgagaaagaaatcgactaatgggccccatcattttaaggcacccggagactatgacccataagccctccagctctctatggttgaacacttgaactataaagtcttatattcagaagtatctaccgagtaggatcaaacaccattcgagtactttcttgggagaaaccatgaccactcttcaaatcttcaagtcttctatatttgtcaccatactatgaagagtctgttgtgcaattctgatgtttttttcgaagaactttgaacgcatcgtgatgatatctatcccgtggcacctaagcctaaaattggcttacaccaagccaattatagggtctcctaagttaattatagggtcttgaacatccttcaaattggctaccctgtgtcagctacagggtcttacatccttagtgatattgatgagtaatgatcgcttgttattttttttttttttggtaaaaataacccttggcaatttcatacgttggtctttcaatgttgaataacagttcccgagcttagttggaatttgccgtgcaggct

SEQ ID NO: 49236 - DNA, 3359 bp, Zea Mays
gcaaaatcctccgacctcgctcgcgccaccgaaaaccaaacgaggaaaaatgccgtccccgtccctcctcctccgcgctcctcctctctgcccctccccgtcccaccccccgcgccgcttcgctcccccctccctcatcacctcgtctccgcctgcccgcctcctccctctgcgcctgccctccgccgcgtcccgccacacgcctcgcgccggtgacacgcgcgtgcccgacgacctcatcccgatcgcgcgctgctacgagggccgccttgctcgactcgagctcgccggcgccgcgcgccgggaacaggccgtcgcggcagcggccgcggccggcggaggggcttcggcggaggaccacctcgccgccggctccgacgccatggtcgtcgaggcattcctccccgggccccatggcggtgggacgaccgcttcctccacgcgagtgattttgcaagccaaggaagttaaagataaggccagtaagatagagaaacagttcggatctgattttttctttgcaaatcaacctgattcagagagtatgttggctatggcctttaagcaagttgtaattcagcggctctcaaactttcggctcgaggtcttccccccaggttcagagagagacttccaagattttggcaaaccccgaaaggggtctttggattgtagtatcagctcatcagatggaaaacttctgtcttctcttgctgaggccattttctcctgtgtcattgaggatgtcagaaaaaatcattttgggagcataggcagtttttttcagaagcgacagctcaactgctcaatggattcctcagtttgtatacacaaaacttctgaggcagaagtagtgaaaaatgctaagaggtgtctggagatcgttagtttaatgaagtcttctcatgaagtacgtgaaacaaagaatggatggtggccacctccacatcatgaaagtttggtgaagattgggggtcctgagttagtgctttgggccaatgagtacattcctacttataagctgcaaattaatgccaacgcattggagaattctaatcttgaagttgaaggtctttatgagttagaaagtaataggcgggaagttctcttaacccactcacaactggtggaactagggaacgttctagacatgtactttgaagatcaattcacattaccaggcaaaacattccatccttattggaatccagatctgtcaaagattaaaaagaacaatggttacttgaacaaccttttcacttttttggctgggacctgtatttttctttttgtcaccatctttgctcagttatgctggcctcaatcctttagagacaaaaggctattcaaggaaagttcaaatgcctcattatctcagaactattgttccgatatcaagtctctttataacagtgaggtacaagcttattgcatgtcacttgttaagaaaatgaaagactcgtatggctgccctggtgatgtaatggttgattctcacattggagcatgggttggagaactacctaactgcttcaaggcaatcagtagtgaggatgctgctgcttctggctcttttcagtatcctgacactcttagccaagaaaatcaatcccagccagtgccagttaatactaagatgtctcatttggaacaaaatgatagaacccaggaatttcctctgcagaatattgctagttttcaggtggtcatgtcagaagaaggtaaagtagtgggatttcagccaactaacctcccagctgtgaaccattgggcaacaaacccactagcaacacttctgtatcaaggacggtcactttctccaggcattatagaacccaggctcaaaatttctcgtccagctaaggctgccccgatcgaattattgatgtcagtaaatcaagattccttttttgctttggcaaggcctgttgaagacccaagcgagcttcctcagattgattctactgcaagattgtgaacagttccaaagatgtgaaacgaaacaaatagtggcagctgagcctgaacaggatttaacaaggtgcctgagttatgagaaagaaatcgactaatgggccccatcattttaagtaagatgccggaggagtggtggtggctgacgtgaagaagaaattccactagtatcccgtcggagtgcaggaggagcgatcggaggggcacaacaaacgtgggaaattggtgggctttggcataggccaaactctgtgaatgaaaagataatgatctatatattggcaacgactactatgcaagccgttcttttgtgcaagcgtgcaagcaaactatctgatccattaaatcgtgatataaccgtaggtcacatttaacacttaaacccttccactccagctcaatactctttataaaaaaaaccctaacaaatcatggttgtatctgtggttggattgtaatctaatggattagatggtttgtttgcacgcttgcacagaatgactgcttcataacagtcgttgccatatatattaggttctgtttgtaagcacccaatttttaaaagctgatttatagaaattgaggtggttccaaacataccggtttatgactcagtttataaaattagattttcagtttattaaaaatcaagaagctggtctctcctatctaaaaaataaaatttgttttcttaaaaactgagttgtttccaaaacagggccttagtttaagcagaatagtgtaataccttgtgtctaggtagacatgttgccttacactgaattatgatgtgttttctgtttgggtcggttactatagaagtcctagtaaaattgtatatgtggaatcttaattgaactaagttttctttcttgtagggcacccggagactatgacccataagccctccagctctctatggttgaacacttgaactataaagtcttatattcagaagtatctaccgagtaggatcaaacaccattcgagtactttcttgggagaaaccatgaccactcttcaaatcttcaagtcttctatatttgtcaccatactatgaagagtctgttgtgcaattctgatgtttttttcgaagaactttgaacgcatcgtgatgatatctatcccgtggcacctaagcctaaaattggcttacaccaagccaattatagggtctcctaagttaattatagggtcttgaacatccttcaaattggctaccctgtgtcagctacagggtcttacatccttagtgatattgatgagtaatgatcgcttgttattttttttttttttggtaaaaataacccttggcaatttcatacgttggtctttcaatgttgaataacagttcccgagcttagttggaatttgccgtgcaggct

SEQ ID NO: 49237 - DNA, 3186 bp, Zea Mays
gcaaaatcctccgacctcgctcgcgccaccgaaaaccaaacgaggaaaaatgccgtccccgtccctcctcctccgcgctcctcctctctgcccctccccgtcccaccccccgcgccgcttcgctcccccctccctcatcacctcgtctccgcctgcccgcctcctccctctgcgcctgccctccgccgcgtcccgccacacgcctcgcgccggtgacacgcgcgtgcccgacgacctcatcccgatcgcgcgctgctacgagggccgccttgctcgactcgagctcgccggcgccgcgcgccgggaacaggccgtcgcggcagcggccgcggccggcggaggggcttcggcggaggaccacctcgccgccggctccgacgccatggtcgtcgaggcattcctccccgggccccatggcggtgggacgaccgcttcctccacgcgagtgattttgcaagccaaggaagttaaagataaggccagtaagatagagaaacagttcggatctgattttttctttgcaaatcaacctgattcagagagtatgttggctatggcctttaagcaagttgtaattcagcggctctcaaactttcggctcgaggtcttccccccaggttcagagagagacttccaagattttggcaaaccccgaaaggggtctttggattgtagtatcagctcatcagatggaaaacttctgtcttctcttgctgaggccattttctcctgtgtcattgaggatgtcagaaaaaatcattttgggagcataggcagtttttttcagaagcgacagctcaactgctcaatggattcctcagtttgtatacacaaaacttctgaggcagaagtagtgaaaaatgctaagaggtgtctggagatcgttagtttaatgaagtcttctcatgaagtacgtgaaacaaagaatggatggtggccacctccacatcatgaaagtttggtgaagattgggggtcctgagttagtgctttgggccaatgagtacattcctacttataagctgcaaattaatgccaacgcattggagaattctaatcttgaagttgaaggtctttatgagttagaaagtaataggcgggaagttctcttaacccactcacaactggtggaactagggaacgttctagacatgtactttgaagatcaattcacattaccaggcaaaacattccatccttattggaatccagatctgtcaaagattaaaaagaacaatggttacttgaacaaccttttcacttttttggctgggacctgtatttttctttttgtcaccatctttgctcagttatgctggcctcaatcctttagagacaaaaggctattcaaggaaagttcaaatgcctcattatctcagaactattgttccgatatcaagtctctttataacagtgaggtacttagttatctagttatgggggaatttgttgtttgcccaaggtagattgatgataattttagtgttggagtgcttcttgtgatatgctataaacatttcacataacattgacactgcaacgatatttcgactaatacctgaaggaaagttcctcatgccattttacatagtttaatttttttctcaattgcttattcatacttctcgcaatgaccaaacaaacacctactgcacctaacttctgtcagaagttggaactcgggaatattctgtcgggctgcatctcatttgtttctgccccccttgaaaattagtactatcaggatgtgacacttcatttataaatattaaacaagttgagttgaagtcaagcttgttatatttgtctagggaatactgaattaatatgcctgcataactggattgtagcataactaccctattcaatatttatgtgtgctgcatagtttgtctgatttactcttcaggtacaagcttattgcatgtcacttgttaagaaaatgaaagactcgtatggctgccctggtgatgtaatggttgattctcacattggagcatgggttggagaactacctaactgcttcaaggcaatcagtagtgaggatgctgctgcttctggctcttttcagtatcctgacactcttagccaagaaaatcaatcccagccagtgccagttaatactaagatgtctcatttggaacaaaatgatagaacccaggaatttcctctgcagaatattgctagttttcaggtggtcatgtcagaagaaggtaaagtagtgggatttcagccaactaacctcccagctgtgaaccattgggcaacaaacccactagcaacacttctgtatcaaggacggtcactttctccaggcattatagaacccaggctcaaaatttctcgtccagctaaggctgccccgatcgaattattgatgtcagtaaatcaagattccttttttgctttggcaaggcctgttgaagacccaagcgagcttcctcagattgattctactgcaagattgtgaacagttccaaagatgtgaaacgaaacaaatagtggcagctgagcctgaacaggatttaacaaggtgcctgagttatgagaaagaaatcgactaatgggccccatcattttaagtaagatgccggaggagtggtggtggctgacgtgaagaagaaattccactagtatcccgtcggagtgcaggaggagcgatcggaggggcacaacaaacggcacccggagactatgacccataagccctccagctctctatggttgaacacttgaactataaagtcttatattcagaagtatctaccgagtaggatcaaacaccattcgagtactttcttgggagaaaccatgaccactcttcaaatcttcaagtcttctatatttgtcaccatactatgaagagtctgttgtgcaattctgatgtttttttcgaagaactttgaacgcatcgtgatgatatctatcccgtggcacctaagcctaaaattggcttacaccaagccaattatagggtctcctaagttaattatagggtcttgaacatccttcaaattggctaccctgtgtcagctacagggtcttacatccttagtgatattgatgagtaatgatcgcttgttattttttttttttttggtaaaaataacccttggcaatttcatacgttggtctttcaatgttgaataacagttcccgagcttagttggaatttgccgtgcaggct

SEQ ID NO: 49238 - DNA, 2632 bp, Zea Mays
gcaaaatcctccgacctcgctcgcgccaccgaaaaccaaacgaggaaaaatgccgtccccgtccctcctcctccgcgctcctcctctctgcccctccccgtcccaccccccgcgccgcttcgctcccccctccctcatcacctcgtctccgcctgcccgcctcctccctctgcgcctgccctccgccgcgtcccgccacacgcctcgcgccggtgacacgcgcgtgcccgacgacctcatcccgatcgcgcgctgctacgagggccgccttgctcgactcgagctcgccggcgccgcgcgccgggaacaggccgtcgcggcagcggccgcggccggcggaggggcttcggcggaggaccacctcgccgccggctccgacgccatggtcgtcgaggcattcctccccgggccccatggcggtgggacgaccgcttcctccacgcgagtgattttgcaagccaaggaagttaaagataaggccagtaagatagagaaacagttcggatctgattttttctttgcaaatcaacctgattcagagagtatgttggctatggcctttaagcaagttgtaattcagcggctctcaaactttcggctcgaggtcttccccccaggttcagagagagacttccaagattttggcaaaccccgaaaggggtctttggattgtagtatcagctcatcagatggaaaacttctgtcttctcttgctgaggccattttctcctgtgtcattgaggatgtcagaaaaaatcattttgggagcataggcagtttttttcagaagcgacagctcaactgctcaatggattcctcagtttgtatacacaaaacttctgaggcagaagtagtgaaaaatgctaagaggtgtctggagatcgttagtttaatgaagtcttctcatgaagtacgtgaaacaaagaatggatggtggccacctccacatcatgaaagtttggtgaagattgggggtcctgagttagtgctttgggccaatgagtacattcctacttataagctgcaaattaatgccaacgcattggagaattctaatcttgaagttgaaggtctttatgagttagaaagtaataggcgggaagttctcttaacccactcacaactggtggaactagggaacgttctagacatgtactttgaagatcaattcacattaccaggcaaaacattccatccttattggaatccagatctgtcaaagattaaaaagaacaatttatgctggcctcaatcctttagagacaaaaggctattcaaggaaagttcaaatgcctcattatctcagaactattgttccgatatcaagtctctttataacagtgaggtacaagcttattgcatgtcacttgttaagaaaatgaaagactcgtatggctgccctggtgatgtaatggttgattctcacattggagcatgggttggagaactacctaactgcttcaaggcaatcagtagtgaggatgctgctgcttctggctcttttcagtatcctgacactcttagccaagaaaatcaatcccagccagtgccagttaatactaagatgtctcatttggaacaaaatgatagaacccaggaatttcctctgcagaatattgctagttttcaggtggtcatgtcagaagaaggtaaagtagtgggatttcagccaactaacctcccagctgtgaaccattgggcaacaaacccactagcaacacttctgtatcaaggacggtcactttctccaggcattatagaacccaggctcaaaatttctcgtccagctaaggctgccccgatcgaattattgatgtcagtaaatcaagattccttttttgctttggcaaggcctgttgaagacccaaggtagcagagcgagcttcctcagattgattctactgcaagattgtgaacagttccaaagatgtgaaacgaaacaaatagtggcagctgagcctgaacaggatttaacaaggtgcctgagttatgagaaagaaatcgactaatgggccccatcattttaagtaagatgccggaggagtggtggtggctgacgtgaagaagaaattccactagtatcccgtcggagtgcaggaggagcgatcggaggggcacaacaaacggcacccggagactatgacccataagccctccagctctctatggttgaacacttgaactataaagtcttatattcagaagtatctaccgagtaggatcaaacaccattcgagtactttcttgggagaaaccatgaccactcttcaaatcttcaagtcttctatatttgtcaccatactatgaagagtctgttgtgcaattctgatgtttttttcgaagaactttgaacgcatcgtgatgatatctatcccgtggcacctaagcctaaaattggcttacaccaagccaattatagggtctcctaagttaattatagggtcttgaacatccttcaaattggctaccctgtgtcagctacagggtcttacatccttagtgatattgatgagtaatgatcgcttgttattttttttttttttggtaaaaataacccttggcaatttcatacgttggtctttcaatgttgaataacagttcccgagcttagttggaatttgccgtgcaggct

SEQ ID NO: 49239 - DNA, 2706 bp, Zea Mays
gcaaaatcctccgacctcgctcgcgccaccgaaaaccaaacgaggaaaaatgccgtccccgtccctcctcctccgcgctcctcctctctgcccctccccgtcccaccccccgcgccgcttcgctcccccctccctcatcacctcgtctccgcctgcccgcctcctccctctgcgcctgccctccgccgcgtcccgccacacgcctcgcgccggtgacacgcgcgtgcccgacgacctcatcccgatcgcgcgctgctacgagggccgccttgctcgactcgagctcgccggcgccgcgcgccgggaacaggccgtcgcggcagcggccgcggccggcggaggggcttcggcggaggaccacctcgccgccggctccgacgccatggtcgtcgaggcattcctccccgggccccatggcggtgggacgaccgcttcctccacgcgagtgattttgcaagccaaggaagttaaagataaggccagtaagatagagaaacagttcggatctgattttttctttgcaaatcaacctgattcagagagtatgttggctatggcctttaagcaagttgtaattcagcggctctcaaactttcggctcgaggtcttccccccaggttcagagagagacttccaagattttggcaaaccccgaaaggggtctttggattgtagtatcagctcatcagatggaaaacttctgtcttctcttgctgaggccattttctcctgtgtcattgaggatgtcagaaaaaatcattttgggagcataggcagtttttttcagaagcgacagctcaactgctcaatggattcctcagtttgtatacacaaaacttctgaggcagaagtagtgaaaaatgctaagaggtgtctggagatcgttagtttaatgaagtcttctcatgaagtacgtgaaacaaagaatggatggtggccacctccacatcatgaaagtttggtgaagattgggggtcctgagttagtgctttgggccaatgagtacattcctacttataagctgcaaattaatgccaacgcattggagaattctaatcttgaagttgaaggtctttatgagttagaaagtaataggcgggaagttctcttaacccactcacaactggtggaactagggaacgttctagacatgtactttgaagatcaattcacattaccaggcaaaacattccatccttattggaatccagatctgtcaaagattaaaaagaacaatggttacttgaacaaccttttcacttttttggctgggacctgtatttttctttttgtcaccatctttgctcagttatgctggcctcaatcctttagagacaaaaggctattcaaggaaagttcaaatgcctcattatctcagaactattgttccgatatcaagtctctttataacagtgaggtacaagcttattgcatgtcacttgttaagaaaatgaaagactcgtatggctgccctggtgatgtaatggttgattctcacattggagcatgggttggagaactacctaactgcttcaaggcaatcagtagtgaggatgctgctgcttctggctcttttcagtatcctgacactcttagccaagaaaatcaatcccagccagtgccagttaatactaagatgtctcatttggaacaaaatgatagaacccaggaatttcctctgcagaatattgctagttttcaggtggtcatgtcagaagaaggtaaagtagtgggatttcagccaactaacctcccagctgtgaaccattgggcaacaaacccactagcaacacttctgtatcaaggacggtcactttctccaggcattatagaacccaggctcaaaatttctcgtccagctaaggctgccccgatcgaattattgatgtcagtaaatcaagattccttttttgctttggcaaggcctgttgaagacccaagcgagcttcctcagattgattctactgcaagattgtgaacagttccaaagatgtgaaacgaaacaaatagtggcagctgagcctgaacaggatttaacaaggtgcctgagttatgagaaagaaatcgactaatgggccccatcattttaagtaagatgccggaggagtggtggtggctgacgtgaagaagaaattccactagtatcccgtcggagtgcaggaggagcgatcggaggggcacaacaaacgtgggaaattgggcacccggagactatgacccataagccctccagctctctatggttgaacacttgaactataaagtcttatattcagaagtatctaccgagtaggatcaaacaccattcgagtactttcttgggagaaaccatgaccactcttcaaatcttcaagtcttctatatttgtcaccatactatgaagagtctgttgtgcaattctgatgtttttttcgaagaactttgaacgcatcgtgatgatatctatcccgtggcacctaagcctaaaattggcttacaccaagccaattatagggtctcctaagttaattatagggtcttgaacatccttcaaattggctaccctgtgtcagctacagggtcttacatccttagtgatattgatgagtaatgatcgcttgttattttttttttttttggtaaaaataacccttggcaatttcatacgttggtctttcaatgttgaataacagttcccgagcttagttggaatttgccgtgcaggct

SEQ ID NO: 49240 - DNA, 3850 bp, Zea Mays
gcaaaatcctccgacctcgctcgcgccaccgaaaaccaaacgaggaaaaatgccgtccccgtccctcctcctccgcgctcctcctctctgcccctccccgtcccaccccccgcgccgcttcgctcccccctccctcatcacctcgtctccgcctgcccgcctcctccctctgcgcctgccctccgccgcgtcccgccacacgcctcgcgccggtgacacgcgcgtgcccgacgacctcatcccgatcgcgcgctgctacgagggccgccttgctcgactcgagctcgccggcgccgcgcgccgggaacaggccgtcgcggcagcggccgcggccggcggaggggcttcggcggaggaccacctcgccgccggctccgacgccatggtcgtcgaggcattcctccccgggccccatggcggtgggacgaccgcttcctccacgcgagtgattttgcaagccaaggaagttaaagataaggccagtaagatagagaaacagttcggatctgattttttctttgcaaatcaacctgattcagagagtatgttggctatggcctttaagcaagttgtaattcagcggctctcaaactttcggctcgaggtcttccccccaggttcagagagagacttccaagattttggcaaaccccgaaaggggtctttggattgtagtatcagctcatcagatggaaaacttctgtcttctcttgctgaggccattttctcctgtgtcattgaggatgtcagaaaaaatcattttgggagcataggcagtttttttcagaagcgacagctcaactgctcaatggattcctcagtttgtatacacaaaacttctgaggcagaagtagtgaaaaatgctaagaggtgtctggagatcgttagtttaatgaagtcttctcatgaagtacgtgaaacaaagaatggatggtggccacctccacatcatgaaagtttggtgaagattgggggtcctgagttagtgctttgggccaatgagtacattcctacttataagctgcaaattaatgccaacgcattggagaattctaatcttgaagttgaaggtctttatgagttagaaagtaataggcgggaagttctcttaacccactcacaactggtggaactagggaacgttctagacatgtactttgaagatcaattcacattaccaggcaaaacattccatccttattggaatccagatctgtcaaagattaaaaagaacaatggttacttgaacaaccttttcacttttttggctgggacctgtatttttctttttgtcaccatctttgctcagttatgctggcctcaatcctttagagacaaaaggctattcaaggaaagttcaaatgcctcattatctcagaactattgttccgatatcaagtctctttataacagtgaggtacttagttatctagttatgggggaatttgttgtttgcccaaggtagattgatgataattttagtgttggagtgcttcttgtgatatgctataaacatttcacataacattgacactgcaacgatatttcgactaatacctgaaggaaagttcctcatgccattttacatagtttaatttttttctcaattgcttattcatacttctcgcaatgaccaaacaaacacctactgcacctaacttctgtcagaagttggaactcgggaatattctgtcgggctgcatctcatttgtttctgccccccttgaaaattagtactatcaggatgtgacacttcatttataaatattaaacaagttgagttgaagtcaagcttgttatatttgtctagggaatactgaattaatatgcctgcataactggattgtagcataactaccctattcaatatttatgtgtgctgcatagtttgtctgatttactcttcaggtacaagcttattgcatgtcacttgttaagaaaatgaaagactcgtatggctgccctggtgatgtaatggttgattctcacattggagcatgggttggagaactacctaactgcttcaaggcaatcagtagtgaggatgctgctgcttctggctcttttcagtatcctgacactcttagccaagaaaatcaatcccagccagtgccagttaatactaagatgtctcatttggaacaaaatgatagaacccaggaatttcctctgcagaatattgctagttttcaggtggtcatgtcagaagaaggtaaagtagtgggatttcagccaactaacctcccagctgtgaaccattgggcaacaaacccactagcaacacttctgtatcaaggacggtcactttctccaggcattatagaacccaggctcaaaatttctcgtccagctaaggctgccccgatcgaattattgatgtcagtaaatcaagattccttttttgctttggcaaggcctgttgaagacccaagcgagcttcctcagattgattctactgcaagattgtgaacagttccaaagatgtgaaacgaaacaaatagtggcagctgagcctgaacaggatttaacaaggtgcctgagttatgagaaagaaatcgactaatgggccccatcattttaagtaagatgccggaggagtggtggtggctgacgtgaagaagaaattccactagtatcccgtcggagtgcaggaggagcgatcggaggggcacaacaaacgtgggaaattggtgggctttggcataggccaaactctgtgaatgaaaagataatgatctatatattggcaacgactactatgcaagccgttcttttgtgcaagcgtgcaagcaaactatctgatccattaaatcgtgatataaccgtaggtcacatttaacacttaaacccttccactccagctcaatactctttataaaaaaaaccctaacaaatcatggttgtatctgtggttggattgtaatctaatggattagatggtttgtttgcacgcttgcacagaatgactgcttcataacagtcgttgccatatatattaggttctgtttgtaagcacccaatttttaaaagctgatttatagaaattgaggtggttccaaacataccggtttatgactcagtttataaaattagattttcagtttattaaaaatcaagaagctggtctctcctatctaaaaaataaaatttgttttcttaaaaactgagttgtttccaaaacagggccttagtttaagcagaatagtgtaataccttgtgtctaggtagacatgttgccttacactgaattatgatgtgttttctgtttgggtcggttactatagaagtcctagtaaaattgtatatgtggaatcttaattgaactaagttttctttcttgtagggcacccggagactatgacccataagccctccagctctctatggttgaacacttgaactataaagtcttatattcagaagtatctaccgagtaggatcaaacaccattcgagtactttcttgggagaaaccatgaccactcttcaaatcttcaagtcttctatatttgtcaccatactatgaagagtctgttgtgcaattctgatgtttttttcgaagaactttgaacgcatcgtgatgatatctatcccgtggcacctaagcctaaaattggcttacaccaagccaattatagggtctcctaagttaattatagggtcttgaacatccttcaaattggctaccctgtgtcagctacagggtcttacatccttagtgatattgatgagtaatgatcgcttgttattttttttttttttggtaaaaataacccttggcaatttcatacgttggtctttcaatgttgaataacagttcccgagcttagttggaatttgccgtgcaggct

SEQ ID NO: 49241 - DNA, 3296 bp, Zea Mays
gcaaaatcctccgacctcgctcgcgccaccgaaaaccaaacgaggaaaaatgccgtccccgtccctcctcctccgcgctcctcctctctgcccctccccgtcccaccccccgcgccgcttcgctcccccctccctcatcacctcgtctccgcctgcccgcctcctccctctgcgcctgccctccgccgcgtcccgccacacgcctcgcgccggtgacacgcgcgtgcccgacgacctcatcccgatcgcgcgctgctacgagggccgccttgctcgactcgagctcgccggcgccgcgcgccgggaacaggccgtcgcggcagcggccgcggccggcggaggggcttcggcggaggaccacctcgccgccggctccgacgccatggtcgtcgaggcattcctccccgggccccatggcggtgggacgaccgcttcctccacgcgagtgattttgcaagccaaggaagttaaagataaggccagtaagatagagaaacagttcggatctgattttttctttgcaaatcaacctgattcagagagtatgttggctatggcctttaagcaagttgtaattcagcggctctcaaactttcggctcgaggtcttccccccaggttcagagagagacttccaagattttggcaaaccccgaaaggggtctttggattgtagtatcagctcatcagatggaaaacttctgtcttctcttgctgaggccattttctcctgtgtcattgaggatgtcagaaaaaatcattttgggagcataggcagtttttttcagaagcgacagctcaactgctcaatggattcctcagtttgtatacacaaaacttctgaggcagaagtagtgaaaaatgctaagaggtgtctggagatcgttagtttaatgaagtcttctcatgaagtacgtgaaacaaagaatggatggtggccacctccacatcatgaaagtttggtgaagattgggggtcctgagttagtgctttgggccaatgagtacattcctacttataagctgcaaattaatgccaacgcattggagaattctaatcttgaagttgaaggtctttatgagttagaaagtaataggcgggaagttctcttaacccactcacaactggtggaactagggaacgttctagacatgtactttgaagatcaattcacattaccaggcaaaacattccatccttattggaatccagatctgtcaaagattaaaaagaacaatttatgctggcctcaatcctttagagacaaaaggctattcaaggaaagttcaaatgcctcattatctcagaactattgttccgatatcaagtctctttataacagtgaggtacaagcttattgcatgtcacttgttaagaaaatgaaagactcgtatggctgccctggtgatgtaatggttgattctcacattggagcatgggttggagaactacctaactgcttcaaggcaatcagtagtgaggatgctgctgcttctggctcttttcagtatcctgacactcttagccaagaaaatcaatcccagccagtgccagttaatactaagatgtctcatttggaacaaaatgatagaacccaggaatttcctctgcagaatattgctagttttcaggtggtcatgtcagaagaaggtaaagtagtgggatttcagccaactaacctcccagctgtgaaccattgggcaacaaacccactagcaacacttctgtatcaaggacggtcactttctccaggcattatagaacccaggctcaaaatttctcgtccagctaaggctgccccgatcgaattattgatgtcagtaaatcaagattccttttttgctttggcaaggcctgttgaagacccaaggtagcagagcgagcttcctcagattgattctactgcaagattgtgaacagttccaaagatgtgaaacgaaacaaatagtggcagctgagcctgaacaggatttaacaaggtgcctgagttatgagaaagaaatcgactaatgggccccatcattttaagtaagatgccggaggagtggtggtggctgacgtgaagaagaaattccactagtatcccgtcggagtgcaggaggagcgatcggaggggcacaacaaacgtgggaaattggtgggctttggcataggccaaactctgtgaatgaaaagataatgatctatatattggcaacgactactatgcaagccgttcttttgtgcaagcgtgcaagcaaactatctgatccattaaatcgtgatataaccgtaggtcacatttaacacttaaacccttccactccagctcaatactctttataaaaaaaaccctaacaaatcatggttgtatctgtggttggattgtaatctaatggattagatggtttgtttgcacgcttgcacagaatgactgcttcataacagtcgttgccatatatattaggttctgtttgtaagcacccaatttttaaaagctgatttatagaaattgaggtggttccaaacataccggtttatgactcagtttataaaattagattttcagtttattaaaaatcaagaagctggtctctcctatctaaaaaataaaatttgttttcttaaaaactgagttgtttccaaaacagggccttagtttaagcagaatagtgtaataccttgtgtctaggtagacatgttgccttacactgaattatgatgtgttttctgtttgggtcggttactatagaagtcctagtaaaattgtatatgtggaatcttaattgaactaagttttctttcttgtagggcacccggagactatgacccataagccctccagctctctatggttgaacacttgaactataaagtcttatattcagaagtatctaccgagtaggatcaaacaccattcgagtactttcttgggagaaaccatgaccactcttcaaatcttcaagtcttctatatttgtcaccatactatgaagagtctgttgtgcaattctgatgtttttttcgaagaactttgaacgcatcgtgatgatatctatcccgtggcacctaagcctaaaattggcttacaccaagccaattatagggtctcctaagttaattatagggtcttgaacatccttcaaattggctaccctgtgtcagctacagggtcttacatccttagtgatattgatgagtaatgatcgcttgttattttttttttttttggtaaaaataacccttggcaatttcatacgttggtctttcaatgttgaataacagttcccgagcttagttggaatttgccgtgcaggct

SEQ ID NO: 49242 - DNA, 3206 bp, Zea Mays
gcaaaatcctccgacctcgctcgcgccaccgaaaaccaaacgaggaaaaatgccgtccccgtccctcctcctccgcgctcctcctctctgcccctccccgtcccaccccccgcgccgcttcgctcccccctccctcatcacctcgtctccgcctgcccgcctcctccctctgcgcctgccctccgccgcgtcccgccacacgcctcgcgccggtgacacgcgcgtgcccgacgacctcatcccgatcgcgcgctgctacgagggccgccttgctcgactcgagctcgccggcgccgcgcgccgggaacaggccgtcgcggcagcggccgcggccggcggaggggcttcggcggaggaccacctcgccgccggctccgacgccatggtcgtcgaggcattcctccccgggccccatggcggtgggacgaccgcttcctccacgcgagtgattttgcaagccaaggaagttaaagataaggccagtaagatagagaaacagttcggatctgattttttctttgcaaatcaacctgattcagagagtatgttggctatggcctttaagcaagttgtaattcagcggctctcaaactttcggctcgaggtcttccccccaggttcagagagagacttccaagattttggcaaaccccgaaaggggtctttggattgtagtatcagctcatcagatggaaaacttctgtcttctcttgctgaggccattttctcctgtgtcattgaggatgtcagaaaaaatcattttgggagcataggcagtttttttcagaagcgacagctcaactgctcaatggattcctcagtttgtatacacaaaacttctgaggcagaagtagtgaaaaatgctaagaggtgtctggagatcgttagtttaatgaagtcttctcatgaagtacgtgaaacaaagaatggatggtggccacctccacatcatgaaagtttggtgaagattgggggtcctgagttagtgctttgggccaatgagtacattcctacttataagctgcaaattaatgccaacgcattggagaattctaatcttgaagttgaaggtctttatgagttagaaagtaataggcgggaagttctcttaacccactcacaactggtggaactagggaacgttctagacatgtactttgaagatcaattcacattaccaggcaaaacattccatccttattggaatccagatctgtcaaagattaaaaagaacaatggttacttgaacaaccttttcacttttttggctgggacctgtatttttctttttgtcaccatctttgctcagttatgctggcctcaatcctttagagacaaaaggctattcaaggaaagttcaaatgcctcattatctcagaactattgttccgatatcaagtctctttataacagtgaggtacttagttatctagttatgggggaatttgttgtttgcccaaggtagattgatgataattttagtgttggagtgcttcttgtgatatgctataaacatttcacataacattgacactgcaacgatatttcgactaatacctgaaggaaagttcctcatgccattttacatagtttaatttttttctcaattgcttattcatacttctcgcaatgaccaaacaaacacctactgcacctaacttctgtcagaagttggaactcgggaatattctgtcgggctgcatctcatttgtttctgccccccttgaaaattagtactatcaggatgtgacacttcatttataaatattaaacaagttgagttgaagtcaagcttgttatatttgtctagggaatactgaattaatatgcctgcataactggattgtagcataactaccctattcaatatttatgtgtgctgcatagtttgtctgatttactcttcaggtacaagcttattgcatgtcacttgttaagaaaatgaaagactcgtatggctgccctggtgatgtaatggttgattctcacattggagcatgggttggagaactacctaactgcttcaaggcaatcagtagtgaggatgctgctgcttctggctcttttcagtatcctgacactcttagccaagaaaatcaatcccagccagtgccagttaatactaagatgtctcatttggaacaaaatgatagaacccaggaatttcctctgcagaatattgctagttttcaggtggtcatgtcagaagaaggtaaagtagtgggatttcagccaactaacctcccagctgtgaaccattgggcaacaaacccactagcaacacttctgtatcaaggacggtcactttctccaggcattatagaacccaggctcaaaatttctcgtccagctaaggctgccccgatcgaattattgatgtcagtaaatcaagattccttttttgctttggcaaggcctgttgaagacccaaggtagcagagcgagcttcctcagattgattctactgcaagattgtgaacagttccaaagatgtgaaacgaaacaaatagtggcagctgagcctgaacaggatttaacaaggtgcctgagttatgagaaagaaatcgactaatgggccccatcattttaagtaagatgccggaggagtggtggtggctgacgtgaagaagaaattccactagtatcccgtcggagtgcaggaggagcgatcggaggggcacaacaaacgtgggaaattgggcacccggagactatgacccataagccctccagctctctatggttgaacacttgaactataaagtcttatattcagaagtatctaccgagtaggatcaaacaccattcgagtactttcttgggagaaaccatgaccactcttcaaatcttcaagtcttctatatttgtcaccatactatgaagagtctgttgtgcaattctgatgtttttttcgaagaactttgaacgcatcgtgatgatatctatcccgtggcacctaagcctaaaattggcttacaccaagccaattatagggtctcctaagttaattatagggtcttgaacatccttcaaattggctaccctgtgtcagctacagggtcttacatccttagtgatattgatgagtaatgatcgcttgttattttttttttttttggtaaaaataacccttggcaatttcatacgttggtctttcaatgttgaataacagttcccgagcttagttggaatttgccgtgcaggct

SEQ ID NO: 49243 - DNA, 3859 bp, Zea Mays
gcaaaatcctccgacctcgctcgcgccaccgaaaaccaaacgaggaaaaatgccgtccccgtccctcctcctccgcgctcctcctctctgcccctccccgtcccaccccccgcgccgcttcgctcccccctccctcatcacctcgtctccgcctgcccgcctcctccctctgcgcctgccctccgccgcgtcccgccacacgcctcgcgccggtgacacgcgcgtgcccgacgacctcatcccgatcgcgcgctgctacgagggccgccttgctcgactcgagctcgccggcgccgcgcgccgggaacaggccgtcgcggcagcggccgcggccggcggaggggcttcggcggaggaccacctcgccgccggctccgacgccatggtcgtcgaggcattcctccccgggccccatggcggtgggacgaccgcttcctccacgcgagtgattttgcaagccaaggaagttaaagataaggccagtaagatagagaaacagttcggatctgattttttctttgcaaatcaacctgattcagagagtatgttggctatggcctttaagcaagttgtaattcagcggctctcaaactttcggctcgaggtcttccccccaggttcagagagagacttccaagattttggcaaaccccgaaaggggtctttggattgtagtatcagctcatcagatggaaaacttctgtcttctcttgctgaggccattttctcctgtgtcattgaggatgtcagaaaaaatcattttgggagcataggcagtttttttcagaagcgacagctcaactgctcaatggattcctcagtttgtatacacaaaacttctgaggcagaagtagtgaaaaatgctaagaggtgtctggagatcgttagtttaatgaagtcttctcatgaagtacgtgaaacaaagaatggatggtggccacctccacatcatgaaagtttggtgaagattgggggtcctgagttagtgctttgggccaatgagtacattcctacttataagctgcaaattaatgccaacgcattggagaattctaatcttgaagttgaaggtctttatgagttagaaagtaataggcgggaagttctcttaacccactcacaactggtggaactagggaacgttctagacatgtactttgaagatcaattcacattaccaggcaaaacattccatccttattggaatccagatctgtcaaagattaaaaagaacaatggttacttgaacaaccttttcacttttttggctgggacctgtatttttctttttgtcaccatctttgctcagttatgctggcctcaatcctttagagacaaaaggctattcaaggaaagttcaaatgcctcattatctcagaactattgttccgatatcaagtctctttataacagtgaggtacttagttatctagttatgggggaatttgttgtttgcccaaggtagattgatgataattttagtgttggagtgcttcttgtgatatgctataaacatttcacataacattgacactgcaacgatatttcgactaatacctgaaggaaagttcctcatgccattttacatagtttaatttttttctcaattgcttattcatacttctcgcaatgaccaaacaaacacctactgcacctaacttctgtcagaagttggaactcgggaatattctgtcgggctgcatctcatttgtttctgccccccttgaaaattagtactatcaggatgtgacacttcatttataaatattaaacaagttgagttgaagtcaagcttgttatatttgtctagggaatactgaattaatatgcctgcataactggattgtagcataactaccctattcaatatttatgtgtgctgcatagtttgtctgatttactcttcaggtacaagcttattgcatgtcacttgttaagaaaatgaaagactcgtatggctgccctggtgatgtaatggttgattctcacattggagcatgggttggagaactacctaactgcttcaaggcaatcagtagtgaggatgctgctgcttctggctcttttcagtatcctgacactcttagccaagaaaatcaatcccagccagtgccagttaatactaagatgtctcatttggaacaaaatgatagaacccaggaatttcctctgcagaatattgctagttttcaggtggtcatgtcagaagaaggtaaagtagtgggatttcagccaactaacctcccagctgtgaaccattgggcaacaaacccactagcaacacttctgtatcaaggacggtcactttctccaggcattatagaacccaggctcaaaatttctcgtccagctaaggctgccccgatcgaattattgatgtcagtaaatcaagattccttttttgctttggcaaggcctgttgaagacccaaggtagcagagcgagcttcctcagattgattctactgcaagattgtgaacagttccaaagatgtgaaacgaaacaaatagtggcagctgagcctgaacaggatttaacaaggtgcctgagttatgagaaagaaatcgactaatgggccccatcattttaagtaagatgccggaggagtggtggtggctgacgtgaagaagaaattccactagtatcccgtcggagtgcaggaggagcgatcggaggggcacaacaaacgtgggaaattggtgggctttggcataggccaaactctgtgaatgaaaagataatgatctatatattggcaacgactactatgcaagccgttcttttgtgcaagcgtgcaagcaaactatctgatccattaaatcgtgatataaccgtaggtcacatttaacacttaaacccttccactccagctcaatactctttataaaaaaaaccctaacaaatcatggttgtatctgtggttggattgtaatctaatggattagatggtttgtttgcacgcttgcacagaatgactgcttcataacagtcgttgccatatatattaggttctgtttgtaagcacccaatttttaaaagctgatttatagaaattgaggtggttccaaacataccggtttatgactcagtttataaaattagattttcagtttattaaaaatcaagaagctggtctctcctatctaaaaaataaaatttgttttcttaaaaactgagttgtttccaaaacagggccttagtttaagcagaatagtgtaataccttgtgtctaggtagacatgttgccttacactgaattatgatgtgttttctgtttgggtcggttactatagaagtcctagtaaaattgtatatgtggaatcttaattgaactaagttttctttcttgtagggcacccggagactatgacccataagccctccagctctctatggttgaacacttgaactataaagtcttatattcagaagtatctaccgagtaggatcaaacaccattcgagtactttcttgggagaaaccatgaccactcttcaaatcttcaagtcttctatatttgtcaccatactatgaagagtctgttgtgcaattctgatgtttttttcgaagaactttgaacgcatcgtgatgatatctatcccgtggcacctaagcctaaaattggcttacaccaagccaattatagggtctcctaagttaattatagggtcttgaacatccttcaaattggctaccctgtgtcagctacagggtcttacatccttagtgatattgatgagtaatgatcgcttgttattttttttttttttggtaaaaataacccttggcaatttcatacgttggtctttcaatgttgaataacagttcccgagcttagttggaatttgccgtgcaggct

SEQ ID NO: 49244 - DNA, 3368 bp, Zea Mays
gcaaaatcctccgacctcgctcgcgccaccgaaaaccaaacgaggaaaaatgccgtccccgtccctcctcctccgcgctcctcctctctgcccctccccgtcccaccccccgcgccgcttcgctcccccctccctcatcacctcgtctccgcctgcccgcctcctccctctgcgcctgccctccgccgcgtcccgccacacgcctcgcgccggtgacacgcgcgtgcccgacgacctcatcccgatcgcgcgctgctacgagggccgccttgctcgactcgagctcgccggcgccgcgcgccgggaacaggccgtcgcggcagcggccgcggccggcggaggggcttcggcggaggaccacctcgccgccggctccgacgccatggtcgtcgaggcattcctccccgggccccatggcggtgggacgaccgcttcctccacgcgagtgattttgcaagccaaggaagttaaagataaggccagtaagatagagaaacagttcggatctgattttttctttgcaaatcaacctgattcagagagtatgttggctatggcctttaagcaagttgtaattcagcggctctcaaactttcggctcgaggtcttccccccaggttcagagagagacttccaagattttggcaaaccccgaaaggggtctttggattgtagtatcagctcatcagatggaaaacttctgtcttctcttgctgaggccattttctcctgtgtcattgaggatgtcagaaaaaatcattttgggagcataggcagtttttttcagaagcgacagctcaactgctcaatggattcctcagtttgtatacacaaaacttctgaggcagaagtagtgaaaaatgctaagaggtgtctggagatcgttagtttaatgaagtcttctcatgaagtacgtgaaacaaagaatggatggtggccacctccacatcatgaaagtttggtgaagattgggggtcctgagttagtgctttgggccaatgagtacattcctacttataagctgcaaattaatgccaacgcattggagaattctaatcttgaagttgaaggtctttatgagttagaaagtaataggcgggaagttctcttaacccactcacaactggtggaactagggaacgttctagacatgtactttgaagatcaattcacattaccaggcaaaacattccatccttattggaatccagatctgtcaaagattaaaaagaacaatggttacttgaacaaccttttcacttttttggctgggacctgtatttttctttttgtcaccatctttgctcagttatgctggcctcaatcctttagagacaaaaggctattcaaggaaagttcaaatgcctcattatctcagaactattgttccgatatcaagtctctttataacagtgaggtacaagcttattgcatgtcacttgttaagaaaatgaaagactcgtatggctgccctggtgatgtaatggttgattctcacattggagcatgggttggagaactacctaactgcttcaaggcaatcagtagtgaggatgctgctgcttctggctcttttcagtatcctgacactcttagccaagaaaatcaatcccagccagtgccagttaatactaagatgtctcatttggaacaaaatgatagaacccaggaatttcctctgcagaatattgctagttttcaggtggtcatgtcagaagaaggtaaagtagtgggatttcagccaactaacctcccagctgtgaaccattgggcaacaaacccactagcaacacttctgtatcaaggacggtcactttctccaggcattatagaacccaggctcaaaatttctcgtccagctaaggctgccccgatcgaattattgatgtcagtaaatcaagattccttttttgctttggcaaggcctgttgaagacccaaggtagcagagcgagcttcctcagattgattctactgcaagattgtgaacagttccaaagatgtgaaacgaaacaaatagtggcagctgagcctgaacaggatttaacaaggtgcctgagttatgagaaagaaatcgactaatgggccccatcattttaagtaagatgccggaggagtggtggtggctgacgtgaagaagaaattccactagtatcccgtcggagtgcaggaggagcgatcggaggggcacaacaaacgtgggaaattggtgggctttggcataggccaaactctgtgaatgaaaagataatgatctatatattggcaacgactactatgcaagccgttcttttgtgcaagcgtgcaagcaaactatctgatccattaaatcgtgatataaccgtaggtcacatttaacacttaaacccttccactccagctcaatactctttataaaaaaaaccctaacaaatcatggttgtatctgtggttggattgtaatctaatggattagatggtttgtttgcacgcttgcacagaatgactgcttcataacagtcgttgccatatatattaggttctgtttgtaagcacccaatttttaaaagctgatttatagaaattgaggtggttccaaacataccggtttatgactcagtttataaaattagattttcagtttattaaaaatcaagaagctggtctctcctatctaaaaaataaaatttgttttcttaaaaactgagttgtttccaaaacagggccttagtttaagcagaatagtgtaataccttgtgtctaggtagacatgttgccttacactgaattatgatgtgttttctgtttgggtcggttactatagaagtcctagtaaaattgtatatgtggaatcttaattgaactaagttttctttcttgtagggcacccggagactatgacccataagccctccagctctctatggttgaacacttgaactataaagtcttatattcagaagtatctaccgagtaggatcaaacaccattcgagtactttcttgggagaaaccatgaccactcttcaaatcttcaagtcttctatatttgtcaccatactatgaagagtctgttgtgcaattctgatgtttttttcgaagaactttgaacgcatcgtgatgatatctatcccgtggcacctaagcctaaaattggcttacaccaagccaattatagggtctcctaagttaattatagggtcttgaacatccttcaaattggctaccctgtgtcagctacagggtcttacatccttagtgatattgatgagtaatgatcgcttgttattttttttttttttggtaaaaataacccttggcaatttcatacgttggtctttcaatgttgaataacagttcccgagcttagttggaatttgccgtgcaggct

SEQ ID NO: 49245 - DNA, 2715 bp, Zea Mays
gcaaaatcctccgacctcgctcgcgccaccgaaaaccaaacgaggaaaaatgccgtccccgtccctcctcctccgcgctcctcctctctgcccctccccgtcccaccccccgcgccgcttcgctcccccctccctcatcacctcgtctccgcctgcccgcctcctccctctgcgcctgccctccgccgcgtcccgccacacgcctcgcgccggtgacacgcgcgtgcccgacgacctcatcccgatcgcgcgctgctacgagggccgccttgctcgactcgagctcgccggcgccgcgcgccgggaacaggccgtcgcggcagcggccgcggccggcggaggggcttcggcggaggaccacctcgccgccggctccgacgccatggtcgtcgaggcattcctccccgggccccatggcggtgggacgaccgcttcctccacgcgagtgattttgcaagccaaggaagttaaagataaggccagtaagatagagaaacagttcggatctgattttttctttgcaaatcaacctgattcagagagtatgttggctatggcctttaagcaagttgtaattcagcggctctcaaactttcggctcgaggtcttccccccaggttcagagagagacttccaagattttggcaaaccccgaaaggggtctttggattgtagtatcagctcatcagatggaaaacttctgtcttctcttgctgaggccattttctcctgtgtcattgaggatgtcagaaaaaatcattttgggagcataggcagtttttttcagaagcgacagctcaactgctcaatggattcctcagtttgtatacacaaaacttctgaggcagaagtagtgaaaaatgctaagaggtgtctggagatcgttagtttaatgaagtcttctcatgaagtacgtgaaacaaagaatggatggtggccacctccacatcatgaaagtttggtgaagattgggggtcctgagttagtgctttgggccaatgagtacattcctacttataagctgcaaattaatgccaacgcattggagaattctaatcttgaagttgaaggtctttatgagttagaaagtaataggcgggaagttctcttaacccactcacaactggtggaactagggaacgttctagacatgtactttgaagatcaattcacattaccaggcaaaacattccatccttattggaatccagatctgtcaaagattaaaaagaacaatggttacttgaacaaccttttcacttttttggctgggacctgtatttttctttttgtcaccatctttgctcagttatgctggcctcaatcctttagagacaaaaggctattcaaggaaagttcaaatgcctcattatctcagaactattgttccgatatcaagtctctttataacagtgaggtacaagcttattgcatgtcacttgttaagaaaatgaaagactcgtatggctgccctggtgatgtaatggttgattctcacattggagcatgggttggagaactacctaactgcttcaaggcaatcagtagtgaggatgctgctgcttctggctcttttcagtatcctgacactcttagccaagaaaatcaatcccagccagtgccagttaatactaagatgtctcatttggaacaaaatgatagaacccaggaatttcctctgcagaatattgctagttttcaggtggtcatgtcagaagaaggtaaagtagtgggatttcagccaactaacctcccagctgtgaaccattgggcaacaaacccactagcaacacttctgtatcaaggacggtcactttctccaggcattatagaacccaggctcaaaatttctcgtccagctaaggctgccccgatcgaattattgatgtcagtaaatcaagattccttttttgctttggcaaggcctgttgaagacccaaggtagcagagcgagcttcctcagattgattctactgcaagattgtgaacagttccaaagatgtgaaacgaaacaaatagtggcagctgagcctgaacaggatttaacaaggtgcctgagttatgagaaagaaatcgactaatgggccccatcattttaagtaagatgccggaggagtggtggtggctgacgtgaagaagaaattccactagtatcccgtcggagtgcaggaggagcgatcggaggggcacaacaaacgtgggaaattgggcacccggagactatgacccataagccctccagctctctatggttgaacacttgaactataaagtcttatattcagaagtatctaccgagtaggatcaaacaccattcgagtactttcttgggagaaaccatgaccactcttcaaatcttcaagtcttctatatttgtcaccatactatgaagagtctgttgtgcaattctgatgtttttttcgaagaactttgaacgcatcgtgatgatatctatcccgtggcacctaagcctaaaattggcttacaccaagccaattatagggtctcctaagttaattatagggtcttgaacatccttcaaattggctaccctgtgtcagctacagggtcttacatccttagtgatattgatgagtaatgatcgcttgttattttttttttttttggtaaaaataacccttggcaatttcatacgttggtctttcaatgttgaataacagttcccgagcttagttggaatttgccgtgcaggct

SEQ ID NO: 49246 - DNA, 2768 bp, Zea Mays
gcaaaatcctccgacctcgctcgcgccaccgaaaaccaaacgaggaaaaatgccgtccccgtccctcctcctccgcgctcctcctctctgcccctccccgtcccaccccccgcgccgcttcgctcccccctccctcatcacctcgtctccgcctgcccgcctcctccctctgcgcctgccctccgccgcgtcccgccacacgcctcgcgccggtgacacgcgcgtgcccgacgacctcatcccgatcgcgcgctgctacgagggccgccttgctcgactcgagctcgccggcgccgcgcgccgggaacaggccgtcgcggcagcggccgcggccggcggaggggcttcggcggaggaccacctcgccgccggctccgacgccatggtcgtcgaggcattcctccccgggccccatggcggtgggacgaccgcttcctccacgcgagtgattttgcaagccaaggaagttaaagataaggccagtaagatagagaaacagttcggatctgattttttctttgcaaatcaacctgattcagagagtatgttggctatggcctttaagcaagttgtaattcagcggctctcaaactttcggctcgaggtcttccccccaggttcagagagagacttccaagattttggcaaaccccgaaaggggtctttggattgtagtatcagctcatcagatggaaaacttctgtcttctcttgctgaggccattttctcctgtgtcattgaggatgtcagaaaaaatcattttgggagcataggcagtttttttcagaagcgacagctcaactgctcaatggattcctcagtttgtatacacaaaacttctgaggcagaagtagtgaaaaatgctaagaggtgtctggagatcgttagtttaatgaagtcttctcatgaagtacgtgaaacaaagaatggatggtggccacctccacatcatgaaagtttggtgaagattgggggtcctgagttagtgctttgggccaatgagtacattcctacttataagctgcaaattaatgccaacgcattggagaattctaatcttgaagttgaaggtctttatgagttagaaagtaataggcgggaagttctcttaacccactcacaactggtggaactagggaacgttctagacatgtactttgaagatcaattcacattaccaggcaaaacattccatccttattggaatccagatctgtcaaagattaaaaagaacaatttatgctggcctcaatcctttagagacaaaaggctattcaaggaaagttcaaatgcctcattatctcagaactattgttccgatatcaagtctctttataacagtgaggtacaagcttattgcatgtcacttgttaagaaaatgaaagactcgtatggctgccctggtgatgtaatggttgattctcacattggagcatgggttggagaactacctaactgcttcaaggcaatcagtagtgaggatgctgctgcttctggctcttttcagtatcctgacactcttagccaagaaaatcaatcccagccagtgccagttaatactaagatgtctcatttggaacaaaatgatagaacccaggaatttcctctgcagaatattgctagttttcaggtggtcatgtcagaagaaggtaaagtagtgggatttcagccaactaacctcccagctgtgaaccattgggcaacaaacccactagcaacacttctgtatcaaggacggtcactttctccaggcattatagaacccaggctcaaaatttctcgtccagctaaggctgccccgatcgaattattgatgtcagtaaatcaagattccttttttgctttggcaaggcctgttgaagacccaagcgagcttcctcagattgattctactgcaagattgtgaacagttccaaagatgtgaaacgaaacaaatagtggcagctgagcctgaacaggatttaacaaggtgcctgagttatgagaaagaaatcgactaatgggccccatcattttaagtaagatgccggaggagtggtggtggctgacgtgaagaagaaattccactagtatcccgtcggagtgcaggaggagcgatcggaggggcacaacaaacgtgggaaattggtgggctttggcataggccaaactctgtgaatgaaaagataatgatctatatattggcaacgactactatgcaagccgttcttttgtgcaagcgtgcaagcaaactatctgatccattaaatcgtgatataaccggcacccggagactatgacccataagccctccagctctctatggttgaacacttgaactataaagtcttatattcagaagtatctaccgagtaggatcaaacaccattcgagtactttcttgggagaaaccatgaccactcttcaaatcttcaagtcttctatatttgtcaccatactatgaagagtctgttgtgcaattctgatgtttttttcgaagaactttgaacgcatcgtgatgatatctatcccgtggcacctaagcctaaaattggcttacaccaagccaattatagggtctcctaagttaattatagggtcttgaacatccttcaaattggctaccctgtgtcagctacagggtcttacatccttagtgatattgatgagtaatgatcgcttgttattttttttttttttggtaaaaataacccttggcaatttcatacgttggtctttcaatgttgaataacagttcccgagcttagttggaatttgccgtgcaggct

SEQ ID NO: 49247 - DNA, 3287 bp, Zea Mays
gcaaaatcctccgacctcgctcgcgccaccgaaaaccaaacgaggaaaaatgccgtccccgtccctcctcctccgcgctcctcctctctgcccctccccgtcccaccccccgcgccgcttcgctcccccctccctcatcacctcgtctccgcctgcccgcctcctccctctgcgcctgccctccgccgcgtcccgccacacgcctcgcgccggtgacacgcgcgtgcccgacgacctcatcccgatcgcgcgctgctacgagggccgccttgctcgactcgagctcgccggcgccgcgcgccgggaacaggccgtcgcggcagcggccgcggccggcggaggggcttcggcggaggaccacctcgccgccggctccgacgccatggtcgtcgaggcattcctccccgggccccatggcggtgggacgaccgcttcctccacgcgagtgattttgcaagccaaggaagttaaagataaggccagtaagatagagaaacagttcggatctgattttttctttgcaaatcaacctgattcagagagtatgttggctatggcctttaagcaagttgtaattcagcggctctcaaactttcggctcgaggtcttccccccaggttcagagagagacttccaagattttggcaaaccccgaaaggggtctttggattgtagtatcagctcatcagatggaaaacttctgtcttctcttgctgaggccattttctcctgtgtcattgaggatgtcagaaaaaatcattttgggagcataggcagtttttttcagaagcgacagctcaactgctcaatggattcctcagtttgtatacacaaaacttctgaggcagaagtagtgaaaaatgctaagaggtgtctggagatcgttagtttaatgaagtcttctcatgaagtacgtgaaacaaagaatggatggtggccacctccacatcatgaaagtttggtgaagattgggggtcctgagttagtgctttgggccaatgagtacattcctacttataagctgcaaattaatgccaacgcattggagaattctaatcttgaagttgaaggtctttatgagttagaaagtaataggcgggaagttctcttaacccactcacaactggtggaactagggaacgttctagacatgtactttgaagatcaattcacattaccaggcaaaacattccatccttattggaatccagatctgtcaaagattaaaaagaacaatttatgctggcctcaatcctttagagacaaaaggctattcaaggaaagttcaaatgcctcattatctcagaactattgttccgatatcaagtctctttataacagtgaggtacaagcttattgcatgtcacttgttaagaaaatgaaagactcgtatggctgccctggtgatgtaatggttgattctcacattggagcatgggttggagaactacctaactgcttcaaggcaatcagtagtgaggatgctgctgcttctggctcttttcagtatcctgacactcttagccaagaaaatcaatcccagccagtgccagttaatactaagatgtctcatttggaacaaaatgatagaacccaggaatttcctctgcagaatattgctagttttcaggtggtcatgtcagaagaaggtaaagtagtgggatttcagccaactaacctcccagctgtgaaccattgggcaacaaacccactagcaacacttctgtatcaaggacggtcactttctccaggcattatagaacccaggctcaaaatttctcgtccagctaaggctgccccgatcgaattattgatgtcagtaaatcaagattccttttttgctttggcaaggcctgttgaagacccaagcgagcttcctcagattgattctactgcaagattgtgaacagttccaaagatgtgaaacgaaacaaatagtggcagctgagcctgaacaggatttaacaaggtgcctgagttatgagaaagaaatcgactaatgggccccatcattttaagtaagatgccggaggagtggtggtggctgacgtgaagaagaaattccactagtatcccgtcggagtgcaggaggagcgatcggaggggcacaacaaacgtgggaaattggtgggctttggcataggccaaactctgtgaatgaaaagataatgatctatatattggcaacgactactatgcaagccgttcttttgtgcaagcgtgcaagcaaactatctgatccattaaatcgtgatataaccgtaggtcacatttaacacttaaacccttccactccagctcaatactctttataaaaaaaaccctaacaaatcatggttgtatctgtggttggattgtaatctaatggattagatggtttgtttgcacgcttgcacagaatgactgcttcataacagtcgttgccatatatattaggttctgtttgtaagcacccaatttttaaaagctgatttatagaaattgaggtggttccaaacataccggtttatgactcagtttataaaattagattttcagtttattaaaaatcaagaagctggtctctcctatctaaaaaataaaatttgttttcttaaaaactgagttgtttccaaaacagggccttagtttaagcagaatagtgtaataccttgtgtctaggtagacatgttgccttacactgaattatgatgtgttttctgtttgggtcggttactatagaagtcctagtaaaattgtatatgtggaatcttaattgaactaagttttctttcttgtagggcacccggagactatgacccataagccctccagctctctatggttgaacacttgaactataaagtcttatattcagaagtatctaccgagtaggatcaaacaccattcgagtactttcttgggagaaaccatgaccactcttcaaatcttcaagtcttctatatttgtcaccatactatgaagagtctgttgtgcaattctgatgtttttttcgaagaactttgaacgcatcgtgatgatatctatcccgtggcacctaagcctaaaattggcttacaccaagccaattatagggtctcctaagttaattatagggtcttgaacatccttcaaattggctaccctgtgtcagctacagggtcttacatccttagtgatattgatgagtaatgatcgcttgttattttttttttttttggtaaaaataacccttggcaatttcatacgttggtctttcaatgttgaataacagttcccgagcttagttggaatttgccgtgcaggct

SEQ ID NO: 49248 - DNA, 2027 bp, Zea Mays
ccacgatggctttttttttttttttttttttgaaaaaaaacagggcaacgaaggggaggtgggaactgggaagacctgtttgataaattacagaggatacttcgccaaccgaacaagcctaagtgggggtgatgatgagccaccggaggcgttctcgcgctgccggctcgccgcctggcgacgccagtacgggtacgccccctactcctgagaagtcgggacgggtccggccgtgggcggcgacagcgtcgaaccggaaggtgctggtgttcgcgctggcgttccgcgcggccaacgcgctgctcgtgcgcacgtacttcaaccctgatgagcactggcagtgtctcgaggtcgcccaccgcgtcgccttcgggtatggtcatctcacgtgggagtggaagcggggcctgcgcagttatctccacccattgctctttgctgctttgtacaagaccctggcgctactccatatggacactccgtgggttatggtgatggctccacgtctcgtgcaatctttgtttgcagcttttggagatctatacctatataaactttccaaacttattttcaatggtcaagttgctaagtggacgttattttctcagttggttaactggttcatgtttttctgtatcacacggactctatcaaacagcttggagactgttttgaccgtggctggactctattattggtttgctgcaatagagtcttccaaggcaacctcaatcgtttcaaagcagcacgcggcctgtgaacaaagtatcccatcaagaaaagtggctcttctgatagcagccttgtcatgtgccattcggccaacaagtgctgtaacatggctatatgttggccttttggattttattcagatgaaatcaaaatgtcgctttatccttcttgatgtcattccagtgggggccattgtccttgcagtaacaacactccttgattggtggatgtatggttcctgggtcatagtgccgcttaattttttgaaattcaacttattgtcttccggaggagactactatggaacacatgtcttccattggtactttacacagggttttccatccatgatttggacattcttaccatttgcattgtgcggtattgtaaagtctcaggaatggaggctttcaggtctaattgcttgggtgttaggggtttacagcattcttggacataaagaattcaggtttgttcttccagtgctacctttagcattgatgttctcaggttactgcttagcttccatgtcacagtccaagggcaaaaatcagcataggaaaggaagtctttcaaggctgcagctttctgttattcttctcgtcataaccaatgttcccatggctttatatatgtccttattccatcaaaggggaacagaagacgttatgtattatttgtcaaaagaagcctatgatggaagagtgaggagtgttctctttctcatgccttgtcattcaacaccttactactcaaccttacattacaatctacctatgcgttttttggactgcactcctagtgatagcaaagggaccttggatgagtcagatcgtttccttacaagtccatctgagtttgtcggcgatgtttttggaaatttatctgcattcagtcacattgtattattcgagtcagaagaaagacatgttctccagttgcttctgcacaattcctttcttgagatgaggaggtttttccactcacatttcaagattgacagagaccttcagtcggctgttgtggtttattcatggagggatgtgctatgatttagtactgatgtggcagaaaatgcctgttagctcgtgtaacaatccccacatgtttaatgttgtttcagcttttcatttgagaaatgagttgtggcattgctggatacttctgatatcttaatcctcttggaatgagatgttatgttacttttacccaagtgctttacgacggcataacaattcacagttcgctttcttgcatcgagtctctatgtccatgatatctgcttctaagataaa

SEQ ID NO: 49249 - DNA, 2357 bp, Zea Mays
aaaaaacctagcgctccacctcaccgatagaaatttgtgattttgtcattatcagttttggttgtctgttattatgtcatcccgtatctataactagttgaagcgcacatcgttccaatcgtcgccgccggctacctcctccagccgccgcgcctccctcctccacccgctgccgcctccctccaaaacttgtcgtcgtatccctccaacacccgcatctggcgcagacgaccatacacccgctctgatgctttaaatcaatgtgtatggggttccaagcgtctgacctgacaaagaccgccccaagcaacgatgattcttgaagcgattgcagagataaaattgaaagggctgatttccttgatgtgcgcttcaacgagttggagaggtgggaactgggaagacctgtttgataaattacagaggatacttcgccaaccgaacaagcctaagtgggggtgatgatgagccaccggaggcgttctcgcgctgccggctcgccgcctggcgacgccagtacgggtacgccccctactcctgagaagtcgggacgggtccggccgtgggcggcgacagcgtcgaaccggaaggtgctggtgttcgcgctggcgttccgcgcggccaacgcgctgctcgtgcgcacgtacttcaaccctgatgagcactggcagtgtctcgaggtcgcccaccgcgtcgccttcgggtatggtcatctcacgtgggagtggaagcggggcctgcgcagttatctccacccattgctctttgctgctttgtacaagaccctggcgctactccatatggacactccgtgggttatggtgatggctccacgtctcgtgcaatctttgtttgcagcttttggagatctatacctatataaactttccaaacttattttcaatggtcaagttgctaagtggacgttattttctcagttggttaactggttcatgtttttctgtatcacacggactctatcaaacagcttggagactgttttgaccgtggctggactctattattggtttgctgcaatagagtcttccaaggcaacctcaatcgtttcaaagcagcacgcggcctgtgaacaaagtatcccatcaagaaaagtggctcttctgatagcagccttgtcatgtgccattcggccaacaagtgctgtaacatggctatatgttggccttttggattttattcagatgaaatcaaaatgtcgctttatccttcttgatgtcattccagtgggggccattgtccttgcagtaacaacactccttgattggtggatgtatggttcctgggtcatagtgccgcttaattttttgaaattcaacttattgtcttccggaggagactactatggaacacatgtcttccattggtactttacacagggttttccatccatgatttggacattcttaccatttgcattgtgcggtattgtaaagtctcaggaatggaggctttcaggtctaattgcttgggtgttaggggtttacagcattcttggacataaagaattcaggtttgttcttccagtgctacctttagcattgatgttctcaggttactgcttagcttccatgtcacagtccaagggcaaaaatcagcataggaaaggaagtctttcaaggctgcagctttctgttattcttctcgtcataaccaatgttcccatggctttatatatgtccttattccatcaaaggggaacagaagacgttatgtattatttgtcaaaagaagcctatgatggaagagtgaggagtgttctctttctcatgccttgtcattcaacaccttactactcaaccttacattacaatctacctatgcgttttttggactgcactcctagtgatagcaaagggaccttggatgagtcagatcgtttccttacaagtccatctgagtttgtcggcgatgtttttggaaatttatctgcattcagtcacattgtattattcgagtcagaagaaagacatgttctccagttgcttctgcacaattcctttcttgagatgaggaggtttttccactcacatttcaagattgacagagaccttcagtcggctgttgtggtttattcatggagggatgtgctatgatttagtactgatgtggcagaaaatgcctgttagctcgtgtaacaatccccacatgtttaatgttgtttcagcttttcatttgagaaatgagttgtggcattgctggatacttctgatatcttaatcctcttggaatgagatgttatgttacttttacccaagtgctttacgacggcataacaattcacagttcgctttcttgcatcgagtctctatgtccatgatatctgcttctaagataaa

SEQ ID NO: 49250 - DNA, 2418 bp, Zea Mays
aaaaaacctagcgctccacctcaccgatagaaatttgtgattttgtcattatcagttttggttgtctgttattatgtcatcccgtatctataactagtgagaccatctgtatctataatttgtagggttgatgttatattggcgaagcccacaaatcataatgacaaaattgccaatttctccctcaccgacaggttgaagcgcacatcgttccaatcgtcgccgccggctacctcctccagccgccgcgcctccctcctccacccgctgccgcctccctccaaaacttgtcgtcgtatccctccaacacccgcatctggcgcagacgaccatacacccgctctgatgctttaaatcaatgtgtatggggttccaagcgtctgacctgacaaagaccgccccaagcaacgatgattcttgaagcgattgcagagataaaattgaaagggctgatttccttgatgtgcgcttcaacgagttggagaggatacttcgccaaccgaacaagcctaagtgggggtgatgatgagccaccggaggcgttctcgcgctgccggctcgccgcctggcgacgccagtacgggtacgccccctactcctgagaagtcgggacgggtccggccgtgggcggcgacagcgtcgaaccggaaggtgctggtgttcgcgctggcgttccgcgcggccaacgcgctgctcgtgcgcacgtacttcaaccctgatgagcactggcagtgtctcgaggtcgcccaccgcgtcgccttcgggtatggtcatctcacgtgggagtggaagcggggcctgcgcagttatctccacccattgctctttgctgctttgtacaagaccctggcgctactccatatggacactccgtgggttatggtgatggctccacgtctcgtgcaatctttgtttgcagcttttggagatctatacctatataaactttccaaacttattttcaatggtcaagttgctaagtggacgttattttctcagttggttaactggttcatgtttttctgtatcacacggactctatcaaacagcttggagactgttttgaccgtggctggactctattattggtttgctgcaatagagtcttccaaggcaacctcaatcgtttcaaagcagcacgcggcctgtgaacaaagtatcccatcaagaaaagtggctcttctgatagcagccttgtcatgtgccattcggccaacaagtgctgtaacatggctatatgttggccttttggattttattcagatgaaatcaaaatgtcgctttatccttcttgatgtcattccagtgggggccattgtccttgcagtaacaacactccttgattggtggatgtatggttcctgggtcatagtgccgcttaattttttgaaattcaacttattgtcttccggaggagactactatggaacacatgtcttccattggtactttacacagggttttccatccatgatttggacattcttaccatttgcattgtgcggtattgtaaagtctcaggaatggaggctttcaggtctaattgcttgggtgttaggggtttacagcattcttggacataaagaattcaggtttgttcttccagtgctacctttagcattgatgttctcaggttactgcttagcttccatgtcacagtccaagggcaaaaatcagcataggaaaggaagtctttcaaggctgcagctttctgttattcttctcgtcataaccaatgttcccatggctttatatatgtccttattccatcaaaggggaacagaagacgttatgtattatttgtcaaaagaagcctatgatggaagagtgaggagtgttctctttctcatgccttgtcattcaacaccttactactcaaccttacattacaatctacctatgcgttttttggactgcactcctagtgatagcaaagggaccttggatgagtcagatcgtttccttacaagtccatctgagtttgtcggcgatgtttttggaaatttatctgcattcagtcacattgtattattcgagtcagaagaaagacatgttctccagttgcttctgcacaattcctttcttgagatgaggaggtttttccactcacatttcaagattgacagagaccttcagtcggctgttgtggtttattcatggagggatgtgctatgatttagtactgatgtggcagaaaatgcctgttagctcgtgtaacaatccccacatgtttaatgttgtttcagcttttcatttgagaaatgagttgtggcattgctggatacttctgatatcttaatcctcttggaatgagatgttatgttacttttacccaagtgctttacgacggcataacaattcacagttcgctttcttgcatcgagtctctatgtccatgatatctgcttctaagataaa

SEQ ID NO: 49251 - DNA, 2163 bp, Zea Mays
atgtcatcccgtatctataactagttgaagcgcacatcgttccaatcgtcgccgccggctacctcctccagccgccgcgcctccctcctccacccgctgccgcctccctccaaaacttgtcgtcgtatccctccaacacccgcatctggcgcagacgaccatacacccgctctgatgctttaaatcaatgtgtatggggttccaagcgtctgacctgacaaagaccgccccaagcaacgatgattcttgaagcgattgcagagataaaattgaaagggctgatttccttgatgtgcgcttcaacgagttggagaggtgggacgccagtttttttttttttttttttttgaaaaaaaacagggcaacgaaggggaggtgggaactgggaagacctgtttgataaattacagaggatacttcgccaaccgaacaagcctaagtgggggtgatgatgagccaccggaggcgttctcgcgctgccggctcgccgcctggcgacgccagtacgggtatggtcatctcacgtgggagtggaagcggggcctgcgcagttatctccacccattgctctttgctgctttgtacaagaccctggcgctactccatatggacactccgtgggttatggtgatggctccacgtctcgtgcaatctttgtttgcagcttttggagatctatacctatataaactttccaaacttattttcaatggtcaagttgctaagtggacgttattttctcagttggttaactggttcatgtttttctgtatcacacggactctatcaaacagcttggagactgttttgaccgtggctggactctattattggtttgctgcaatagagtcttccaaggcaacctcaatcgtttcaaagcagcacgcggcctgtgaacaaagtatcccatcaagaaaagtggctcttctgatagcagccttgtcatgtgccattcggccaacaagtgctgtaacatggctatatgttggccttttggattttattcagatgaaatcaaaatgtcgctttatccttcttgatgtcattccagtgggggccattgtccttgcagtaacaacactccttgattggtggatgtatggttcctgggtcatagtgccgcttaattttttgaaattcaacttattgtcttccggaggagactactatggaacacatgtcttccattggtactttacacagggttttccatccatgatttggacattcttaccatttgcattgtgcggtattgtaaagtctcaggaatggaggctttcaggtctaattgcttgggtgttaggggtttacagcattcttggacataaagaattcaggtttgttcttccagtgctacctttagcattgatgttctcaggttactgcttagcttccatgtcacagtccaagggcaaaaatcagcataggaaaggaagtctttcaaggctgcagctttctgttattcttctcgtcataaccaatgttcccatggctttatatatgtccttattccatcaaaggggaacagaagacgttatgtattatttgtcaaaagaagcctatgatggaagagtgaggagtgttctctttctcatgccttgtcattcaacaccttactactcaaccttacattacaatctacctatgcgttttttggactgcactcctagtgatagcaaagggaccttggatgagtcagatcgtttccttacaagtccatctgagtttgtcggcgatgtttttggaaatttatctgcattcagtcacattgtattattcgagtcagaagaaagacatgttctccagttgcttctgcacaattcctttcttgagatgaggaggtttttccactcacatttcaagattgacagagaccttcagtcggctgttgtggtttattcatggagggatgtgctatgatttagtactgatgtggcagaaaatgcctgttagctcgtgtaacaatccccacatgtttaatgttgtttcagcttttcatttgagaaatgagttgtggcattgctggatacttctgatatcttaatcctcttggaatgagatgttatgttacttttacccaagtgctttacgacggcataacaattcacagttcgctttcttgcatcgagtctctatgtccatgatatctgcttctaagataaa

SEQ ID NO: 49252 - DNA, 2276 bp, Zea Mays
ttctccctcaccgacaggttgaagcgcacatcgttccaatcgtcgccgccggctacctcctccagccgccgcgcctccctcctccacccgctgccgcctccctccaaaacttgtcgtcgtatccctccaacacccgcatctggcgcagacgaccatacacccgctctgatgctttaaatcaatgtgtatggggttccaagcgtctgacctgacaaagaccgccccaagcaacgatgattcttgaagcgattgcagagataaaattgaaagggctgatttccttgatgtgcgcttcaacgagttggagaggtgggacgccagtttttttttttttttttttttgaaaaaaaacagggcaacgaaggggaggtgggaactgggaagacctgtttgataaattacagaggatacttcgccaaccgaacaagcctaagtgggggtgatgatgagccaccggaggcgttctcgcgctgccggctcgccgcctggcgacgccagtacgggtacgccccctactcctgagaagtcgggacgggtccggccgtgggcggcgacagcgtcgaaccggaaggtgctggtgttcgcgctggcgttccgcgcggccaacgcgctgctcgtgcgcacgtacttcaaccctgatgagcactggcagtgtctcgaggtcgcccaccgcgtcgccttcgggtatggtcatctcacgtgggagtggaagcggggcctgcgcagttatctccacccattgctctttgctgctttgtacaagaccctggcgctactccatatggacactccgtgggttatggtgatggctccacgtctcgtgcaatctttgtttgcagcttttggagatctatacctatataaactttccaaacttattttcaatggtcaagttgctaagtggacgcttggagactgttttgaccgtggctggactctattattggtttgctgcaatagagtcttccaaggcaacctcaatcgtttcaaagcagcacgcggcctgtgaacaaagtatcccatcaagaaaagtggctcttctgatagcagccttgtcatgtgccattcggccaacaagtgctgtaacatggctatatgttggccttttggattttattcagatgaaatcaaaatgtcgctttatccttcttgatgtcattccagtgggggccattgtccttgcagtaacaacactccttgattggtggatgtatggttcctgggtcatagtgccgcttaattttttgaaattcaacttattgtcttccggaggagactactatggaacacatgtcttccattggtactttacacagggttttccatccatgatttggacattcttaccatttgcattgtgcggtattgtaaagtctcaggaatggaggctttcaggtctaattgcttgggtgttaggggtttacagcattcttggacataaagaattcaggtttgttcttccagtgctacctttagcattgatgttctcaggttactgcttagcttccatgtcacagtccaagggcaaaaatcagcataggaaaggaagtctttcaaggctgcagctttctgttattcttctcgtcataaccaatgttcccatggctttatatatgtccttattccatcaaaggggaacagaagacgttatgtattatttgtcaaaagaagcctatgatggaagagtgaggagtgttctctttctcatgccttgtcattcaacaccttactactcaaccttacattacaatctacctatgcgttttttggactgcactcctagtgatagcaaagggaccttggatgagtcagatcgtttccttacaagtccatctgagtttgtcggcgatgtttttggaaatttatctgcattcagtcacattgtattattcgagtcagaagaaagacatgttctccagttgcttctgcacaattcctttcttgagatgaggaggtttttccactcacatttcaagattgacagagaccttcagtcggctgttgtggtttattcatggagggatgtgctatgatttagtactgatgtggcagaaaatgcctgttagctcgtgtaacaatccccacatgtttaatgttgtttcagcttttcatttgagaaatgagttgtggcattgctggatacttctgatatcttaatcctcttggaatgagatgttatgttacttttacccaagtgctttacgacggcataacaattcacagttcgctttcttgcatcgagtctctatgtccatgatatctgcttctaagataaa

SEQ ID NO: 49253 - DNA, 1963 bp, Zea Mays
ttctccctcaccgacaggttgaagcgcacatcgttccaatcgtcgccgccggctacctcctccagccgccgcgcctccctcctccacccgctgccgcctccctccaaaacttgtcgtcgtatccctccaacacccgcatctggcgcagacgaccatacacccgctctgatgctttaaatcaatgtgtatggggttccaagcgtctgacctgacaaagaccgccccaagcaacgatgattcttgaagcgattgcagagataaaattgaaagggctgatttccttgatgtgcgcttcaacgagttggagaggtatggtcatctcacgtgggagtggaagcggggcctgcgcagttatctccacccattgctctttgctgctttgtacaagaccctggcgctactccatatggacactccgtgggttatggtgatggctccacgtctcgtgcaatctttgtttgcagcttttggagatctatacctatataaactttccaaacttattttcaatggtcaagttgctaagtggacgttattttctcagttggttaactggttcatgtttttctgtatcacacggactctatcaaacagcttggagactgttttgaccgtggctggactctattattggtttgctgcaatagagtcttccaaggcaacctcaatcgtttcaaagcagcacgcggcctgtgaacaaagtatcccatcaagaaaagtggctcttctgatagcagccttgtcatgtgccattcggccaacaagtgctgtaacatggctatatgttggccttttggattttattcagatgaaatcaaaatgtcgctttatccttcttgatgtcattccagtgggggccattgtccttgcagtaacaacactccttgattggtggatgtatggttcctgggtcatagtgccgcttaattttttgaaattcaacttattgtcttccggaggagactactatggaacacatgtcttccattggtactttacacagggttttccatccatgatttggacattcttaccatttgcattgtgcggtattgtaaagtctcaggaatggaggctttcaggtctaattgcttgggtgttaggggtttacagcattcttggacataaagaattcaggtttgttcttccagtgctacctttagcattgatgttctcaggttactgcttagcttccatgtcacagtccaagggcaaaaatcagcataggaaaggaagtctttcaaggctgcagctttctgttattcttctcgtcataaccaatgttcccatggctttatatatgtccttattccatcaaaggggaacagaagacgttatgtattatttgtcaaaagaagcctatgatggaagagtgaggagtgttctctttctcatgccttgtcattcaacaccttactactcaaccttacattacaatctacctatgcgttttttggactgcactcctagtgatagcaaagggaccttggatgagtcagatcgtttccttacaagtccatctgagtttgtcggcgatgtttttggaaatttatctgcattcagtcacattgtattattcgagtcagaagaaagacatgttctccagttgcttctgcacaattcctttcttgagatgaggaggtttttccactcacatttcaagattgacagagaccttcagtcggctgttgtggtttattcatggagggatgtgctatgatttagtactgatgtggcagaaaatgcctgttagctcgtgtaacaatccccacatgtttaatgttgtttcagcttttcatttgagaaatgagttgtggcattgctggatacttctgatatcttaatcctcttggaatgagatgttatgttacttttacccaagtgctttacgacggcataacaattcacagttcgctttcttgcatcgagtctctatgtccatgatatctgcttctaagataaa

SEQ ID NO: 49254 - DNA, 1418 bp, Zea Mays
cttaaactcatttatgtacctatacaattttcttccttggagactgttttgaccgtggctggactctattattggtttgctgcaatagagtcttccaaggcaacctcaatcgtttcaaagcagcacgcggcctgtgaacaaagtatcccatcaagaaaagtggctcttctgatagcagccttgtcatgtgccattcggccaacaagtgctgtaacatggctatatgttggccttttggattttattcagatgaaatcaaaatgtcgctttatccttcttgatgtcattccagtgggggccattgtccttgcagtaacaacactccttgattggtggatgtatggttcctgggtcatagtgccgcttaattttttgaaattcaacttattgtcttccggaggagactactatggaacacatgtcttccattggtactttacacagggttttccatccatgatttggacattcttaccatttgcattgtgcggtattgtaaagtctcaggaatggaggctttcaggtctaattgcttgggtgttaggggtttacagcattcttggacataaagaattcagattgaatactgcaggtttgttcttccagtgctacctttagcattgatgttctcaggttactgcttagcttccatgtcacagtccaagggcaaaaatcagcataggaaaggaagtctttcaaggctgcagctttctgttattcttctcgtcataaccaatgttcccatggctttatatatgtccttattccatcaaaggggaacagaagacgttatgtattatttgtcaaaagaagcctatgatggaagagtgaggagtgttctctttctcatgccttgtcattcaacaccttactactcaaccttacattacaatctacctatgcgttttttggactgcactcctagtgatagcaaagggaccttggatgagtcagatcgtttccttacaagtccatctgagtttgtcggcgatgtttttggaaatttatctgcattcagtcacattgtattattcgagtcagaagaaagacatgttctccagttgcttctgcacaattcctttcttgagatgaggaggtttttccactcacatttcaagattgacagagaccttcagtcggctgttgtggtttattcatggagggatgtgctatgatttagtactgatgtggcagaaaatgcctgttagctcgtgtaacaatccccacatgtttaatgttgtttcagcttttcatttgagaaatgagttgtggcattgctggatacttctgatatcttaatcctcttggaatgagatgttatgttacttttacccaagtgctttacgacggcataacaattcacagttcgctttcttgcatcgagtctctatgtccatgatatctgcttctaagataaa

SEQ ID NO: 49255 - DNA, 1147 bp, Zea Mays
gtccgcctaccaacttttgtttttgatggctcactgttttctattatccggcacaaatgtttctgcatactaactctgataattggagtgtgaaggccatcaggcgcaagaccactggtacgggaaggatgaggtacatgcgacacgtgcctcgccgtttcaagagcaacttcagagaagggactgaggctgccccaaagaagagtgctgctgctgccaactaagtgtggatgttgccatcaagaacctcagaagctagacgttggatctttttgattgaattgtacttctgaactatttgcccgtaatactattacagtactggtttaccgtgtcttgaattgaagccagacgccatcttctttgggagcgtgatttatatattaccccagttttatgctcgtgaattatcttctcttgaaagccgttgcgcacgtcgtaccgctgtgttagtatgtacttatgttttctaaatacaagagactgtataatacaatcctgaatttgtagataataaacgcagttaagatacaatatatgtagagagttatacagatgagagatgagctcttcgtaaagaacttgccttttgattttatttagttagctccttagagcaactccagtagttctccaaaaaatagcttgctaaaatcatgtttagcaagttgctaaatagctattggaggtaaaaaaataacttagtctccaatagttgctcatatttaggaagtagttcgattttgaatctagctttagcgaccctgcccctatgagatatgcctgataataaggttgagagctgaggatgtgaggacggaagaaaaaaggatgtgaggacggaagaaaaaaggccggtcgatatgaactatggatgagtagtgttccggtagcgcaacctacgaggaagttgggttcgacggtgaaggagaaacttgtgtcatacgtgtttgacctagctacctcattatgctagaaaatgaaaaagagcgtgctatacctggctatctcaccgtgtgagaaaggaaaaaataatcacgctagtgtgaagaaattgacgtcaactgcatttagggagttcctaccgagttgctaaatgtggagagtaaatagagttgaatagcaactaagtaaatttagcaagttt

SEQ ID NO: 49256 - DNA, 696 bp, Zea Mays
caaaatacctatgtctccgtatctaaatgattctagttgagatgtcagaatacaagaacgtcgttggggggaggctaaagctgaagggtaaggcactggatgtgaaggaaggtggagtcaagaagaaaaaaaagaagcatcagcttgaagagtcgtctcagattgagcacgatgagctccacaaagggggaaactctggcttaccagctgatcacaacaatgagcttattgaagctggcaaggtgggagatgaagaaaggaatctacatccagactacgaccacctcacaccggcggagcgacgctatatagatcagaagcagaagatcgacatgcaaaagctggccaaagttgctaacaagtcacacagggaccgtatccaggacttcaaccagtatctggcgaacctcagcgagcactatgacatccctaaagttggccctggctaacaaacatagccaaactgctgtgtacgcacaaacaattgtatgctcggtgggcttcaagaacattaaaaatatataaatgtatgttgggtgattgggtctatccagctttttgttagcatgttatatatatcctagtattttccacttttcttttaaaaaacataattgatactcttatgtgtattgatttgaattgaattacgtctgcatatgttcaatttgaaagtagcaagactcaatttgcctt

SEQ ID NO: 49257 - DNA, 1730 bp, Zea Mays
acaaattcaaataactcgctgacctccactgctccacacctctacctgcctgcgccaaaacctagccgccgcggcgccgcccgccgacctgccgtgccgactgctgagtgccgaccgacgtgcgcccgctggccgctcgacgttgttggcctccctcgacgccgctggccggtggccgctcgacggagtcgacgcctcacagcctccctcgacgcgacgccgctggccactcgacggagtcggcgcctcagtcacagcgtcgggaaaccagtgccaatgtggcggcgtcgtaggccgcggaagccatctcgggcgtcgagtacgtgacgaggcagatcctgctgggtttgcgcagctcgcggccggatctccgataccacttgatgaacgtatggagagaagagaggggcatcctcacttctagtattcgtagcaagagagagacagagagagagacagtgattaatggcctgcgtcctaaatttaagctagggcctggcagtaattcaattttttttttgtaatctagcaaatcttgatacggaccattgctagtacctccttgcattgcgttgataaaggtgtagcattgtagaccttgagggtcatggtattattactcctggatttctagttgttacttgacaactgaatatgctttgttacttttcttgtcaaacaactgaatatgaaatggctgtcaaacaagatgttttgttgattttctcttgttgagttgaatggctgaagtcatcatctatagttgtacagtacagtagcatatgacattgtgtatatgacagcttgttagtgctgccattgctgtatagcagcttgttagtactgtcgttgctgtcaaacaggtgttacaagtgtctttattccaggctcaaacgaacgagctattctgcagtttttgtattgattccagacctgaattcatcattgaccaagtttcggtgaaccaactggatgcactatatccgggccaggaacagaaacgtgcatgattttaatcctacacaaacgaacgcggccttagcaattttgttaatttgtttgtatccaatggccgttgcttgggtgattttgcttcgatccgttttggatcggcgtatctttcgctgctagtaccttttggaagtcaaggagtgctgtctttcgcctgatctacctagacaagagtacactatgcgccttttgttgaatcagtgacttctattttggttaagaagcaccgatagccccctgctctgttgaggttcgacgcaggggggacaaaaagcgacataagggtatctatggtgcatggttaatggatcaggcaggggctctataactttatggaagccagcgatttcccgcagggtcatgtcttctgcccacaccatcatctcactgctgttttctttgatgtactgctcgctcagttacgtttgctgctctcagttaatctgtttagtcacactctgaattctgtttcgaagcaaaatgatgagactggaacacctgaatgttatcatgtggagagcacacatatggtcttcaaatttctctggttgctttctatgtgtaccctgtacctttcatatccgatccatgtttgtctagtggagtaatgtgttctattttctttgaccatgccatctaaataatggtactagttgtgctcgagtctgaactgtagtgtttagtcactgagaggcaacatgaagatgccttgtaatctg

SEQ ID NO: 49258 - DNA, 2449 bp, Zea Mays
acaaattcaaataactcgctgacctccactgctccacacctctacctgcctgcgccaaaacctagccgccgcggcgccgcccgccgacctgccgtgccgactgctgagtgccgaccgacgtgcgcccgctggccgctcgacgttgttggcctccctcgacgccgctggccggtggccgctcgacggagtcgacgcctcacagcctccctcgacgcgacgccgctggccactcgacggagtcggcgcctcagtcacagcgagaattcagactgctgcgcgccttcatccccttcccggcggccgacgtccaactccgcctcacagtgcttctgtggttctgcctagcgcctgctcctgctcgtagtgctcgactacgggctgctcttctctagccttgagacagagagtcggagactccagtgcccctgctagcctgccctctggttttgtgttaagtgtgggggtgatgatgagccaccggaggcgttctcgcgctgccggctcgccgcctagtgacgccagtacgggtacagcccctactcctgagaagtcgggatggatccggccgtgggcagcgacagggtcggaccttaaggtgctggagcttgcgctggcgttccgcgcggccaacgcgttgctcgtgcgcacatacttcaaccccgacgagcactggcagtgcctcgaggtcgcccaccgcgtcgcgttcgggtatggtcatctcacgtgggagtggaagcggggcctgcgcagttatctccacccgttgatctttgctgctttgtacaagaccctggcgctactccatctggacactccgtgggttatggtgatggctccacgtctcgtgcaatctttgtttgcagcttttggagatctatacctatataaactttccaaacttattttcaatggtcaagttgctaagtggacggtatccttaaactcatttatgtacctatacaattttcttcgtgagtatatgacttcaacaaccttggacgtcggccttaacaaactgtttgcagttattttctcagttggttaactggttcatgtttttctgtatcacacggactctatcaaacagcttggagactgttttgaccgtggctggactctattactggtttgctgcaatagagtcttccaaggcaacttcaatcgtttcaaagcagcatgcggcctgtgaacaaagtatcccatcaagaaaagtggctcttctgatagcagccttatcatgtgccattcggccaacaagtgctgtaacatggctatatgttagccttttggattttattcagatgaaatcaaaatgttgctttatccttcttgatgtcattccagtaggggcaattgtccttgctgtaacaacactccttgattggtggatgtatggttcctgggtcatagtgccgcttaattttttgaaattcaacttattgtcttccggaggagactactatggaacacatgtctttcattggtactttacacagggttttccatccatgatttggacattcttaccatttgcattgtgcggcattgtaaagtctcaggaatggaggctttcaggtctaattgcttgggtattaggggtttacagcattcttggacataaagaattcagattgaatactgcaggtttgttcttccagtgctacctttagcattgatgttctcaggttactgcttagcttccatgtcacggtccaagggcaaaaatcagcataggaaagatagtctttcaaggatgcaaccttttgttattcttctcgtcataaccaacgttcccatggctttatatatgtccttattccatcaaaggggaacagaagacgctatgtattatttgtcaaaagaagcccatgatggaagagtgaggagtgttctctttctcatgccttgtcattcaacaccttactactcaaccttacattacaatctacctatgcgttttttggactgcactcctagtgatagcaaagggaccttggatgagtcagatcgtttccttacaagtccatctgagtttgtcggcgaggtttttggaaatttatctgcattcagtcacattgtaatatttgagtcagaagaaagacatgttctccagttgcttctgcacaattcctttcttgagatgaggaggtttttccactcacatttcaaggttgacagagaccttcagtcggctgttgtggtttattcacggaggaatgtgctctgatttagtactgatgtggcagaaaatgcctgttagctcgtgtagcaatccccacacgttcatgttgtttcagcttttcacttgagaaatgagatgtaacactgccggatacttctgatgtattaaacccctttgaacgagatgttacgttacttttactcaagtgctttacaacgacaataacaattctctgcttcttctaagataaaagtctgcagctttgag

SEQ ID NO: 49259 - DNA, 2069 bp, Zea Mays
acaaattcaaataactcgctgacctccactgctccacacctctacctgcctgcgccaaaacctagccgccgcggcgccgcccgccgacctgccgtgccgactgctgagtgccgaccgacgtgcgcccgctggccgctcgacgttgttggcctccctcgacgccgctggccggtggccgctcgacggagtcgacgcctcacagcctccctcgacgcgacgccgctggccactcgacggagtcggcgcctcagtcacagcgagaattcagactgctgcgcgccttcatccccttcccggcggccgacgtccaactccgcctcacagtgcttctgtggttctgcctagcgcctgctcctgctcgtagtgctcgactacgggctgctcttctctagccttgagacagagagtcggagactccagtgcccctgctagcctgccctctggttttgtgttaagtggtatggtcatctcacgtgggagtggaagcggggcctgcgcagttatctccacccgttgatctttgctgctttgtacaagaccctggcgctactccatctggacactccgtgggttatggtgatggctccacgtctcgtgcaatctttgtttgcagcttttggagatctatacctatataaactttccaaacttattttcaatggtcaagttgctaagtggacggtatccttaaactcatttatgtacctatacaattttcttccttggagactgttttgaccgtggctggactctattactggtttgctgcaatagagtcttccaaggcaacttcaatcgtttcaaagcagcatgcggcctgtgaacaaagtatcccatcaagaaaagtggctcttctgatagcagccttatcatgtgccattcggccaacaagtgctgtaacatggctatatgttagccttttggattttattcagatgaaatcaaaatgttgctttatccttcttgatgtcattccagtaggggcaattgtccttgctgtaacaacactccttgattggtggatgtatggttcctgggtcatagtgccgcttaattttttgaaattcaacttattgtcttccggaggagactactatggaacacatgtctttcattggtactttacacagggttttccatccatgatttggacattcttaccatttgcattgtgcggcattgtaaagtctcaggaatggaggctttcaggtctaattgcttgggtattaggggtttacagcattcttggacataaagaattcaggtttgttcttccagtgctacctttagcattgatgttctcaggttactgcttagcttccatgtcacggtccaagggcaaaaatcagcataggaaagatagtctttcaaggatgcaaccttttgttattcttctcgtcataaccaacgttcccatggctttatatatgtccttattccatcaaaggggaacagaagacgctatgtattatttgtcaaaagaagcccatgatggaagagtgaggagtgttctctttctcatgccttgtcattcaacaccttactactcaaccttacattacaatctacctatgcgttttttggactgcactcctagtgatagcaaagggaccttggatgagtcagatcgtttccttacaagtccatctgagtttgtcggcgaggtttttggaaatttatctgcattcagtcacattgtaatatttgagtcagaagaaagacatgttctccagttgcttctgcacaattcctttcttgagatgaggaggtttttccactcacatttcaaggttgacagagaccttcagtcggctgttgtggtttattcacggaggaatgtgctctgatttagtactgatgtggcagaaaatgcctgttagctcgtgtagcaatccccacacgttcatgttgtttcagcttttcacttgagaaatgagatgtaacactgccggatacttctgatgtattaaacccctttgaacgagatgttacgttacttttactcaagtgctttacaacgacaataacaattctctgcttcttctaagataaaagtctgcagctttgag

SEQ ID NO: 49260 - DNA, 2319 bp, Zea Mays
acaaattcaaataactcgctgacctccactgctccacacctctacctgcctgcgccaaaacctagccgccgcggcgccgcccgccgacctgccgtgccgactgctgagtgccgaccgacgtgcgcccgctggccgctcgacgttgttggcctccctcgacgccgctggccggtggccgctcgacggagtcgacgcctcacagcctccctcgacgcgacgccgctggccactcgacggagtcggcgcctcagtcacagcgagaattcagactgctgcgcgccttcatccccttcccggcggccgacgtccaactccgcctcacagtgcttctgtggttctgcctagcgcctgctcctgctcgtagtgctcgactacgggctgctcttctctagccttgagacagagagtcggagactccagtgcccctgctagcctgccctctggttttgtgttaagtgtgggggtgatgatgagccaccggaggcgttctcgcgctgccggctcgccgcctagtgacgccagtacgggtacagcccctactcctgagaagtcgggatggatccggccgtgggcagcgacagggtcggaccttaaggtgctggagcttgcgctggcgttccgcgcggccaacgcgttgctcgtgcgcacatacttcaaccccgacgagcactggcagtgcctcgaggtcgcccaccgcgtcgcgttcgggtatggtcatctcacgtgggagtggaagcggggcctgcgcagttatctccacccgttgatctttgctgctttgtacaagaccctggcgctactccatctggacactccgtgggttatggtgatggctccacgtctcgtgcaatctttgtttgcagcttttggagatctatacctatataaactttccaaacttattttcaatggtcaagttgctaagtggacggtatccttaaactcatttatgtacctatacaattttcttccttggagactgttttgaccgtggctggactctattactggtttgctgcaatagagtcttccaaggcaacttcaatcgtttcaaagcagcatgcggcctgtgaacaaagtatcccatcaagaaaagtggctcttctgatagcagccttatcatgtgccattcggccaacaagtgctgtaacatggctatatgttagccttttggattttattcagatgaaatcaaaatgttgctttatccttcttgatgtcattccagtaggggcaattgtccttgctgtaacaacactccttgattggtggatgtatggttcctgggtcatagtgccgcttaattttttgaaattcaacttattgtcttccggaggagactactatggaacacatgtctttcattggtactttacacagggttttccatccatgatttggacattcttaccatttgcattgtgcggcattgtaaagtctcaggaatggaggctttcaggtctaattgcttgggtattaggggtttacagcattcttggacataaagaattcaggtttgttcttccagtgctacctttagcattgatgttctcaggttactgcttagcttccatgtcacggtccaagggcaaaaatcagcataggaaagatagtctttcaaggatgcaaccttttgttattcttctcgtcataaccaacgttcccatggctttatatatgtccttattccatcaaaggggaacagaagacgctatgtattatttgtcaaaagaagcccatgatggaagagtgaggagtgttctctttctcatgccttgtcattcaacaccttactactcaaccttacattacaatctacctatgcgttttttggactgcactcctagtgatagcaaagggaccttggatgagtcagatcgtttccttacaagtccatctgagtttgtcggcgaggtttttggaaatttatctgcattcagtcacattgtaatatttgagtcagaagaaagacatgttctccagttgcttctgcacaattcctttcttgagatgaggaggtttttccactcacatttcaaggttgacagagaccttcagtcggctgttgtggtttattcacggaggaatgtgctctgatttagtactgatgtggcagaaaatgcctgttagctcgtgtagcaatccccacacgttcatgttgtttcagcttttcacttgagaaatgagatgtaacactgccggatacttctgatgtattaaacccctttgaacgagatgttacgttacttttactcaagtgctttacaacgacaataacaattctctgcttcttctaagataaaagtctgcagctttgag

SEQ ID NO: 49261 - DNA, 4290 bp, Zea Mays
ctgaaataagcaggcaatggtagccagtaaacataattggactgaccatgaaggaatataaggatgctacaaatggataaccaaacagatgtagaagaaagtgtggcaacacatcattttgcagaaagcgaacggtgaataccttctttgctactttaaaaaattacactggcaattctttgccaacttagatgtactcataggagaaaggcatctttcagcataaactcacataggtacagtccacgaaaaatcatcatagcaaattacacatagaaaattacaactgtgattgtaaatagaaaacagcaacatgcaagttaagtatgtgtttacatcaatcaggttgaacaataagggtaaaccatcagttgagttcttggtgatatgtctagatttactcagaaaccatattcagtccaatttttcagatcggctgatcgctcctgatcgccagaggggcgatcagctgactaatcacgattagtcgacgaccagcccgattaaccgggctctgatcggtaatcagacatcctgatcgtccagggctataggaaccggtcaaccttcatatatataactacacgcccatggacattgcttcaggttcaggctttcaacaaggcaaacagccatacgtgatacgcccatggacatgggcagcaacaggccaacagccatactacaacatgaagcaaataatcactggaaggtttcaggctttcagcatctaagtaaaactgaaaaccaacaaacatggacatgggcagcaacaggccaacagcatacgccttacctacaggctacagtacaacagagcacaccagaaaacagggacaagctctgaatctggattctggagactggagaccgtacctgcaggccggctactggcgccgccgcgccggggatggaggaagggccgagggggacgatgccgccgtatcccccgtcaccggtagcgcgccgccgtcacctgcacagtgttccgctagggttcctccggtcctccctcggcagctggttgcctggttcgtgtcgtgtgtgcctgggcgttgctctgttggctcttggttgtgcagcttctgctcacgtggtgggaatgggaaaaaggaagctgggctgggccactgggccgaaatttcaatccaaccagccaggctgatcgttcaactaatcggacgatcagatatctgatcgccctgatcgcgtcgttacccttgctcggctctggagttattatcagccgattaatcgcgactaatcgaacgttctgaaaacactgattcagtctcggtacaatcagaagaggtacaattaaaagctaccccttttagataccgtcttaatagtagtcatcatggaaaatatagtcttacagagcaaggatgatccaaaaaaagagtaaaagacatagaagaagacaactgttctaggaaatcaaatatggcaatcctgatgccataataatgttggcatagagaaattgaagaatgtaactacatcaatcaggttgatcaaagagagagaaaacattggctaagtaactgagttctacaatggtatggtggatttgcccagtaaccagattcagttttggtataatcagaaggagcacatttaagtcatccccttaagatcacggcaaaaggagaacaagcatgacccaaaagagaagaagaaaaaaattgtgctaggaaatagacaaggcgattccgattctataataatgttgccaccaagaaagcgatgaatataattacatcaatttggttaatcaaaatggagtaaatcattggtttggttctttgacaatatggatggatttgctcagaaacaatattcggttttggtataatcagatgggatgcaatcccttcggtaaccctaaaccctaataggaaccattatagcactcatccatagataagcattacatctacaataaatcaaaatatgactaaaaagatatcttcaagacaaggaatggttgggcaggcaaaatagctttgttgagaagtcattcaattttggatgtaaaagtaaggaaaataagtccaccgaacttagatacaatcctcaccactgggagagcaatcaatgtatggttgggaaagggattgcataaaactggcacttaaataataaaatctgaaatcttgtatggttgggaacaagggaccaagtggatgccaaaagaaacatatgattgacataaaataaagtacaacatagcattttgatgtagatctcagctagtacagtgcttgccgatcaaaagaggagaacacctggtttgctcagaacctcattcagattggatgtaataaaaaaagaggcaccattttaagatcacgacaaaaggagaacaagcatgacccagaagagaagaagaaattgtgctaggaaatagacaaggcgattctgattctataatattgctgccactaaggaagcgatgaatataattacatcaatttggttaatcaaaatggagtaaatcattagttgggttcttcgacaatatggctggatttgctcaaaaaccatattcggttttggtataatcagatgggatacaatcccttcagtaaccctaaaccctaataggagtcatcatagcaataatccatagataagcattacatgcacaataaatcaaaatatgactaaaaagatacgatatcttcaagacaaggaatggttgggcaggcaaaatagctttgctgagaagtcattcaattttggatgtagaagtttccaccgaacttagatacaatcctcaccattgggagagcaatcaatgtatgctgccactgggaaagggattgcataaaactgacacttaaataataaaatccgaaatcttgtatggtgaacaagggaccaaatggatgccaaaagaaacatatgattgacataaaagaaagtatagcataacattttgatgtagatcttagctagtacagtgcttgccgatcaaaagaggagagcacctggtttgctcagaatctcattcagattggatgtaataaaaaaaaagatgcaccattttaagattacggcaaagggagaacaagcatgacccaaaagagaagaagaaaaaattgtgctaggaaataggcaaggcaattccgattctataataatgctgccactaagaaagcgatgaatataattacatcaatttggttaatcaaaatggagtaaatcattggttgggttcttcgacagtatggctggatttgatcagaaaccatattcggtttttggtataatcagatgggatgcaatcccttcagtaaccctataccctaataggagtcatcataacaatcatccataaataagcattacatgtacaataaatcaaaatattgctaaaatctacgatatcttaaagacaaggaatggttgtgcagacaaaatagttttactgagaagtcattcaattttggatataaaagttaggaaaacaattccactgaacttagatacaatcctcaccactgggagagtgatcaatgtatgctgccactgggaaagggattgcataaaactgacacttaaataccaaagtgtgtgtacattgctacggtttcaatttatgagtgtaaagtataaaacataaagacatgtgtattatgttggttaggtgggtgtgaatgtgcgtggagccaacaaccattgttcaaatcatcatttgtgcataattttaacttttttaccatttaaatgtggagtagcgcgacgactatggaaaccgtggaaattggtgctttatatagtagaaaaaattgaaagcttgtttgaatgtgaacaagggaccaaatggatgccaaaagaaatatatggttgacataaaagaaagtatagcatatcattttgatgtagagttcagctagtatagtgcttgacgatccatatcattttgatgtagagttcagctagtatagtgcttgacgatcaacagaggagagcaccggtcttgctcagaatctcattcagattggatgcaaagaggcaccattttaagagccaccttactcaaacgtcgtccttgtagatgtcatcatagcaaataaggaaacagggaaagaatgaaactccatcacagcattttcgatcaaacatcaggcggagaggataaagcactaggatcatacttgctcagacatttgtctcagatcagttataatcatgcgcgaatagttgcctcgcccagatacggtcctttgtaagtcatcacatcgatttccagcgcaaaaacaaaccacacagtaaatctac

SEQ ID NO: 49262 - DNA, 1621 bp, Zea Mays
ctcgaatgcatcatgaatctgattaccaagtttgccagggagacaggagacatccaaacgctttcagatgttgatataaagattattgctttggcttacatgttagaagctgagatccatgggactagccatttgcgagagcaccctcctcctctgcatgaggtgaatgtcagaaagctgtcagaagctcaaatgcctggttggggctctaatgtgcctaacctgaaagagtgggaagagttggatcagatgtctgaagctggtggagatatcaattctcgaatacttcctctgaaggatattgagagtcaagatatcctgatgtgtgataccaacagtctctgtggggcacaagaggatacagagctccagccatcaaagaaggatgcacctgttgcatgggaggacgatgagaacaatgtaggttggatgcctgctgttagccgcagcatgcacagaagatatttgcagaggaaggcaaggcgtgatgccctcaaggaatctggacaaagttttgagacaagttctgttgttccatcaatcgatgatgataaagttctctctgaaaatagtggattggagcatggtctgacttcaactgatggcctttcttctgtcactgagataatcagtgcacgttctgatgattttgaacatcaagcagaaaatgacactgaaattgctggagaacatttgcattctgatcagcgagcttacggtgatgatgctgatgcgtgcaccaaagaactggaaaacctagatatagaaggtgaggatgagggaggtggtgatgcacatttcattgttgatgagagcagcgagcagagttggaccctgaggtccttatccgaatcaactgtagcatgtgttactagtgattatgccatgcaaaatgtcatcctgctgattggtctccgtctcatagcaccaggtggcatgcagatacgccagatgcataggtgggttttgaggtgccatgcttgctataaggtgacccaagaggttggcaaaatattttgtccgaagtgtggtaatggtgggaccttacggaaggtttcggtaacagttggtgaaaatgggatcactatggcttcacggcgcccacgtgttacacttcgaggcacaaaattctccctcccaatgccccaaggtggaagagatgcaataactaagaaccccatccttcgtgaggatcaacttcctcagaaggttcttcatcctaaactgaagaagtcaaacaaggatgatgatttcttgggcgtggtcgacatattttcgcatggtggtgataagaaggcaccattgaaacctccagtgaggaaggcgctcgcaatgttcagcgggaaaagaaatccaaacgacaaccacttctctcgcaagaagtactaagctctgatctgtcgtcttctttttatgcacgcctgtggtaccgtagtctgtaatcccagcatgtacgtaatggttgaagcagagtgcctttttttttgttagtggcgtatactcatcatattcatatacacagatatatataagcatgtaagctatgcagttttgcagcaactttgtatggtttccgtgctactgtttttctaatgcatttgaattttgagtttgaatgtcc

SEQ ID NO: 49263 - DNA, 2763 bp, Zea Mays
atccgtgaacggtgaaccctcttgggttcttcgcgatttctccactgcttcacacgggaccggccacccatggaggcctacgcgggtgccgcgcccgcggccggcgtcttcgcaggctacagcaccgcggccacgcgccccttcatcatcttcctccgccgccgcgggtctccgcgttccggcgccaggcgggtgcgcctcgtccgggcgccgccgccgccgcgcgctgcagaggacctgcccccgctcgacaagtgggacattatggagctggatttcggcaggttcctcggggaggaccccaagcttaccctcgccaagattcttcttaagaagtcagatccggatgcctcgtctctcgatgtggagaaactaattgccaaaaatagagacaagctcgatgatattctgagggactgcatggaagctaataagaagggtcagggttttgacacatcagaaagtgggccctctttgaatacgacacggccaacaataagcaagccgaccgaatccaaaagttctttgaatatttccaagcccagtatgggcagacctatccaaggagggactccattgactttacttcgaccagcaggaagcaaaccgaagcaagatggtccttctctggctcagtcgcgaccagttggaagcaaagcaagtgaagatgcacctttgtttatcttgtcgcggccaattgggagcaatccaaagttaaggggcactccggtgcaagatagttggcccagtaaagagagtttagctgccgcaacagagttcagtgaggcggggagcatctcaagaacaggcgaggtggatgtcgccttgcggaaacccaccgtgcaccagagtcaggatgatgatctgaagtccaagctcaaaattaagccaaatgttaacctgaaaatgaggaaagatatgaatgaggacttaaggaacatttctctccttcaaaagccagatgttgcaaaagatactgtaaacccagagcaggaccatgcctccgctagccctgccacagtttctgctacagaggataacagcgaacttgaggcagaaaatggtgagctcttgatgaaaaaatagcaaccgaaaatgtccatgaatcatctgggctcgatgatgattctgctgcaggactacagccatcagctcaaactttcatccaagaaacaagcactgctggaccagtagataaccaatcagctaccagcaacaatttctctatgcaggctttcttgcaaggaaaacctagaagagaaaaccaatctgctgaaatattgccatctgaagtagatgaaaagatgactgctactgataataaaaattatgttgatgatgggggaaatgtgttaccatcaaaattagaggacatcacagagagtgactggacaaggttagagaattacgcaagtaccggagaaaaggttgaggtggagctgataaattgcagtgcgaaggggtttgttgtgtcacttgactcactgataggtttcttaccgtaccgtaatcttgctacaaagtggaaattcttagcctttgagacttggttaagaaggaagggtggcgatccttccttgtacaagcagagtttgggattagaggatagttttgaggttaatgacacaaacctagaaccagaatctagctcagtttccaaaatagctggtgaggaccaagaatctctgtcatctaagccgaagtttgaagatcttattcgagcatacaaccaagaaaaatccaagtttttatcttcatttattggtcaaagactccgagtatcagttgtcctggccgacagaaattccaagcggatatttttctctatgaagccaaaagagagcgaagaaatgatccagaaaaagaaaaacctgatggctaggctcaacgttggagatattattcagtgcactatcaagagatttgtttactttgggatatttgttgaggttgaaggtgttcctgcgttgattcagcagtgggaagtgtcgtgggatgacaccttagatccagcagtttcttacaaaattggtcaggttgtggatgctaaagttatccaacttgactataataatatccgcatatttttgtcacttaaagatgtaaagccaaatccatccgtaggtgctttggaatcagtcgttggtgaggatttatcgtttggtggagctcttgaacccgtgcaagcagatttcgagtggcccgaggtagacgccctcatggaagagatgcggagaacagagggtgtaagagatgtctataaaggacggttcttccaaagcccagggttagctccgacgtttcaggtctacatggcacctgtggtcggtccgaaatacaagctcctggcgcggtatgggaacagcgtccaggaggtgatggtggagacggcacttggcaaagaagagttgaaggaggcagtcctgatgtgcactaatagggttagctaggatctccatgacgcgcatttgctgggaccggtttctcgggttgctagctggattggaacagcatacggattatatatccggttaaaagttactgaaatgcagaaaaagaagaacgactctattaatcgagtttaggattgccaatttgattgaaaattctctgttgtggattggttgaggaaagaaacgaaggtggtctgcccccttctcttgtcatatcacgactctgcatgtggctcatactgcggaggactaggagttctttccacttattgaggattatatgattatatcttaaaaaaagatcaatagg

SEQ ID NO: 49264 - DNA, 2741 bp, Zea Mays
atccgtgaacggtgaaccctcttgggttcttcgcgatttctccactgcttcacacgggaccggccacccatggaggcctacgcgggtgccgcgcccgcggccggcgtcttcgcaggctacagcaccgcggccacgcgccccttcatcatcttcctccgccgccgcgggtctccgcgttccggcgccaggcgggtgcgcctcgtccgggcgccgccgccgccgcgcgctgcagaggacctgcccccgctcgacaagtgggacattatggagctggatttcggcaggttcctcggggaggaccccaagcttaccctcgccaagattcttcttaagaagtcagatccggatgcctcgtctctcgatgtggagaaactaattgccaaaaatagagacaagctcgatgatattctgagggactgcatggaagctaataagaagggtcagggttttgacacatcagaaagtgggccctctttgaatacgacacggccaacaataagcaagccgaccgaatccaaaagttctttgaatatttccaagcccagtatgggcagacctatccaaggagggactccattgactttacttcgaccagcaggaagcaaaccgaagcaagatggtccttctctggctcagtcgcgaccagttggaagcaaagcaagtgaagatgcacctttgtttatcttgtcgcggccaattgggagcaatccaaagttaaggggcactccggtgcaagatagttggcccagtaaagagagtttagctgccgcaacagagttcagtgaggcggggagcatctcaagaacaggcgaggtggatgtcgccttgcggaaacccaccgtgcaccagagtcaggatgatgatctgaagtccaagctcaaaattaagccaaatgttaacctgaaaatgaggaaagatatgaatgaggacttaaggaacatttctctccttcaaaagccagatgttgcaaaagatactgtaaacccagagcaggaccatgcctccgctagccctgccacagtttctgctacagaggataacagcgaacttgaggcagaaaatgctcttgatgaaaaaatagcaaccgaaaatgtccatgaatcatctgggctcgatgatgattctgctgcagccatcagctcaaactttcatccaagaaacaagcactgctggaccagtagataaccaatcagctaccagcaacaatttctctatgcaggctttcttgcaaggaaaacctagaagagaaaaccaatctgctgaaatattgccatctgaagtagatgaaaagatgactgctactgataataaaaattatgttgatgatgggggaaatgtgttaccatcaaaattagaggacatcacagagagtgactggacaaggttagagaattacgcaagtaccggagaaaaggttgaggtggagctgataaattgcagtgcgaaggggtttgttgtgtcacttgactcactgataggtttcttaccgtaccgtaatcttgctacaaagtggaaattcttagcctttgagacttggttaagaaggaagggtggcgatccttccttgtacaagcagagtttgggattagaggatagttttgaggttaatgacacaaacctagaaccagaatctagctcagtttccaaaatagctggtgaggaccaagaatctctgtcatctaagccgaagtttgaagatcttattcgagcatacaaccaagaaaaatccaagtttttatcttcatttattggtcaaagactccgagtatcagttgtcctggccgacagaaattccaagcggatatttttctctatgaagccaaaagagagcgaagaaatgatccagaaaaagaaaaacctgatggctaggctcaacgttggagatattattcagtgcactatcaagagatttgtttactttgggatatttgttgaggttgaaggtgttcctgcgttgattcagcagtgggaagtgtcgtgggatgacaccttagatccagcagtttcttacaaaattggtcaggttgtggatgctaaagttatccaacttgactataataatatccgcatatttttgtcacttaaagatgtaaagccaaatccatccgtaggtgctttggaatcagtcgttggtgaggatttatcgtttggtggagctcttgaacccgtgcaagcagatttcgaggtagacgccctcatggaagagatgcggagaacagagggtgtaagagatgtctataaaggacggttcttccaaagcccagggttagctccgacgtttcaggtctacatggcacctgtggtcggtccgaaatacaagctcctggcgcggtatgggaacagcgtccaggaggtgatggtggagacggcacttggcaaagaagagttgaaggaggcagtcctgatgtgcactaatagggttagctaggatctccatgacgcgcatttgctgggaccggtttctcgggttgctagctggattggaacagcatacggattatatatccggttaaaagttactgaaatgcagaaaaagaagaacgactctattaatcgagtttaggattgccaatttgattgaaaattctctgttgtggattggttgaggaaagaaacgaaggtggtctgcccccttctcttgtcatatcacgactctgcatgtggctcatactgcggaggactaggagttctttccacttattgaggattatatgattatatcttaaaaaaagatcaatagg

SEQ ID NO: 49265 - DNA, 2686 bp, Zea Mays
atccgtgaacggtgaaccctcttgggttcttcgcgatttctccactgcttcacacgggaccggccacccatggaggcctacgcgggtgccgcgcccgcggccggcgtcttcgcaggctacagcaccgcggccacgcgccccttcatcatcttcctccgccgccgcgggtctccgcgttccggcgccaggcgggtgcgcctcgtccgggcgccgccgccgccgcgcgctgcagaggacctgcccccgctcgacaagtgggacattatggagctggatttcggcaggttcctcggggaggaccccaagcttaccctcgccaagattcttcttaagaagtcagatccggatgcctcgtctctcgatgtggagaaactaattgccaaaaatagagacaagctcgatgatattctgagggactgcatggaagctaataagaagggtcagggttttgacacatcagaaagtgggccctctttgaatacgacacggccaacaataagcaagccgaccgaatccaaaagttctttgaatatttccaagcccagtatgggcagacctatccaaggagggactccattgactttacttcgaccagcaggaagcaaaccgaagcaagatggtccttctctggctcagtcgcgaccagttggaagcaaagcaagtgaagatgcacctttgtttatcttgtcgcggccaattgggagcaatccaaagttaaggggcactccggtgcaagatagttggcccagtaaagagagtttagctgccgcaacagagttcagtgaggcggggagcatctcaagaacaggcgaggtggatgtcgccttgcggaaacccaccgtgcaccagagtcaggatgatgatctgaagtccaagctcaaaattaagccaaatgttaacctgaaaatgaggaaagatatgaatgaggacttaaggaacatttctctccttcaaaagccagatgttgcaaaagatactgtaaacccagagcaggaccatgcctccgctagccctgccacagtttctgctacagaggataacagcgaacttgaggcagaaaatgctcttgatgaaaaaatagcaaccgaaaatgtccatgaatcatctgggctcgatgatgattctgctgcaggactacagccatcagctcaaactttcatccaagaaacaagcactgctggaccagtagataaccaatcagctaccagcaacaatttctctatgcaggctttcttgcaaggaaaacctagaagagaaaaccaatctgctgaaatattgccatctgaagtagatgaaaagatgactgctactgataataaaaattatgttgatgatgggggaaatgtgttaccatcaaaattagaggacatcacagagagtgactggacaaggttagagaattacgcaagtaccggagaaaaggttgaggtggagctgataaattgcagtgcgaaggggtttgttgtgtcacttgactcactgataggtttcttaccgtaccgtaatcttgctacaaagtggaaattcttagcctttgagacttggttaagaaggaagggtggcgatccttccttgtacaagcagagtttgggattagaggatagttttgaggttaatgacacaaacctagaaccagaatctagctcagtttccaaaatagctggtgaggaccaagaatctctgtcatctaagccgaagtttgaagatcttattcgagcatacaaccaagaaaaatccaagtttttatcttcatttattggtcaaagactccgagtatcagttgtcctggccgacagaaattccaagcggatatttttctctatgaagccaaaagagagcgaagaaatgatccagaaaaagaaaaacctgatggctaggctcaacgttggagatattattcagtgcactatcaagagatttgtttactttgggatatttgttgaggttgaaggtgttcctgcgttgattcagcagtgggaagtgtcgtgggatgacaccttagatccagcagtttcttacaaaattggtcagccaaatccatccgtaggtgctttggaatcagtcgttggtgaggatttatcgtttggtggagctcttgaacccgtgcaagcagatttcgagtggcccgaggtagacgccctcatggaagagatgcggagaacagagggtgtaagagatgtctataaaggacggttcttccaaagcccagggttagctccgacgtttcaggtctacatggcacctgtggtcggtccgaaatacaagctcctggcgcggtatgggaacagcgtccaggaggtgatggtggagacggcacttggcaaagaagagttgaaggaggcagtcctgatgtgcactaatagggttagctaggatctccatgacgcgcatttgctgggaccggtttctcgggttgctagctggattggaacagcatacggattatatatccggttaaaagttactgaaatgcagaaaaagaagaacgactctattaatcgagtttaggattgccaatttgattgaaaattctctgttgtggattggttgaggaaagaaacgaaggtggtctgcccccttctcttgtcatatcacgactctgcatgtggctcatactgcggaggactaggagttctttccacttattgaggattatatgattatatcttaaaaaaagatcaatagg

SEQ ID NO: 49266 - DNA, 2743 bp, Zea Mays
atccgtgaacggtgaaccctcttgggttcttcgcgatttctccactgcttcacacgggaccggccacccatggaggcctacgcgggtgccgcgcccgcggccggcgtcttcgcaggctacagcaccgcggccacgcgccccttcatcatcttcctccgccgccgcgggtctccgcgttccggcgccaggcgggtgcgcctcgtccgggcgccgccgccgccgcgcgctgcagaggacctgcccccgctcgacaagtgggacattatggagctggatttcggcaggttcctcggggaggaccccaagcttaccctcgccaagattcttcttaagaagtcagatccggatgcctcgtctctcgatgtggagaaactaattgccaaaaatagagacaagctcgatgatattctgagggactgcatggaagctaataagaagggtcagggttttgacacatcagaaagtgggccctctttgaatacgacacggccaacaataagcaagccgaccgaatccaaaagttctttgaatatttccaagcccagtatgggcagacctatccaaggagggactccattgactttacttcgaccagcaggaagcaaaccgaagcaagatggtccttctctggctcagtcgcgaccagttggaagcaaagcaagtgaagatgcacctttgtttatcttgtcgcggccaattgggagcaatccaaagttaaggggcactccggtgcaagatagttggcccagtaaagagagtttagctgccgcaacagagttcagtgaggcggggagcatctcaagaacaggcgaggtggatgtcgccttgcggaaacccaccgtgcaccagagtcaggatgatgatctgaagtccaagctcaaaattaagccaaatgttaacctgaaaatgaggaaagatatgaatgaggacttaaggaacatttctctccttcaaaagccagatgttgcaaaagatactgtaaacccagagcaggaccatgcctccgctagccctgccacagtttctgctacagaggataacagcgaacttgaggcagaaaatgctcttgatgaaaaaatagcaaccgaaaatgtccatgaatcatctgggctcgatgatgattctgctgcagccatcagctcaaactttcatccaagaaacaagcactgctggaccagtagataaccaatcagctaccagcaacaatttctctatgcaggctttcttgcaaggaaaacctagaagagaaaaccaatctgctgaaatattgccatctgaagtagatgaaaagatgactgctactgataataaaaattatgttgatgatgggggaaatgtgttaccatcaaaattagaggacatcacagagagtgactggacaaggttagagaattacgcaagtaccggagaaaaggttgaggtggagctgataaattgcagtgcgaaggggtttgttgtgtcacttgactcactgataggtttcttaccgtaccgtaatcttgctacaaagtggaaattcttagcctttgagacttggttaagaaggaagggtggcgatccttccttgtacaagcagagtttgggattagaggatagttttgaggttaatgacacaaacctagaaccagaatctagctcagtttccaaaatagctggtgaggaccaagaatctctgtcatctaagccgaagtttgaagatcttattcgagcatacaaccaagaaaaatccaagtttttatcttcatttattggtcaaagactccgagtatcagttgtcctggccgacagaaattccaagcggatatttttctctatgaagccaaaagagagcgaagaaatgatccagaaaaagaaaaacctgatggctaggctcaacgttggagatattattcagtgcactatcaagagatttgtttactttgggatatttgttgaggtgttcctgcgttgattcagcagtgggaagtgtcgtgggatgacaccttagatccagcagtttcttacaaaattggtcaggttgtggatgctaaagttatccaacttgactataataatatccgcatatttttgtcacttaaagatgtaaagccaaatccatccgtaggtgctttggaatcagtcgttggtgaggatttatcgtttggtggagctcttgaacccgtgcaagcagatttcgagtggcccgaggtagacgccctcatggaagagatgcggagaacagagggtgtaagagatgtctataaaggacggttcttccaaagcccagggttagctccgacgtttcaggtctacatggcacctgtggtcggtccgaaatacaagctcctggcgcggtatgggaacagcgtccaggaggtgatggtggagacggcacttggcaaagaagagttgaaggaggcagtcctgatgtgcactaatagggttagctaggatctccatgacgcgcatttgctgggaccggtttctcgggttgctagctggattggaacagcatacggattatatatccggttaaaagttactgaaatgcagaaaaagaagaacgactctattaatcgagtttaggattgccaatttgattgaaaattctctgttgtggattggttgaggaaagaaacgaaggtggtctgcccccttctcttgtcatatcacgactctgcatgtggctcatactgcggaggactaggagttctttccacttattgaggattatatgattatatcttaaaaaaagatcaatagg

SEQ ID NO: 49267 - DNA, 2671 bp, Zea Mays
atccgtgaacggtgaaccctcttgggttcttcgcgatttctccactgcttcacacgggaccggccacccatggaggcctacgcgggtgccgcgcccgcggccggcgtcttcgcaggctacagcaccgcggccacgcgccccttcatcatcttcctccgccgccgcgggtctccgcgttccggcgccaggcgggtgcgcctcgtccgggcgccgccgccgccgcgcgctgcagaggacctgcccccgctcgacaagtgggacattatggagctggatttcggcaggttcctcggggaggaccccaagcttaccctcgccaagattcttcttaagaagtcagatccggatgcctcgtctctcgatgtggagaaactaattgccaaaaatagagacaagctcgatgatattctgagggactgcatggaagctaataagaagggtcagggttttgacacatcagaaagtgggccctctttgaatacgacacggccaacaataagcaagccgaccgaatccaaaagttctttgaatatttccaagcccagtatgggcagacctatccaaggagggactccattgactttacttcgaccagcaggaagcaaaccgaagcaagatggtccttctctggctcagtcgcgaccagttggaagcaaagcaagtgaagatgcacctttgtttatcttgtcgcggccaattgggagcaatccaaagttaaggggcactccggtgcaagatagttggcccagtaaagagagtttagctgccgcaacagagttcagtgaggcggggagcatctcaagaacaggcgaggtggatgtcgccttgcggaaacccaccgtgcaccagagtcaggatgatgatctgaagtccaagctcaaaattaagccaaatgttaacctgaaaatgaggaaagatatgaatgaggacttaaggaacatttctctccttcaaaagccagatgttgcaaaagatactgtaaacccagagcaggaccatgcctccgctagccctgccacagtttctgctacagaggataacagcgaacttgaggcagaaaatgctcttgatgaaaaaatagcaaccgaaaatgtccatgaatcatctgggctcgatgatgattctgctgcaggactacagccatcagctcaaactttcatccaagaaacaagcactgctggaccagtagataaccaatcagctaccagcaacaatttctctatgcaggctttcttgcaaggaaaacctagaagagaaaaccaatctgctgaaatattgccatctgaagtagatgaaaagatgactgctactgataataaaaattatgttgatgatgggggaaatgtgttaccatcaaaattagaggacatcacagagagtgactggacaaggttagagaattacgcaagtaccggagaaaaggttgaggtggagctgataaattgcagtgcgaaggggtttgttgtgtcacttgactcactgataggtttcttaccgtaccgtaatcttgctacaaagtggaaattcttagcctttgagacttggttaagaaggaagggtggcgatccttccttgtacaagcagagtttgggattagaggatagttttgaggttaatgacacaaacctagaaccagaatctagctcagtttccaaaatagctggtgaggaccaagaatctctgtcatctaagccgaagtttgaagatcttattcgagcatacaaccaagaaaaatccaagtttttatcttcatttattggtcaaagactccgagtatcagttgtcctggccgacagaaattccaagcggatatttttctctatgaagccaaaagagagcgaagaaatgatccagaaaaagaaaaacctgatggctaggctcaacgttggagatattattcagtgcactatcaagagatttgtttactttgggatatttgttgaggttgaaggtgttcctgcgttgattcagcagtgggaagtgtcgtgggatgacaccttagatccagcagtttcttacaaaattggtcaggttgtggatgctaaagttatccaacttgactataataatatccgcatatttttgtcacttaaagatgtaaagccaaatccatccgtaggtgctttggaatcagtcgttggtgaggatttatcgtttggtggagctcttgaacccgtgcaagcagatttcgagtggcccgaggtagacgccctcatggaagagatgcggagaacagagggtgtaagagatgtctataaaggacggttcttccaaagcccagggttagctccgacgtttcaggtctacatggcacctgtggtcggtccgaaatacaagctcctggcgcggtatgggaacagcgtccaggaggtgatggtggagacggcacttggcaaagaagagttgaaggaggcagtcctgatgtgcactaatagggttagctaggatctccatgacgcgcatttgctgggaccggtttctcgggttgctagctggattggaacagcatacggattatatatccggttaaaagttactgaaatgcagaaaaagaagaacgactctattaatcgagtttaggattgccaatttgattgaaaattctctgttgtggattggttgaggaaagaaacgaagaagccagaagatgcagagcaagcagccaatcgac

SEQ ID NO: 49268 - DNA, 1505 bp, Zea Mays
caaaaaccaatctgctgaaatattgccatctgaagtagatgaaaagatgactgctactgataataaaaattatgttgatgatgggggaaatgtgttaccatcaaaattagaggacatcacagagagtgactggacaaggttagagaattacgcaagtaccggagaaaaggttgaggtggagctgataaattgcagtgcgaaggggtttgttgtgtcacttgactcactgataggtttcttaccgtaccgtaatcttgctacaaagtggaaattcttagcctttgagacttggttaagaaggaagggtggcgatccttccttgtacaagcagagtttgggattagaggatagttttgaggttaatgacacaaacctagaaccagaatctagctcagtttccaaaatagctggtgaggaccaagaatctctgtcatctaagccgaagtttgaagatcttattcgagcatacaaccaagaaaaatccaagtttttatcttcatttattggtcaaagactccgagtatcagttgtcctggccgacagaaattccaagcggatatttttctctatgaagccaaaagagagcgaagaaatgatccagaaaaagaaaaacctgatggctaggctcaacgttggagatattattcagtgcactatcaagagatttgtttactttgggatatttgttgaggttgaaggtgttcctgcgttgattcagcagtgggaagtgtcgtgggatgacaccttagatccagcagtttcttacaaaattggtcaggttgtggatgctaaagttatccaacttgactataataatatccgcatatttttgtcacttaaagatgtaaagccaaatccatccgtaggtgctttggaatcagtcgttggtgaggatttatcgtttggtggagctcttgaacccgtgcaagcagatttcgagtggcccgaggtagacgccctcatggaagagatgcggagaacagagggtgtaagagatgtctataaaggacggttcttccaaagcccagggttagctccgacgtttcaggtctacatggcacctgtggtcggtccgaaatacaagctcctggcgcggtatgggaacagcgtccaggaggtgatggtggagacggcacttggcaaagaagagttgaaggaggcagtcctgatgtgcactaatagggttagctaggatctccatgacgcgcatttgctgggaccggtttctcgggttgctagctggattggaacagcatacggattatatatccggttaaaagttactgaaatgcagaaaaagaagaacgactctattaatcgagtttaggattgccaatttgattgaaaattctctgttgtggattggttgaggaaagaaacgaaggtggtctgcccccttctcttgtcatatcacgactctgcatgtggctcatactgcggaggactaggagttctttccacttattgaggattatatgattatatcttaaaaaaagatcaatagg

SEQ ID NO: 49269 - DNA, 964 bp, Zea Mays
catgccacagattattataaaagatttcagtcctccatggacgacacgacgaaggtcgtccgacacaaaggtacagctggagagccctgtcgcacccgcacccgcacccgcacgcagcggcggcagcgcagctgcgcagatcgccatctcaattctcgacccaacccccacgctggccgctgcactgagcagcaaccaccagtccttctgtccgcagcctaccacacacgccacgcctcgcctccggtctacatggccggcgaactgcgccaccgccgcgcgccgtcggaggacgagggcgtcgcctcctctcaaagactcgactccgcccccgcaggcaacggcaaggctggcacttcgtccggcggcggcgagggggcggagccgcggggcgggaagagggacgcgctagggtggctggagtggtgccgcggttggatggccatcgtgggggagttcctcttccagcgcatcgccgccagccacctggccaacccgctcgagttgcccccgctcgatggcgtctccatcgtcgtcaccggcgccaccagcggcatcgggctcgagatcgcaaggcaactcgctctcgctggggcacatgttgttatggctgtaaggagacccaaggtggcacaagagttgattcagaagtggcagaatgaaaattcagaaacaggaagaccactaaatgccgagaaccccaacatttttcgaaggatggacatgaagaacacatgcaagtgaaccatcttgcacctgcattactggcgatgctgcttataccttcccttctccgaggttctcccagcagaatcgttaacgttaattcaatcatgcacagtgtaggttttgttgatgctgaagatttcaacttgagaaaacataaatatagaagttggttggcgtattcaaatagcaagttggcacaggtaaaatttagtagcatgcttcataagagaatcct

SEQ ID NO: 49270 - DNA, 3556 bp, Zea Mays
agctgcagagtcaaacccggagtgccttctctctctcttttccttctcactctctctaccctccctctagctcagtagctcctttctctctctctctctcaacacacacttcttcctgcaagggaacaagaaagagcaagcaagattgaagaaggacgctctgaatccctgatcatgacaccaagatgccggccggcgacatggcgagcagagcatcggcggtgctgctagtgacggcgctgtgcgcggccgcgctgtcgcggtccaggatcttcggcgccgccgcgcagacgcagccgtgtggcgccggcgacctcgccgcgttgcgcgggttctcggcgggtctcgacgccggggtcgacggctggccgaccgccgccaacgcgtcggacgacgcgtgctgcgactggcccggggtgacgtgcggcgaggcggcggctgtcgtcgggctggcgctgcccaaccggacgctgcggggccaggtggccgcgtcgctcgccggcctcgtcgcgctccgggtgctcgacctttccggcaacgcgctgcgcggcgcgctgcccgcggggctgctccggctccgcagcctcgaggtgctcgacgtcagcgccaacgcgttcgccggcgggctgctggcggccgcggccggcgcgatcgacctcccggcggcacgcgtgttcaacgtttcgtacaacgcgttcaacggcacccaccccgtgctccccggcgcgcgcaacctgtccgcgtacgacgtatcgggcaacgccttcggggggcccgtccacgccgccgccctgtgcgccgagtctccggcgctgcgcgttttgcggctctccttgaacaggctgtccggcgccttccctgccgggttcgggcaatgccggtcgctcatcgagctctccctcgacggcaacggcatccacggcgcgctcccggacgatctcttcggcgtcacgtcgctgcagttcctcagcctccacaccaactctatctccggcggactgtcgcctcgcctgcgcaacctcagcagactcgtccgcctcgacttttccttcaacgccttctccgggccgctacccgacgtgttcgacgcgctcgccggcctccaggagctctcggcgcccagcaaccagctctccggggagctccccgccacgatctcgcgctgccgcttgctccgagtgctcaacctccggaacaactcgttcgtcggggacatcggcctcgacttccgcgcgctcaggggcctggtgtacctcgatctcggcgccaacggcttcacggggcccatcccggcgagccttcccgagtgcaggggcatggccgcgctcaacctgggccggaacaaactcaccggcgagataccggcgtcgttcgccaacttctccgcgctgtccttcctctcgctcaccggcaacagcttctccaacgtctcgtcggcgctgcagacgctgcagggcctccctaacctgaccagcctggtgctcaccaggaacttccacggcggcgaggagatgccgtcggacgacgccggcatcgcgggtttcccaagcatccaggttctggtcattgctaactgcgagcttcacgggacaattccgtcgtggatcgccggcctccggaaactgagagtgctggacctgtcatggaaccggctcgccggcccgatcccaccatggctggggcaattcgaccgcctcttctacctcgacatatcgaacaattccctgcagggggagataccgggtagcttggcgcagatgccagggctggtcgccgccggtgctcatggtgacggcggcgacgacgaggcgcaggtgcaggacttcccgttcttcatgcgccggaacacgtcggtgcaggggcggcagtataatcaggtggacagcttcccgccttcgctggtcctgggacacaacaacctcaccggcggcgtgccggccgcgctgggggcattgaccagggtgcacatcgttgacctgagctggaacaggctgtcgggacccatcccaccggacctgtcggggatgacgagcctcgagtcgctggacatgtccaacaacgcgctctccggcgtgatcccggcgtcgctgacgcagctcagcttcctctcccacttcgacgtctcgttcaacaacctctccggcgaggtccccgtgggcgggcagttctccacgttctcgcggggggacttccaggggaacccgctgctgtgcggcatccacgtggcgcggtgcacgcggaaggacgagccgccgcgcacggtcgacggcggcgggggaggcaagcaggagcggagcgccggcaccggcgtcgcggcggcgatcggcgtcgcgacggcgctgctcgtcgccgtagccgcggccgtgacgtggcgcgtgtggtcaaagcggcaggaggacaacgccagagtggcggcagacgacgacgacgacgacgacggcagcctcgagtcggcggcgaagtccacgctggtactgctcttcccggccggcgatgaggaggatagcgacgaaggcgagcgcgcgatgacgctggaggacgtgatgaaggcgacgcgcaacttcgacgcatcctgcatcgtcgggtgcggcggtttcgggatggtgtaccgcgcgacgctggcggacgggagcgaggtggcggtgaagcggctgtccggcgatttctggcagatggagcgcgagttccgcgccgaggtggagacgctgtcgcgcgtgcggcaccggaacctggtgccgctgcagggctactgccgtgcgggcaaggaccggctgctcatctacccgtacatggagaacggcagccttgaccactggctccacgagcgaggcggcggcgcgctggcgtggccggcccggctgggcatcgcacgcggcgcggcgcgcgggctggcgcacctgcacgcgtcgtcggagccgcgcgtcctgcaccgggacatcaagtcgagcaacatcctcctggacgcgcggctggagcccaagctggcggacttcgggctggccaggctggtgctcccgacggacacgcacgtgacgacggacctggtgggcacgctggggtacatcccgccggagtacgggagctcgtcggtggccacctaccgcggggacgtgtacagcctcggcgtggtgctgctggagctcgtgacggggcggcggccggtggacatggcgcggccagtcggcggcggccgggacgtgacgtcgtgggcggtgcggatgcggcgcgaggccaggggcgacgaggtgatcgacgccagcgtcgacgagaggaagcaccgggaggaggcggcgatggtgctggacgtggcgtgcgcctgcgtcaacgataaccccaagtcgcggccgacggcgcggcaggtggtcgagtggctcgaagccatcgccgcctccgcctcgctggcgccgcgggtgactgacacagtgcacaccgtgaatacttgtaactggaggtgaatgtgtaaaatgaaattggagatgtgcacttgtaaaacaggtttacattgatcatttaaccgtataatcgtacatacagagtaactgctgacactgtaaac

SEQ ID NO: 49271 - DNA, 1733 bp, Zea Mays
  misc_feature (546)..(547): n is a, c, g, or t
ctcatatggtagagcgctcgcttcgcatgcgagaggcacggggttcgattccccgcacctccatttttattttttattcctcggcacaccctaaatattaatcatggtcccacctggcagtagactcgattggcccctgcgcctcgcggtagcgtgcggctgtgccgtcgacccgtcgtctcctttctcctccactcctcgtcgcaggcggcataacggagcgcacgcacgcacgcaatggccatggccgccccgccacccacggctctctgcgcccgccgcttccggccccaccacttcgcatactcctcccccgccacgctccgcctacccacggcctcctcctcctcacagctccggcgccgccgccggctagccgtctccccgcgcgcggacgcggcgaccgggacgggggatgtggaggcgctcagggccggggtgtccgtgtacaagccgcggtcctacgacgtgctcgtcaccgacgcggctcgctccctcgcctgcgccatcgacgacggcaagacccggctcgagatcgaattcccnnctctgccaagcagcatctcttcttacaagggctcctcagatgagttcatcgatgccaacatccagcttgctctcgttgttgctaggaagctcaaagagctcaaggggactaggtcttgtatagtgtttcctgatcaacctgaaaaacgtagggcatcagagttgttcaagacagctatagacacgattgagggtgtaaccatcagctccctggatgatgtacccactgaccctgtcaacagcttcttcaaatcaataagaaacaccctggattttgacttctcagatgacaatgaaggtagatggaaatctgatgaaccaccatcgttatatatcttcatcaacagcagcacgcgtgaccttgcttctatagagaagaaaagttcgccacatctgttccagcccttctattcaatctcgaactagatacattgcgttctgacctggggcttctcgggttccccccaaaagatctgcactaccggttcctttctcaattcaccccagtattttatatcagacagcgtgactattccaaaacaatcgcagttgctccatacatagtgaattatagtggagctgtattccgccaatacccagccccctggcaggtcatgctgaagcaggctgatggttcctatgcatgtgtcgctgagagcgaagctcggttcactttgggacaggcgaaagaagaactattgagagttattggtttacaagaagaagagggaagctcccttgaatttctcagaagaggatacaagaatgctacctggtgggaagagaacgttgatcaggagacgtcgtctgcctggcgaacttgagatgctatacttgctggatggatgcttttctaacctggaactgggaatggataatttggccaacgagtgtccatgtcttgttgtatggaactaaaaaatctgaaattacagaaagagaagtccatgtacagcgtaataacattgcctgtgatgatcgtattattattattgttgttattattatgcgagtacacagagcttgtgagcactaagaatgtttttttacaatggtgatttgtacatttgttctgtttgtggccttgggcacttcagcttgaatgcgcagttgtaaaaaaaagcattggattggtttgagtattagaaattgttgaagtgtataagtggattgactaccttcttcca

SEQ ID NO: 49272 - DNA, 1608 bp, Zea Mays
  misc_feature (411)..(412): n is a, c, g, or t
cctgcgcctcgcggtagcgtgcggctgtgccgtcgacccgtcgtctcctttctcctccactcctcgtcgcaggcggcataacggagcgcacgcacgcacgcaatggccatggccgccccgccacccacggctctctgcgcccgccgcttccggccccaccacttcgcatactcctcccccgccacgctccgcctacccacggcctcctcctcctcacagctccggcgccgccgccggctagccgtctccccgcgcgcggacgcggcgaccgggacgggggatgtggaggcgctcagggccggggtgtccgtgtacaagccgcggtcctacgacgtgctcgtcaccgacgcggctcgctccctcgcctgcgccatcgacgacggcaagacccggctcgagatcgaattcccnnctctgccaagcagcatctcttcttacaagggctcctcagatgagttcatcgatgccaacatccagcttgctctcgttgttgctaggaagctcaaagagctcaaggggactaggtcttgtatattgatttcaggtgtttcctgatcaacctgaaaaacgtagggcatcagagttgttcaagacagctatagacacgattgagggtgtaaccatcagctccctggatgatgtacccactgaccctgtcaacagcttcttcaaatcaataagaaacaccctggattttgacttctcagatgacaatgaaggtagatggaaatctgatgaaccaccatcgttatatatcttcatcaacagcagcacgcgtgaccttgcttctatagagaagaaaagttcgccacatctgttccagcccttctattcaatctcgaactagatacattgcgttctgacctggggcttctcgggttccccccaaaagatctgcactaccggttcctttctcaattcaccccagtattttatatcagacagcgtgactattccaaaacaatcgcagttgctccatacatagtgaattatagtggagctgtattccgccaatacccagccccctggcaggtcatgctgaagcaggctgatggttcctatgcatgtgtcgctgagagcgaagctcggttcactttgggacaggcgaaagaagaactattgagagttattggtttacaagaagaagagggaagctcccttgaatttctcagaagaggatacaagaatgctacctggtgggaagagaacgttgatcaggagacgtcgtctgcctggcgaacttgagatgctatacttgctggatggatgcttttctaacctggaactgggaatggataatttggccaacgagtgtccatgtcttgttgtatggaactaaaaaatctgaaattacagaaagagaagtccatgtacagcgtaataacattgcctgtgatgatcgtattattattattgttgttattattatgcgagtacacagagcttgtgagcactaagaatgtttttttacaatggtgatttgtacatttgttctgtttgtggccttgggcacttcagcttgaatgcgcagttgtaaaaaaaagcattggattggtttgagtattagaaattgttgaagtgtataagtggattgactaccttcttcca

SEQ ID NO: 49273 - DNA, 1988 bp, Zea Mays
  misc_feature (411)..(412): n is a, c, g, or t
cctgcgcctcgcggtagcgtgcggctgtgccgtcgacccgtcgtctcctttctcctccactcctcgtcgcaggcggcataacggagcgcacgcacgcacgcaatggccatggccgccccgccacccacggctctctgcgcccgccgcttccggccccaccacttcgcatactcctcccccgccacgctccgcctacccacggcctcctcctcctcacagctccggcgccgccgccggctagccgtctccccgcgcgcggacgcggcgaccgggacgggggatgtggaggcgctcagggccggggtgtccgtgtacaagccgcggtcctacgacgtgctcgtcaccgacgcggctcgctccctcgcctgcgccatcgacgacggcaagacccggctcgagatcgaattcccnnctctgccaagcagcatctcttcttacaagggctcctcagatgagttcatcgatgccaacatccagcttgctctcgttgttgctaggaagctcaaagagctcaaggggactaggtcttgtatagtgtttcctgatcaacctgaaaaacgtagggcatcagagttgttcaagacagctatagacacgattgagggtgtaaccatcagctccctggatgatgtacccactgaccctgtcaacagcttcttcaaatcaataagaaacaccctggattttgacttctcagatgacaatgaagatggaaatctgatgaaccaccatcgttatatatcttcatcaacagcagcacgcgtgaccttgcttctatagagaagtatgtggaaaagttcgccacatctgttccagcccttctattcaatctcgaactagatacattgcgttctgacctggggcttctcgggttccccccaaaagatctgcactaccggttcctttctcaattcaccccagtattttatatcagacagcgtgactattccaaagtattcatctgtcttacttttatccatctagaaacatccttgtgtttatagcttcttgcaccatctatgactactttcccttaaccgtgtagacaatcgcagttgctccatacatagtgaattatagtggagctgtattccgccaatacccaggtaaatgttggtgggtttatttcgatttcttcacttgaaaagattacagtgctgggtatggaatagaagatcaaagtaaataattatgcaaagtcaatcatttggttgggaatctcatccctatttatcagcaccggcagctacttatctactgggttactatttgttcagccccctggcaggtcatgctgaagcaggctgatggttcctatgcatgtgtcgctgagagcgaagctcggttcactttgggacaggcgaaagaagaactattgagagttattggtttacaagaagaagagggaagctcccttgaatttctcagaagaggatacaaggttcatcccatcctagctaaacagttggctgcagcttcaaagcgcctacttgcataaactacatttcactatagcacatcatggagacatcatgagctatagtaaccgagtttctgtgatgcagaatgctacctggtgggaagagaacgttgatcaggagacgtcgtctgcctggcgaacttgagatgctatacttgctggatggatgcttttctaacctggaactgggaatggataatttggccaacgagtgtccatgtcttgttgtatggaactaaaaaatctgaaattacagaaagagaagtccatgtacagcgtaataacattgcctgtgatgatcgtattattattattgttgttattattatgcgagtacacagagcttgtgagcactaagaatgtttttttacaatggtgatttgtacatttgttctgtttgtggccttgggcacttcagcttgaatgcgcagttgtaaaaaaaagcattggattggtttgagtattagaaattgttgaagtgtataagtggattgactaccttcttcca

SEQ ID NO: 49274 - DNA, 1227 bp, Zea Mays
aagcagaccactttaaatcttaaagatacaattgataagactgataggtctaaacttctcaagggctcctcagatgagttcatcgatgccaacatccagcttgctctcgttgttgctaggaagctcaaagagctcaaggggactaggtcttgtatagtgtttcctgatcaacctgaaaaacgtagggcatcagagttgttcaagacagctatagacacgattgagggtgtaaccatcagctccctggatgatgtacccactgaccctgtcaacagcttcttcaaatcaataagaaacaccctggattttgacttctcagatgacaatgaaggtagatggaaatctgatgaaccaccatcgttatatatcttcatcaacagcagcacgcgtgaccttgcttctatagagaagtatgtggaaaagttcgccacatctgttccagcccttctattcaatctcgaactagatacattgcgttctgacctggggcttctcgggttccccccaaaagatctgcactaccggttcctttctcaattcaccccagtattttatatcagacagcgtgactattccaaaacaatcgcagttgctccatacatagtgaattatagtggagctgtattccgccaatacccagccccctggcaggtcatgctgaagcaggctgatggttcctatgcatgtgtcgctgagagcgaagctcggttcactttgggacaggcgaaagaagaactattgagagttattggtttacaagaagaagagggaagctcccttgaatttctcagaagaggatacaagaatgctacctggtgggaagagaacgttgatcaggagacgtcgtctgcctggcgaacttgagatgctatacttgctggatggatgcttttctaacctggaactgggaatggataatttggccaacgagtgtccatgtcttgttgtatggaactaaaaaatctgaaattacagaaagagaagtccatgtacagcgtaataacattgcctgtgatgatcgtattattattattgttgttattattatgcgagtacacagagcttgtgagcactaagaatgtttttttacaatggtgatttgtacatttgttctgtttgtggccttgggcacttcagcttgaatgcgcagttgtaaaaaaaagcattggattggtttgagtattagaaattgttgaagtgtataagtggattgactaccttcttcca

SEQ ID NO: 49275 - DNA, 1346 bp, Zea Mays
ctttagggatcaaagttatcattgcataattcagtctatccaagttcaggtcatcagtaggtcaccctcttcaaattttctaacaagggctcctcagatgagttcatcgatgccaacatccagcttgctctcgttgttgctaggaagctcaaagagctcaaggggactaggtcttgtatattgatttcaggtgtttcctgatcaacctgaaaaacgtagggcatcagagttgttcaagacagctatagacacgattgagggtgtaaccatcagctccctggatgatgtacccactgaccctgtcaacagcttcttcaaatcaataagaaacaccctggattttgacttctcagatgacaatgaaggtagatggaaatctgatgaaccaccatcgttatatatcttcatcaacagcagcacgcgtgaccttgcttctatagagaagaaaagttcgccacatctgttccagcccttctattcaatctcgaactagatacattgcgttctgacctggggcttctcgggttccccccaaaagatctgcactaccggttcctttctcaattcaccccagtattttatatcagacagcgtgactattccaaagtattcatctgtcttacttttatccatctagaaacatccttgtgtttatagcttcttgcaccatctatgactactttcccttaaccgtgtagacaatcgcagttgctccatacatagtgaattatagtggagctgtattccgccaatacccagccccctggcaggtcatgctgaagcaggctgatggttcctatgcatgtgtcgctgagagcgaagctcggttcactttgggacaggcgaaagaagaactattgagagttattggtttacaagaagaagagggaagctcccttgaatttctcagaagaggatacaagaatgctacctggtgggaagagaacgttgatcaggagacgtcgtctgcctggcgaacttgagatgctatacttgctggatggatgcttttctaacctggaactgggaatggataatttggccaacgagtgtccatgtcttgttgtatggaactaaaaaatctgaaattacagaaagagaagtccatgtacagcgtaataacattgcctgtgatgatcgtattattattattgttgttattattatgcgagtacacagagcttgtgagcactaagaatgtttttttacaatggtgatttgtacatttgttctgtttgtggccttgggcacttcagcttgaatgcgcagttgtaaaaaaaagcattggattggtttgagtattagaaattgttgaagtgtataagtggattgactaccttcttcca

SEQ ID NO: 49276 - DNA, 1219 bp, Zea Mays
agtctatccaagttcaggtcatcagtaggtcaccctcttcaaattttctaacaagggctcctcagatgagttcatcgatgccaacatccagcttgctctcgttgttgctaggaagctcaaagagctcaaggggactaggtcttgtatagtgtttcctgatcaacctgaaaaacgtagggcatcagagttgttcaagacagctatagacacgattgagggtgtaaccatcagctccctggatgatgtacccactgaccctgtcaacagcttcttcaaatcaataagaaacaccctggattttgacttctcagatgacaatgaaggtagatggaaatctgatgaaccaccatcgttatatatcttcatcaacagcagcacgcgtgaccttgcttctatagagaagtatgtggaaaagttcgccacatctgttccagcccttctattcaatctcgaactagatacattgcgttctgacctggggcttctcgggttccccccaaaagatctgcactaccggttcctttctcaattcaccccagtattttatatcagacagcgtgactattccaaaacaatcgcagttgctccatacatagtgaattatagtggagctgtattccgccaatacccagccccctggcaggtcatgctgaagcaggctgatggttcctatgcatgtgtcgctgagagcgaagctcggttcactttgggacaggcgaaagaagaactattgagagttattggtttacaagaagaagagggaagctcccttgaatttctcagaagaggatacaagaatgctacctggtgggaagagaacgttgatcaggagacgtcgtctgcctggcgaacttgagatgctatacttgctggatggatgcttttctaacctggaactgggaatggataatttggccaacgagtgtccatgtcttgttgtatggaactaaaaaatctgaaattacagaaagagaagtccatgtacagcgtaataacattgcctgtgatgatcgtattattattattgttgttattattatgcgagtacacagagcttgtgagcactaagaatgtttttttacaatggtgatttgtacatttgttctgtttgtggccttgggcacttcagcttgaatgcgcagttgtaaaaaaaagcattggattggtttgagtattagaaattgttgaagtgtataagtggattgactaccttcttcca

SEQ ID NO: 49277 - DNA, 1304 bp, Zea Mays
gtcatcagtaggtcaccctcttcaaattttctaacaagggctcctcagatgagttcatcgatgccaacatccagcttgctctcgttgttgctaggaagctcaaagagctcaaggggactaggtcttgtatattgatttcaggtgtttcctgatcaacctgaaaaacgtagggcatcagagttgttcaagacagctatagacacgattgagggtgtaaccatcagctccctggatgatgtacccactgaccctgtcaacagcttcttcaaatcaataagaaacaccctggattttgacttctcagatgacaatgaaggtagatggaaatctgatgaaccaccatcgttatatatcttcatcaacagcagcacgcgtgaccttgcttctatagagaagtatgtggaaaagttcgccacatctgttccagcccttctattcaatctcgaactagatacattgcgttctgacctggggcttctcgggttccccccaaaagatctgcactaccggttcctttctcaattcaccccagtattttatatcagacagcgtgactattccaaagtattcatctgtcttacttttatccatctagaaacatccttgtgtttatagcttcttgcaccatctatgactactttcccttaaccgtgtagacaatcgcagttgctccatacatagtgaattatagtggagctgtattccgccaatacccagccccctggcaggtcatgctgaagcaggctgatggttcctatgcatgtgtcgctgagagcgaagctcggttcactttgggacaggcgaaagaagaactattgagagttattggtttacaagaagaagagggaagctcccttgaatttctcagaagaggatacaagaatgctacctggtgggaagagaacgttgatcaggagacgtcgtctgcctggcgaacttgagatgctatacttgctggatggatgcttttctaacctggaactgggaatggataatttggccaacgagtgtccatgtcttgttgtatggaactaaaaaatctgaaattacagaaagagaagtccatgtacagcgtaataacattgcctgtgatgatcgtattattattattgttgttattattatgcgagtacacagagcttgtgagcactaagaatgtttttttacaatggtgatttgtacatttgttctgtttgtggccttgggcacttcagcttgaatgcgcagttgtaaaaaaaagcattggattggtttgagtattagaaattgttgaagtgtataagtggattgactaccttcttcca

SEQ ID NO: 49278 - DNA, 2043 bp, Zea Mays
gatttcctttccatcaactccccccgttcccctcctcccctttccattttaccttctcgcccgtccccgaattcttccacctcccatcccgtgcagccggcctcaccgccggcgacgggacgcggagacccgggctgccggtaccgtcagccgtgctccttcctctcttcgtcgcccccgccaaaaccttcatctgccggggctgcaccggcggcgcggggacaacaaaagctcgagatccggtgactgatctcttcgttcctcggttcactttgatattccaacaaaggtcacattgctagactcccagattggttcctaacaatgagggcacatgaacgagctgccagtttggctcttgcctgtctgagcttggctccacttctggttaacgtaaacccaaatgtgaatgtggtattgacagcatgccttactgtctatgtgggttgctaccgatctgtgaagccaactccaccttctgagaccatgtccaaggagcatgctatgcggttccctttagttggaagcgctatgcttttatcactgttccttctattcaagtttctctcaaaagatttggtcaacgctgtgctcactgcctactttttcattctaggcattgttgctctctccgcaacactgcttccttctataaaacgttttcttccaaaagagtggaatgataatctcatcgtctggcgggctccattcttccactcactctcggtggagttcacaaagtcccagattattgcctcaatacctggatttttcttttgcttgtggtatgcgtcaaagaagcattggcttgcaaacaatgtcctgggattggctttctgtattcaggggattgagatgctgtcattgggatcatttaaaactggagccattctcttgggtggactttttgtgtatgacattttctgggtgttcttcactccagttatggtcagtgtggctaaatctttcgatgctccaataaagcttctgtttccaactgcagacgctgaacggccattctccatgcttggccttggtgacattgtaatacctgtaatatcagcctctgtaggagtgtcaagcgtcaactttgttctacatgattaaattatgggcgtgttcggctggctacaagccgacactgttgcagctgtttggactgctgcagctgcaatccatagagagaaaaatactgtagaagccgcagccgcagccggattgcagccgcagcaagccgcagcgaacaagctgtatatgtaccaaactgctacatattggaacattcttagaatgtctataagaagcatttactgatatgctgtatagagctcttgcttttgttgattcatggttacttttggtatctatgtattctttgtagcactcaacagagaatcaaatgttgtaactagaattcgtcccactggattgagatcatgctctgcaccatattgttaggtccatgctcagatatacttttaggccatcccatcttgttgcatgcaatgcagcctaaagttattggcaatacaaccaatatgtgtgtccattcctggtccctggaggaccacacaatagtgtatcaacagaaaacaatttgtaatttctactgattcaagttgcatatcattccagagcttctcagcagacaatctcagccccctagtttaagtctacgtcctcaggggcgccctttacttggttgagatctaaccaatacaaaactgtgatatttgaatctgaatttaggcagtttccgagtcattgagcacgtaatatgttatgtgtacttttgcttgcaggtatattcgtcgcacttgccttgcgctttgatgtctcaagaggtaccaagaagcgttacttcaacagtgcatttttgggatacgctgtgggtatgacggtgaccatcgttgtaatgaactggtttcaagcggcacagcctgctctactataccttgttcctggtgtgattggttttgtcgctgttccctgtctgtggtatggagaagtgaaacaggaaaatgatttcatggtaaaagtaaa

SEQ ID NO: 49279 - DNA, 2177 bp, Zea Mays
ccttgatgcacttgtgggtttcagtgttcactttgatattccaacaaaggtcacattgctagactcccagattggttcctaacaatgagggcacatgaacgagctgccagtttggctcttgcctgtctgagcttggctccacttctggttaacgtaaacccaaatgtgaatgtggtattgacagcatgccttactgtctatgtgggttgctaccgatctgtgaagccaactccaccttctgagaccatgtccaaggagcatgctatgcggttccctttagttggaagcgctatgcttttatcactgttccttctattcaagtttctctcaaaagatttggtcaacgctgtgctcactgcctactttttcattctaggcattgttgctctctccgcaacactgcttccttctataaaacgttttcttccaaaagagtggaatgataatctcatcgtctggcgggctccattcttccactcactctcggtggagttcacaaagtcccagattattgcctcaatacctggatttttcttttgcttgtggtatgcgtcaaagaagcattggcttgcaaacaatgtcctgggattggctttctgtattcaggggattgagatgctgtcattgggatcatttaaaactggagccattctcttgggtggactttttgtgtatgacattttctgggtgttcttcactccagttatggtcagtgtggctaaatctttcgatgctccaataaagcttctgtttccaactgcagacgctgaacggccattctccatgcttggccttggtgacattgtaatacctgtaatatcagcctctgtaggagtgtcaagcgtcaactttgttctacatgattaaattatgggcgtgttcggctggctacaagccgacactgttgcagctgtttggactgctgcagctgcaatccatagagagaaaaatactgtagaagccgcagccgcagccggattgcagccgcagcaagccgcagcgaacaagctgtatatgtaccaaactgctacatattggaacattcttagaatgtctataagaagcatttactgatatgctgtatagagctcttgcttttgttgattcatggttacttttggtatctatgtattctttgtagcactcaacagagaatcaaatgttgtaactagaattcgtcccactggattgagatcatgctctgcaccatattgttaggtccatgctcagatatacttttaggccatcccatcttgttgcatgcaatgcagcctaaagttattggcaatacaaccaatatgtgtgtccattcctggtccctggaggaccacacaatagtgtatcaacagaaaacaatttgtaatttctactgattcaagttgcatatcattccagagcttctcagcagacaatctcagccccctagtttaagtctacgtcctcaggggcgccctttacttggttgagatctaaccaatacaaaactgtgatatttgaatctgaatttaggcagtttccgagtcattgagcacgtaatatgttatgtgtacttttgcttgcaggtatattcgtcgcacttgccttgcgctttgatgtctcaagaggtaccaagaagcgttacttcaacagtgcatttttgggatacgctgtgggtatgacggtgaccatcgttgtaatgaactggtttcaagcggcacagcctgctctactataccttgttcctggtgtgattggttttgtcgctgttccctgtctgtggtatggagaagtgaaacagctactggagtttgacgagtcaaaaactgagtcagaggaaggcagtacagaagaggagcaagatgatgatagttccaaaggcaacaaaaaggtagagtagcaggatttagttccggaggtaaaaggacaggaaaacagttttcgtgtaatgtcgtctggcagctaaaaaaacgggcctgatgaccctctaataccggattcgctcgccttacttaagaacttagaagaaatggttcagcatgatacaagttttattttattttttgtttcgttttgcggattatttgccctgggctgttacttgcgatgtactccctgattcgttgaattcaccagaactgagacttgaccgacgcatatattcatcacgtatacacgcacatgtgtgtgttgttgccaaa

SEQ ID NO: 49280 - DNA, 435 bp, Zea Mays
caggcaccttatggacctttcatttgtacatttggctactggagtttgacgagtcaaaaactgagtcagaggaaggcagtacagaagaggagcaagatgatgatagttccaaaggcaacaaaaaggtagagtagcaggatttagttccggaggtaaaaggacaggaaaacagttttcgtgtaatgtcgtctggcagctaaaaaaacgggcctgatgaccctctaataccggattcgctcgccttacttaagaacttagaagaaatggttcagcatgatacaagttttattttattttttgtttcgttttgcggattatttgccctgggctgttacttgcgatgtactccctgattcgttgaattcaccagaactgagacttgaccgacgcatatattcatcacgtatacacgcacatgtgtgtgttgttgccaaa

SEQ ID NO: 49281 - DNA, 3684 bp, Zea Mays
ctttcctattaataatcctgaatgacctgagaaacaaaacatgcgccgccgcatcctggggtcttgacgggggagtcaagccgcggcacgctcccagaccctccggagacgaccaagatttcctctttctgggacgggagcacgagcaccatcgccaaccgatacggttcacacactcattgaaaatttgctaacttctgcataagtttgtagcagcctctgaaacatttcaaccaaaatgaagatagcttttctcatgtcgttggttctgtccctgtttctcctccctaatgggatctgcaaaagcttagttgcaaggccttcggtcgtgaatattgggtctatacttcggttgaactccaccattggaggtgtttcagatgttgccatccgtgcagcagtggaggatatcaactcagatccaacagttctaaatggaacaacgttacatgttgaaacgagagatacaaactgtaatgacggttttcttggcatggttcaagctttgcagttcatggagactgatgttattgcaatcattgggccacaatgctctgctattgcacatatcatttcatatgtcgcaaatgagctccaagttcctttgatgtcctttgcatcagatgcaactctatcatcaattcagttcccattcttcgtgcggactatgcccagcgatctctaccaaatggcagctgtggctgcagttgttgattactatcaatggaagatagtgactgccatatacgttgatgatgattatggtcgaaacggcattgctgctttggatgatgaacttactgcaaggcgctgcaaaatttcgtacaagactgggttccgttccaatgctaaaaaaagtgagcttctaagtctattggttactgttagtaatatggagtctcgtgttattattcttcatactggttcggaacctggactcaagcttctgtcacttgctaatggactaaacatgatgggcaatggctatgtatggattgcgactgattggctttctgcttatctcgatgctaattcatcggtctctgctgaaactgtaaatggcatgcaaggtgttctgactgtacgtccacacacccctaagtcaaatatgaagagaaatctggtgtccaagtggagcagcttaagcaagaaatacaaccacagtgatcttcgcaccagtgcttatggtttttatgtttatgatagtgtgtggactgtagctcgggccctggatgccttctttgatgatggtgggaggatttcctttacaaatgactcaaggttgcgtgacgtaaccgggggaactcttcaccttgaagccatgagtgtttttgacatgggaaacaaattattggataagatcagaaatgtgaacttcgctggggtgtctggccaagtgcaatttaatgctcagtttgaactcattcatcctgcctatgatatcataagcataattgggaatggcatgcggaccattggtttttggtcaaactatacaagattgctatcaaccacccctccagaagacctatattcgaagcctcctaatacttctcttgccaatcaacagctctatgatgtcatttggcctggtgagactgcacaaaagcctcgaggttgggcctttccttacaatgccaaggagttaaaaattggtgtccctaacagatttagctttaaagagtttgttagcaaagataatggtactgggtcaatgaagggctattgcatcgatgtcttcacccaagcattgacactgcttccttatccagttacatacaggtttataccttttggcaatggtactgaaaaccctcactttgaccaacttgcacagatggttgcggacaacgattttgatgcagcgataggggatatcgaaattacaatgagccgaactaaaattgttgatttcacccagcccttcattgagtcaggcctggttatcttggctccaatcaaaaagcacataacaaattcttgggcattcttgcagccatttacattggggatgtggtgtgttacagggttgtcttttcttgttgtgggtgtggttatttggattcttgagcatcgaataaatgatgattttcgtggctcgccgtggcaacaattaataactattgtttggttcagtttttcgactctattttttgcacatagagaaaagactatgagtaccttaggacgtggcgttttgatcatatggctatttgttgtattgataattcaatcaagctacactgcaagtcttacttccatcctaaccgtgcaacaacttgatacttctattagaggacttgatgacctgaaacatagtgattatcctattggtttccaagttggttcttttgtcaaagaatacatgatcaaggaactgaacatctcacagtcaaggctaaaagctcttggttctcctgaagaatatgctgaaaacctcaagctaggccccaagaaaggaggtgttatggccattgttgatgagcgcccctatgttgagctgtttttgtcaacttactgcaagattgctgttgctggtcaagatttcaccagtggcggatggggctttgcatttccaagggattcccctctgcaagtagacctgtccaccgcgatcctaacactgtcggaggatggggaactgcagcggatccatgacaagtggctcaagacaggcgattgttcatctgacaacactgagtttgtggactcgaaccagctccgccttgagagcttcatgggcctgttcctcatttgtggcgcagcatgtgtcctcgccctgctcatttactttggcatcacgctgcgccagtacctgagacatgagcagccgggatcagcaatctccgcggactcaggatcatcgacatcgaagcgcagtctcagaaaattcatttcgttcgtcgatgaaaggcaacgatcaccaaagaaaaacggaccatgagcctctcaaggagttcaatgccaacaacgccgatgagtaaccgtcctggtactggtattgatatagaaagctagtgcttgacctggaatacatcatctatgggccaatgatccttagtagccaggttcccggattgatggggttgaggaatgggaacgtggtacagtacttgaaaaagattgtaacactacggggacgagattgttcctgcgttttcggaacggaacaaatgtttccggaatgaggaacgtggacacgttcccggtttgtaagggccaatctatgcgtccttatatataggaaattagagccaaaagtctgtgtagtggattgtaatagtcgttttttgcgccccgaccgcccaaggaatccgagtttggcaaaactgtcaaattgtaaagtcaacccttgtccacgaataatgatggtcttatgaatggaatatatgtttgtttcaattgatttgttctttcagatttctctcgtcatgcttgcgatgtatcttctggccaccatgaactatttcacatgttaatttttttctcaaacacattggtttcacaaggtaagtttaacttactatatattattgccaaggtgatgcggcaaattgtacctgattcctgtgtgttaattctgatattcctcctgtagaaccatgagaattaagataagatgtttctgtgtagctttatgggttcgctgttgggttgctgcctgggaaagaacagaagcgggat

SEQ ID NO: 49282 - DNA, 2032 bp, Zea Mays
ccgaattgcggatcgaaccaagcgtccagctgcacaaagatgagtacaacaaaaatcaacattttgaaatgaagtcttgaatgttaggattaaccctatcccgattactgttaagatacaatgaagtccacttcagaatatatctttatgctttctcggggagctatttcttgaaagagttgcaaacagacagcgagagcatcgtcgataatgcacgctgagtttgtagctacatatgaggcaactggacaagcgatatggataaagaaattcgtaccagattaagagtggttgatagcataaagcgaccactgagaatttactacgacgacgagccagcggtatttttctcccataacaataagtcaagtggctctgccaagtatattgacattaagtgttatattgttaaggagacgattttggatcacaccattcaagttgagcatataagaacccatcagatgcttgtggatccgctcacaaaaggtctcccacccaacgtgtttagtaagcacgcagctggcatgagattaagggagtacctatgatcctgaatcacaggggctacaaattgcaacatagtaaaatctttcgttctgaagtaggggagcatgttgtagttaatgagtgcggtgatacttaatagaacattgtcacacattggtctctatgtgtaaacttgttaaaggatggaattaataaaagtttgagtgtgaggtatgtagagaacaaaggggagattgttaggatgtgtcctttacactagtcggttaacagtaaccggggtagggttaatcctaaccgtctaaccgcgcccctgatcgggaaccaatctcctcgccacacgcagggagatcgagaaggaggaggaggcgggtcttcgctgcaagacgtcgccgcaattatggctaggaacaacaacgacgatatgtatacctatacccctcagtagaatagatctactcatcatcgaggtattttagacatggattggtattctagtgacttaggaatcgatcctagcactaaagaatgtaaccatggtatcggagtcatcctaagaaccctatatctcctaatccgcatcggttttatgagatcacaaaaaggtctcggatcaatgtgattgaacttatttttttatcatcgttcatcacctgagaacaaaaagattagaatagacagaaagagttttaaatctcttgggttagggtttacctaaccataaatctagggttttcggccactgagagacttggtcttggccacacccatggaatccgagatagtaaaaatagatcgacgttttagggttagggtttaaaaacctaaccctactcggtttttaaatcgagtcacagagaccacacaagcctcgggatccaacaatccacggcctagaaacagtcaataagaaatagaaatcgcgcagatctggttagggtttttgaaccctaaccgaaaaaatccccaaaagtgcacaaatgcactgaccgaatcaaagaaaataacagatatatcgcgggggccggatctacgagtctctacctccaaaactcgttcccgttacaaaatatccatatcatacattcattcatcacagtaagggattcgagtacacgaggactagatccgagttcaaaagttaaacacggtcatgaggccgactcaatttttttctctcgacccgtcgtgctcggactaccatcagatcccggccgacagcagctcacccgcccgaagggatgagctcgctggcggcaaggtctgcggagtaccgtgctcatggagttttggccgttcagtgcacagtgtcggccgaacatggagacaggagagctcgcagagagagaagtaaagaaaagagagagagagcacagagcaagcccaaggtcgcggccggctaggagcagatgctctctagcggtcggtgtttcttgtgcggcagaaaaaatgaacaaagagtgaggggagtcggccatgcagcgccaatactccctggcgggtcagttctgtttggtgctgcaag

SEQ ID NO: 49283 - DNA, 1922 bp, Zea Mays
ctagagatttccatcgcacacctctctagtctccatctgtcgggacgccgcatctcgctttctaccagttgctttgtctcgctttcatcctctccgcgtcacttgggtttcgtcagcgtcaagtactccgcttccgcccgaagacttcgccttctcttggcttgctcaccggctacgtctctttgatcctattgcttcggtgcgtggagattgagatctaaacgacaactattttcttttggttaaccggttcgcaagaagtgcagatgcacatctggttccaaatttgtgcttcgatcgtatctagctgccagcttggtcgtcgacacgtttatttccatagttgtgctcccattcttgcttcgccgattgtttcgttttggtgcacagctgatctcgtttgtgtcaaatgcataaggttgtctcaggtcggagatttccagttgtgctcattgcgaccaagacgaagaagacgacgacgatccgtccacgacgaccgtctcctccacgggcgtattgacgccacaacccgctatgggtaccttgagttggccatcgagcagatggcagagaccgcagatgctagcaacgcacttgaccatgggcttcactaccttcggtcaaccggcaatgcatgtgcggcgagggcgctgttatggtggggatgggataactctgatgctcacgctggtatggccacttccgtcgaactttccttgttcttgcctccttcggtgaacttcctcggttcttgcctccttcggcaacttcatgtactcacggccgatgttgccgccacacaccgtctcttgtgctcctcctccggcgaacatccactgctcgaaccaccatggcgctcagctacagggcgtcatgacagcagctccccaagcgatgcaagccgcctgttcgacgaaatgtgtgagaagcaaaatgaacatgcccgcgtgttaggtcctttatgtgacccaaataactgaatttcagctaagcaccagagctaatatctctaatcagcttccatgggtgaggcaattaacacttactccaatttgttcttccttcacggtgctacttaattcaacacgttcttcgttgcaatgattacagttacacttggtttatcaccattgctttcagcttgacaaagccttatctttgctacatacttaattaatgcttcaaagcactgacaattccaaatgacaggtacaagcttagtttcattgtcactgatggaacatgtgaagcagagttcttttgttttgatagcatagccagaaaaatagtaggaaaaccttgtaacaaccttgttacagcagttacaacttctcaaggtcccctagcagacctagccgatgttatgtgactgaaatttacccttgcagttgccatcaatatgccagcctactctatcacaaacagtcttctctattctgtctattttgacaaatcatgtaagacatgccttcatgccatctaacatgtctaaccatcctgaagagttgtatacacaagatgaagtacctagccttccggtcacacaaaactctccaacaacatctttggcgaaactatctacctgtagcaacgaaagaaacgagggtgatgaccaacgtacaagtgaactcaacaagcaagatttatcatcaccaccgaaaaggtatttgctttttgtgcacctatcaggatcaccatcacttttggaccatgaatgcttcagcttttagcctatttgtggatctatacatatggacttaacacctgcaagcacactgttgctaggtcttgatgtacggtggttgaatgctacttactatatattttttattgtagtctaaattaactctacaactgatatcaactattagagaaaaacaatgttatatgcttatatttggttctgtgcctgcgcattctat

SEQ ID NO: 49284 - DNA, 1327 bp, Zea Mays
gcgtgttaggtcctttatgtgacccaaataactgaatttcagctaagcaccagagctaatatctctaatcagcttccatgggtgaggcaattaacacttactccaatttgttcttccttcacggtgctacttaattcaacacgttcttcgttgcaatgattacagttacacttggtttatcaccattgctttcagcttgacaaagccttatctttgctacatacttaattaatgcttcaaagcactgacaattccaaatgacaggtacaagcttagtttcattgtcactgatggaacatgtgaagcagagttcttttgttttgatagcatagccagaaaaatagtaggaaaaccttgtaacaaccttgttacagcagttacaacttctcaaggtcccctagcagacctagccgatgttatgtgactgaaatttacccttgcagttgccatcaatatgccagcctactctatcacaaacagtcttctctattctgtctattttgacaaatcatgtaagacatgccttcatgccatctaacatgtctaaccatcctgaagagttgtatacacaagatgaagtacctagccttccggtcacacaaaactctccaacaacatctttggcgaaactatctacctgtagcaacgaaagaaacgaggtacgaaacttcttgttttcttgccatgtacaacctattagaaacatcttatttttttcatgcatataacttgataaagtctattcaactggcgctatgcgttctaacatatttagatatgctacagtacataaagatacctttagtactactaaattctaaacttccatacactcacatagttatgtatctattgcattctaataccacaaatataaattaatacagacaaaactcactagcaacaaatttttagtttataaaataaataaataaataaatgaagacaaaatggacttccactttgtcatagcaaactagattcacagattttatgcatttaaccatagggtgatgaccaacgtacaagtgaactcaacaagcaagatttatcatcaccaccgaaaaggtatttgctttttgtgcacctatcaggatcaccatcacttttggaccatgaatgcttcagcttttagcctatttgtggatctatacatatggacttaacacctgcaagcacactgttgctaggtcttgatgtacggtggttgaatgctacttactatatattttttattgtagtctaaattaactctacaactgatatcaactattagagaaaaacaatgttatatgcttatatttggttctgtgcctgcgcattctat

SEQ ID NO: 49285 - DNA, 1789 bp, Zea Mays
gagaaaaaggacagctgaaactgggctccgtcccgcggtcccgccggtctagggtaggccagccacatgcaggcaggcaggcaggcaaggcaactgaaacggggcgctccgtttcttctctcctttctcgagagagaacctagagagaacccgggatggggaacatctgcggcggctgcgggaaggacagggtcgccgaggatttcaggccgtctagcccagggacgacaatgacctccaagacgagcggcagcataaccaccaccagtcagagcaccacggggaagctctcctccgtgggcagcagcttcatggcgtccgccggcagccgcagcaccagcggcggattcgacgagggggccaagtaccccgacggaggccagatcctggaggcgcccaacctccgtaccttcacattcatggagctcaagacggccaccaagaacttcaggctcgacagcgtcctcggcgaaggcgggttcgggacagtctacaaagggtgggtggacgagaagaccatgaccccgaccaggaacggcaccggcatggttgttgccgtcaagaagctcaactcggagagcatgcaggggtacgaggaatggcagtcggagataaattttctaggaaggctctcccatccgaacctagtgaagctcttgggctactgctgggaggacagagaactgcttctcgtgtatgaattcatggccaaagggagcttggaaaaccatctattcaggagaggatgcgccccgttgtcttgggaactgaggctgaagatagccatcggcgcagctcgaggactcgcattcttgcatgcatcagaaaagcaagtgatctaccgtgacttcaaggcgtccaacatacttttagatgcgaactataacgctaagctctctgattttggccttgctaaacttgggccgactggtagcaagtcacatatcacaaccagggtgatgggaacgtatggctatgcagctccagagtacgtagcaaccggccatttgtacgtgaagagcgacgtgtacggcttcggcgtggtgatgctggagatgctgtccgggcagcgcgcgctggacccgaaccggccgaacgggcagctgagcctggccgactgggcgaagccgttcctggccgaccgccggaggctggcccggctcatggacccgcggttcgaggggcagtacaactcgaagcaggcgttccaggcggcgcagctgacgctcaactgcctggccggcgagccccgcagccggccgtcgatgaaggaggtggtggagacgctggagcagatcgagtcggtgaagagcagggcgcgggaggcgcgcggcggctcgtcgcgggaccggcaccacggccgcgccggcgcgacgcaccagcggtcgccgcgcgccggtggcgagccgcgcggccgcggtgggtcccgggccgccgccaacggccacgccgccagggccgccgcgcggtgacgcgtccagacgatgacgattcttcatgtaaatggcgttttttttttgcctaatctgtgtgcctctccttctgcttgtggtgtttgtcatggctcacgaggttgttcttgcccaatcattgatgagatgtattattattataagattaattagcagtgaatttgagaagggatgggtgttgttgcaagttgtagccagtagtgcaatgcaatagtagaagaaaggatcaatcatccagaatctgtaattattctaaatcaaattgtattttggaatagagggagtagttatcagagataaacaagaacatgagaaaa

SEQ ID NO: 49286 - DNA, 2293 bp, Zea Mays
aactgggaaagatgctcctccccactctccgtcctgctccggcaagaggcggcacaccgcgcaaggatgccacctagggctgctccggcgctgcgggtgctcccgctcgcgctcgcagcggccatcttctcggggctcaccgccatcctcttctacctctccggcgtctcctcctcacatagcggctctcggctctcggaggcggacctggcggcgctcgccgcgctgcggggtggcttcagcaagtgcgtggtatggtcttgctcgtatgcctccctctgggctgattacggttcgatttgccttactggtgttcctgctcatctcgtgccgcattgtcgttttcgcctctgggtatgggggcactacttcgtcacaaccacgagctgtggcggattgggaacgtggttgcctcgagattcttggttccgtgcgccaattgttccgagtccgaggttcactgtttagtgtaggaggtagcactgtgacagtgaggtctttgttctggcgtgaaataagatttcatggattgtagcgtatctgtagttgaattggatgacagtggctgcatagatttgcagtgtcagcagcttcaggatcttctttgctgtcttggttcagacagacaaacctcacttgcttaaaagtaactgcaggatgcaaatgggctaggactgaaagccgtgaccggggaggactactgtcgtgttgtgatacaatacccaagtgacacagtttctaagtggagagatccaatcacccataaggctgaaagtctgtcgtttgagttcaatctgtgtgaagctgtggcctcatgggagcacgtccggaacagtacaacagtactcacaaaggagtacattgatgctttgccaaatggctgggaggaatatgcatggagaagaatcaacaaaggaatccttctgaataagtgccagaacagaagcctctgcatggaaaagctctcactagttctacctgagacatcaccatacgttcctcgccactttggtcgatgtgctgttgttgggaactcaggtgatcttctcaaaactaaatttggggatgaaattgattcttatgatgctgtcttcagagaaaatggtgcacccacccagaattacactgaatatgttggtagaaagagtacatttcgccttctgaatagaggatccgcaaaggcactagataaagttgttgagttagatgaaacaaaaaaagaggcactgatcgttaagacgacaatacatgatatcatgaaccaaatgattcgggaacttccaataaccaatccagtatacctcatgctaggcacatcatttggttcctcagctaaaggaaccgggcttaaagctcttgaatttgccctctccatctgtgacagtgttgatatgtatggcttcaccgtagacccaggttacaaggaatggacaaggtacttctcagaggtaagaaagggacacactccactacatggtagagcatattatcagatgatggaatgtcttggtctggtgaaaatccattcaccgatgcgaggagatcctggcaggacagtgaggtggctgcctaccaaggctaccatcgaggctgctagagttgcttccgagaagttgttgaagagacctggtgctggaagtgatgatcctctggggacttgcaccatgataaagaagcgcaggaaagggaaggcgccaaacagatctggtctacgagatgctgccatgaagcacctcgaggacatgaaaggtgccgctaggtatcccttggagcggaatgcagggggtggttacctctgcatgatcaatgatagataggaccgcggctgattatggcatcagttgccccctcccccctcccctccacttgagtcgaagaaaggaatgcagtttgagggaacgaaaaggccgattctttgatttatgcagctggtgtacaacgtttgagtgtagagaaagttaggtgtaatgttttgagtgtagagaaagttatatgttgtggatggatacaaatggtcaaattgtagcacttttggtgcttataatactaatttccgctcgctctgttgggccacgaaaattagaccaactaggctgatcatagttgacagaaaatagcagtgctaatttttatgggctatttatagctgatggaaattagtctagctaatgggccgttgatggaaatttgataatttctgtgcatagtaccagacggaaaattagctaatttttgtgggtcgggtttggctaacaaaaaatagctaacttttgttgttcgttcgtgaaaataa

SEQ ID NO: 49287 - DNA, 2234 bp, Zea Mays
aactgggaaagatgctcctccccactctccgtcctgctccggcaagaggcggcacaccgcgcaaggatgccacctagggctgctccggcgctgcgggtgctcccgctcgcgctcgcagcggccatcttctcggggctcaccgccatcctcttctacctctccggcgtctcctcctcacatagcggctctcggctctcggaggcggacctggcggcgctcgccgcgctgcggggtggcttcagcaagtgcgtggtatggtcttgctcgtatgcctccctctgggctgattacggttcgatttgccttactggtgttcctgctcatctcgtgccgcattgtcgttttcgcctctgggtatgggggcactacttcgtcacaaccacgagctgtggcggattgggaacgtggttgcctcgagattcttggttccgtgcgccaattgttccgagtccgaggttcactgtttagtgtaggaggtagcactgtgacagtgaggtctttgttctggcgtgaaataagatttcatggattgtagcgtatctgtagttgaattggatgacagtggctgcatagatttgcagtgtcagcagcttcaggatcttctttgctgtcttggttcagacagacaaacctcacttgcttaaaagtaactgcaggatgcaaatgggctaggactgaaagccgtgaccggggaggactactgtcgtgttgtgatacaatacccaagtgacacagtttctaagtggagagatccaatcacccataaggctgaaagtctgtcgtttgagttcaatctgtgtgaagctgtggcctcatgggagcacgtccggaacagtacaacagtactcacaaaggagtacattgatgctttgccaaatggctgggaggaatatgcatggagaagaatcaacaaaggaatccttctgtgggaataagtgccagaacagaagcctctgcatggaaaagctctcactagttctacctgagacatcaccatacgttcctcgccactttggtcgatgtgctgttgttgggaactcaggtgatcttctcaaaactaaatttggggatgaaattgattcttatgatgctgtcttcagagaaaatggtgcacccacccagaattacactgaatatgttggtagaaagagtacatttcgccttctgaatagaggatccgcaaaggcactagataaagttgttgagttagatgaaacaaaaaaagaggcactgatcgttaagacgacaatacatgatatcatgaaccaaatgattcgggaacttccaataaccaatccagtatacctcatgctaggcacatcatttggttcctcagctaaaggaaccgggcttaaagctcttgaatttgccctctccatctgtgacagtgttgatatgtatggcttcaccgtagacccaggttacaaggaatggacaaggtacttctcagagctggtgaaaatccattcaccgatgcgaggagatcctggcaggacagtgaggtggctgcctaccaaggctaccatcgaggctgctagagttgcttccgagaagttgttgaagagacctggtgctggaagtgatgatcctctggggacttgcaccatgataaagaagcgcaggaaagggaaggcgccaaacagatctggtctacgagatgctgccatgaagcacctcgaggacatgaaaggtgccgctaggtatcccttggagcggaatgcagggggtggttacctctgcatgatcaatgatagataggaccgcggctgattatggcatcagttgccccctcccccctcccctccacttgagtcgaagaaaggaatgcagtttgagggaacgaaaaggccgattctttgatttatgcagctggtgtacaacgtttgagtgtagagaaagttaggtgtaatgttttgagtgtagagaaagttatatgttgtggatggatacaaatggtcaaattgtagcacttttggtgcttataatactaatttccgctcgctctgttgggccacgaaaattagaccaactaggctgatcatagttgacagaaaatagcagtgctaatttttatgggctatttatagctgatggaaattagtctagctaatgggccgttgatggaaatttgataatttctgtgcatagtaccagacggaaaattagctaatttttgtgggtcgggtttggctaacaaaaaatagctaacttttgttgttcgttcgtgaaaataa

SEQ ID NO: 49288 - DNA, 1826 bp, Zea Mays
aactgggaaagatgctcctccccactctccgtcctgctccggcaagaggcggcacaccgcgcaaggatgccacctagggctgctccggcgctgcgggtgctcccgctcgcgctcgcagcggccatcttctcggggctcaccgccatcctcttctacctctccggcgtctcctcctcacatagcggctctcggctctcggaggcggacctggcggcgctcgccgcgctgcggggtggcttcagcaagtgcgtggatgcaaatgggctaggactgaaagccgtgaccggggaggactactgtcgtgttgtgatacaatacccaagtgacacagtttctaagtggagagatccaatcacccataaggctgaaagtctgtcgtttgagttcaatctgtgtgaagctgtggcctcatgggagcacgtccggaacagtacaacagtactcacaaaggagtacattgatgctttgccaaatggctgggaggaatatgcatggagaagaatcaacaaaggaatccttctgaataagtgccagaacagaagcctctgcatggaaaagctctcactagttctacctgagacatcaccatacgttcctcgccactttggtcgatgtgctgttgttgggaactcaggtgatcttctcaaaactaaatttggggatgaaattgattcttatgatgctgtcttcagagaaaatggtgcacccacccagaattacactgaatatgttggtagaaagagtacatttcgccttctgaatagaggatccgcaaaggcactagataaagttgttgagttagatgaaacaaaaaaagaggcactgatcgttaagacgacaatacatgatatcatgaaccaaatgattcgggaacttccaataaccaatccagtatacctcatgctaggcacatcatttggttcctcagctaaaggaaccgggcttaaagctcttgaatttgccctctccatctgtgacagtgttgatatgtatggcttcaccgtagacccaggttacaaggaatggacaaggtacttctcagagctggtgaaaatccattcaccgatgcgaggagatcctggcaggacagtgaggtggctgcctaccaaggctaccatcgaggctgctagagttgcttccgagaagttgttgaagagacctggtgctggaagtgatgatcctctggggacttgcaccatgataaagaagcgcaggaaagggaaggcgccaaacagatctggtctacgagatgctgccatgaagcacctcgaggacatgaaaggtgccgctaggtatcccttggagcggaatgcagggggtggttacctctgcatgatcaatgatagataggaccgcggctgattatggcatcagttgccccctcccccctcccctccacttgagtcgaagaaaggaatgcagtttgagggaacgaaaaggccgattctttgatttatgcagctggtgtacaacgtttgagtgtagagaaagttaggtgtaatgttttgagtgtagagaaagttatatgttgtggatggatacaaatggtcaaattgtagcacttttggtgcttataatactaatttccgctcgctctgttgggccacgaaaattagaccaactaggctgatcatagttgacagaaaatagcagtgctaatttttatgggctatttatagctgatggaaattagtctagctaatgggccgttgatggaaatttgataatttctgtgcatagtaccagacggaaaattagctaatttttgtgggtcgggtttggctaacaaaaaatagctaacttttgttgttcgttcgtgaaaataa

SEQ ID NO: 49289 - DNA, 749 bp, Zea Mays
gttgccttctcaccacccgaaactaaaatccccaaaaatcgtgaacccctcgccctaggccctaaatcctacccgaaaactctgaggtcgcttgccaatttgatctgcctcaccgtcgctcgcccgtccgtcgatcgacccgacccactcttcaactctgctgcctccctatccacctcaccatctccgccttcacccgaagctgttggtggtagtggtgcctccgacaatggggatatgacatggtaggagagagggtgtgtcccaccgctcaagggtgcggggacaccgtcggtctctgtcacgccgccgcagtggcgacacaccgtgctggcgatgttggtaggaccgtaggaggagggcctcgccactcgcgagcggggtcggtggccaacaacacaagcacggggctctaagttttacaggatcatgcgccaacacaaagatatgccggttttggggaaggatactcatggagatgaactatatgcttgcttatggttcaactgaagcttctttgaggttgttgtggaggtttgtccaccttgaacatttgttgcccttttaggtgatgaaagaaacaagggtgatgatgaatttataaacaagcctcttccctattatggcaaccttgctacaatttttggcaatagtgttgcatcaggacgatttgcaaagacatcaaatgaccctcttgctgttgatgatggtgaagatgtgcaaaaggaagggtgtattgcaacatctag

SEQ ID NO: 49290 - DNA, 610 bp, Zea Mays
acccgacccactcttcaactctgctgcctccctatccacctcaccatctccgccttcacccgaagctgttggtggtagtggtgcctccgacaatggggatatgacatggtaggagagagggtgtgtcccaccgctcaagggtgcggggacaccgtcggtctctgtcacgccgccgcagtggcgacacaccgtgctggcgatgttggtaggaccgtaggaggagggcctcgccactcgcgagcggggtcggtggccaacaacacaagcacggggctctaagttttacaggatcatgcgccaacacaaagatatgccggttttggggaaggatactcatggagatgaactatatgcttgcttatggttcaactgaagcttctttgaggttgttgtggaggtttgtccaccttgaacatttgttgcccttttaggatgaaagaaacaagggtgatgatgaatttataaacaagcctcttccctattatggcaaccttgctacaatttttggcaatagtgttgcatcaggacgatttgcaaagacatcaaatgaccctcttgctgttgatgatggtgaagatgtgcaaaaggaagggtgtattgcaacatctag

SEQ ID NO: 49291 - DNA, 1928 bp, Zea Mays
catccacatccagtcgcacaaaaacggcccaagtggagcaggttctgcttctggctgcccgctgtcccgtggtccctctctccctccctgtcctgtccgccgccgccggtccccgacggcggctctgcagccacacgcacaaggactagagcggacataatacggtgcaagcggagggaccaaaccgcaaaagcgcacagttcccgttccccctccgacccgttcattccgcttggttttctcctcctccgtcctcttcgctccccgtcagaccatccctgtgaggctgtgacgcaaccgggcgccggcggtctctcctgcaccacagggcacgccgcctcccgcgcacgtgttctcctcttccggggattcagatctggggattgctattctgtccgtctgactccgtccgtcccgaggcgcggcgaggggagcgagatgggttacattggccaccacggcgtcgccacgctgcggcgctacaagtacagcggcgtcgaccactcgctcgtcgccaagtacatcctccagcccttctggtcccgattcgtcaacatcttcccgctatggttcccaccgaacatgattacactgacaggtttcatgtttctactgacatcagcattccttggctttttatattcaccccatctagatacagcaccccccagatgggttcaccttgctcatggactgcttctctttctttatcagacttttgatgctgtggatggaaaacaagcaaggcgtaccaactcatcaagtcctctaggcgagctttttgaccacggatgtgatgcgcttgcgtgtgcttttgaatccttggcttttggaagcacggcgatgtgtggaaaggctaccttctggttttggttcatttcagctgtcccattttacttcgcaacctgggaacacttttttacaaatacacttattcttcctatagtcaacggaccaactgaaggccttatgctgatctacttgtgccattttttcacctttttcacaggagccgagtggtgggcacaggattttcagaagtcaatgcccctgctgggttgggttcctcttatctctgaaatcccggtgtatgacattgtgctatgtcttatgattgcttttgctgtaatcccaacaattggatctaacatccacaatgtatataaagtcgttgaagcaagaaaaggaagcatgcttctggcactagccatgctctttccttttggtttgctcttggctggagttcttgtctggtcctacctttctccttcagatataatgagaacccaaccacatttgctaattattggaactggttttgcatttggatttcttgtgggaagaatgattctggctcacttgtgtgatgaacccaagggtttgaaaacagggatgtgcatgtcccttgcgtattttccatttgcaattgcaaacgcgttgactgcccggcttgatgatggaaatccactcgttgatgagcagctagtgctcctgatgtactgcctatttacagtggctctgtacatgcattttgctacatcagttattcatgagatcaccaatgcactcgggatccactgcttcaggatcactaggaaaaaggcatagttcctccgtccacgggcatcagcgttgccctggattgtgtaatcaatcacaactcacaaggtggtgcctgacagacaagcaatttttcatatttaatggatgctgcttcctgaatactcacatggatgacgcccccccccccccccccccccccgccccttaaaattcacatcggcatgaacgtgcggatgagaaagcagtgtttttttttgaaacaattagcaacatcatgctgtatcttaccaattttttgtggaattcgttgaatttgctgatagtgatgtattgcaaattaagaattgtttggattttaaaaaaaa

SEQ ID NO: 49292 - DNA, 298 bp, Zea Mays
cctaaaacaccatggtaattaaccggccggtcgtggcgcctcctacaggggccatattacattgcattgcatattttaatattattacatttttttgaaaaaaatataataataacgacggtaccatatatgttgctatatattgcatctttacataccatattcgtttgcccaattattctaatcacaactatctaattttacacaacctaatatctactctacactactggtctcaaaacaaatcatcatctgcatgacatggactttactttcatatctgcggatcggagagagc

SEQ ID NO: 49293 - DNA, 1911 bp, Zea Mays
atgtactctctaccaggagcaaccatgtctgctgcacctgcacgcgtcatctcttcctcctcctcctcctccttcgtggagcctcttctccttgcagcagcttcgtcggcggctgcaaacagccaccaccaagtccgccagcgcggccacttggtccgtactttggcggcatcatcgtcgtccaacacgctgctgcggagtgacttcgatctccaggagggcctgacgacggacgtcaaacggatgctgcgtcagcgtcagaagaagagcggcggcgggcgggagatgctggtcaccatcgacaacctcaagcgcctctgcatcgaccacttcttcgaggaagagatcgagggcgccatggcgacgggcgcctgcacgcgtctcctccacagcgacgacctcttcgacgcaacactcgcgttcaggctcctgagagaggcaggccatgatgtctcagcaaaagaggatgttctacggaggttcatcgacggcgtcagcggcgacttcaagctatctctgaacaacgacgtcagagggctcctgggcctgcacgacatgtcccacctggacgtgggaggggaggaggcggcgctgctccacagggccaaggagttctcgagcagccacctcgcgtccgccgtcaggcatcacctccgctacctgcagagcctgccctccagctgcagagacgccgccgtggagagactcgcagttgccgagttccagctcaacaagtcgctgcatcagagagagatgcgagagattaaaaggtggtggatggacctagggttggctgaagaaatacctgtggtacgggatcaggtgatgaaatggtacatgtggtccatggcagcactccaaggatcttctttctccagataccgggtctacgtcgtggacgacatattcgatctcgttggcaccctggaggagctctccgccttcaccgaggcagtcaaaatgtgggatactgcggctgctgattcacttcccagttgcatgagatcatgctataaggccctccacaccgttacgaacgagatcgcagagattgcccacaaggagcatggatctaaccctatcaatcgtctcaggaaagcatgggtggtgctgttcgacggtttcatggttgaggcgagatggctagcgaccgaccaggtccctacggcggaggactacctacgaaatggcgtcgtcacatcaggagtgccgctcacatttctgcacatattcagcatgctagggtatgatgacccaagcaccgaggaagaagaagaagcgatcatcgaccacatgccctcgatcatctcctgcccagccaagatcctcaggctctgggatgacatgggcagcgcagaggatgaggctcaggaaggattcgatgggtcttacagggacttctacctcatggagaaccctagccgcagccccggcgaggcggaagcgcacatgcgcggcctgatcgcgagggagtgggtggagctcaacagggagtgcttctgccggaggaccttcccctcggacatcgcgcaggtctgcttgaacaccgccaggatggtcagcgtcatgtactcgtacaacaaggagcagaggcttctcgtcctcgaggactacgcggcgatgatgttggtgctttgatttgaagcatgcatgcatgcatttgctctctccgatccgcggatatgaaagtaaagtagtgattaggttgatgatttgttttgagaccagtaatgtagagtagcgattaggttgtgtaaaattagatagctaggattagaataactgggcaaacgaatatggtatgtgtccatatgtaatgatgcaatatatagcaacatatatggtatcggcgttattatctttttctttcaaaaaatgtaataatattcacatatgcagtgcaatgtaata

SEQ ID NO: 49294 - DNA, 1762 bp, Zea Mays
atggcggaggcgggggagaaggcgatggtagttgtgcttcgcggcgacgtcgccggctccctcctcgccaagaccacgcagggccacgccgacgtcctcctcctcgactcaaatgggtggattgcggcgaggggtagcaccaagctggagttgccattgaaggtgccgtacgacttcatcgtgatgctgatgaaggatctgttaggagaccggggcatcgactacctgctagaggtggggctcgccatcgacctccccgccattggcacctttactattctgctcaccatcaagggagccttccgggaattcagatgtattagcatatgaatcgatttattgtcacaccataatcgctataccgaagcaatgatggtggattagcaatatttggggatttttttttgtgttcttacaccggtgtgatagaggagtttaaacctaactgtcataaaaaatctaacccgatgtttaaatccattttttgaaatctattccaccaccaacagttaagagaaactctattccaccgcctgcagttaaggaaaaaaatcaagttttctaaactctaaaaggcatggtttcagaaacgcctttctagatgattttgcatatttattttttagaccacggtttatgaaattgaagaacaacaagtgtggctcaaaagtatagagggaaagaaaatatattatatgcgacattgttgcatggcaccatgtgtgcgacatcctataattgtcgacattgatatgctctcaaattggatgccctgttcctttgtatttatgagcaggaaagaattatagggagtaacaggctcgccatccatgagtggtcagctcatacttttggtgtgtgtattgatttgtcttgagaaagaacattgttgtgttatcttagaaattcttactggcactggggttgaatgcttaccatcttttttcttcgaaattcattatctgagctgataacaaggtgttgtaaatgtttgctggctagcaagatgcagttttcctgttttttttgctgctctttccgttatgatttcagttcattatttctatgttctaaaatctctggatttaattaccatactcggacagctatactcagactgttccactgttgctacttaggttttttctagctagccagtgatctgcagctaagcaagtattacaactaaaaaaatgctagcctacatgtgtactgataggaatactcattgggggcaggatgaacaaggcctacagtttctaaaatatgataaatgcacaattctattagcatttgttcctgtatacataactttctgttgtatcctacatgtgaacctatttgctttcatctctcgtgactttattggcttgaagccatttgctttcatctcttggtcatacatatgagatcttttcatcttctcaagcttttaaattcatttgatcttcatcaaactaaaagatgaagtcaatttgcttactttcagcctccagttctaagtttgtgcaaaaactctgaatgaggggtatcaaattaaaaaatagtgcttacatgctagacaattactgttttattttgcttgatgatctattaatgaaagtaaaaagtaccctctcattcatcggtccgccgtcggccacgtcgctctgcgaccccatcttcattctgcacaagcgcccacctcgtccgcagcaccacacaacagctcaggcgaggcacccaccatccatcggcacagatgggatgaggtgaggattag

SEQ ID NO: 49295 - DNA, 658 bp, Zea Mays
ggctctatcaaataccttaacagtagacgagcctttctatctgaaatcacaattttttattggaaccagacaggaatggatgcatcactcttggcaatatcagaatggttagcgagagaagctgatgatacaatgaaggaatcgcgagtttaagatgttcttgtttcggtacatttggtttgtatcatatgacaccattttgttcatgcaaaaattccaagagttatgtgcagaagcagttagtgtgcaccagcttgaagcattggatagatgggagcaacatgtgcgatctgcttatcaatcaatgccagttcatctggtgatcagaatgttgtcgctaaatgattaggtgggaaagggaggattccaagctgtacgtgcagagtggtgacaacaagtggagctacagagaaaagattgagttcacgatctacttcgcataggagatctctcaaggcctgctatttgagatggaggaccagatcccttcgctcgctgaccttattaagttcggcagcttgctggatttccaacaacaatacaggtgatgtcggccattgatgagggggcatgttgaagcagcagaatgtccgtgctaatagaatgcagcatgtcttaattcgtcatctactgatatcagcaaggccttggaattggg

SEQ ID NO: 49296 - DNA, 1071 bp, Zea Mays
atgggcgccgcgagccagctccgtcgccggacccgggcgcggacgccgccaggtccagggccggaggccgccgccgccgacgacgacgtgaggtgcgaggcgtgcgggtccggggacgcggccgcggagctgatgctgtgcgacgggtgcgactgcgggttccacatcttctgcctccgccccatcctcccgcgcgtccccgccggcgactggtactgcccgtcctgccgcgccccggcctcctccaaatccgaacccgccgctgccggcaagaagccgaagcagttcccgctggtccagacgaagatcgtggatttcttcaagatccagcggagcccgacgccgttggtggaagcggcggagctgaagaagcggaagcggaagcacgggggcgcgctggtggcgtcgaagaagaagagccgtaggctgctgcccttcgtgcctagccccgacccggcgcagcggctgcggcagatggcgtcgctggcgacggcgctgacggcgacgggcgccgcgttcagcaacgagctcacgtaccagcccggcatggcgccgcggtccgcgaaccgcgcggcgctggaggccggcgggatgcaggtgctgggcagggaggacgcggagacgctggcgcggtgccagcagatgatggcgcgcggggagtggccgccgttggtcgtggcgtacgaccccgtggaagggttcacggtggaggcggaccgccccatccgcgacctcaccatcatcaccgagtacgtcggcgacgtcgacttcctccgcaaccgggagcacgacgacggcgacagcatgatgacgctgctgtcggcggcatcgccggcccgcagcctcgtcatctgccccgaccgccgcagcaacatcgcgcggttcatcaacggcatcaacaaccacacgccggaggggaggaggaagcagaacgtcaagtgcgtgcggttcgccgtcggcggcgagtgccgggtgctgctgttggccaacagggacatctccaagggggagaggctctactacgactacaatggctcggagcacgagtaccccacgcaccatttcgtgtga

SEQ ID NO: 49297 - DNA, 827 bp, Zea Mays
aggccacatgtacaagaaagtttggaataaaatcatgtaccccatggttagtggcttagtgccactagctgtagaactcacaagtctaggcatccattctcatataccccatggttagtgcatcatctcagttatgattcgaataagatttaaaacaaagacccttctaattattttgtatataaatattactaataaaaatattcatatcaaacaacaagtaaataaaaagatacatgttacattaaaattttcttctaacatgtttaaatatggccgagctataaatatgtcgtggttgctaactattcgacatttcacagaactattagaccatatactgatagtctgacaactatatctatacacctagggctgggtcttgtgaacttgggggggggggggggggaccaaggcgaccgcccaggccgacactgacagacaagttgaattcagtcctctaactagctgaatacttaagatcttgtttcactgtatccttatcctggctgttgctgaactagctattatctggatcgattcctctcagttgaaaaggcgaaagatggcgtgggccctttatttgatgagagatcctgtctcgaaaactcatttgtactactcattgttggtagatctcaaggattaatccctgcaaggctgcaagatgcatctaatttactcacttacttgcaacacgcatccatccaatttaccgacaagatggtatcacaagcgtgccacggctctgtccagcagctcatcgcttgctacggatgcagtagcactcttggccttgctgtgagattcacggctcgactgtgagc

SEQ ID NO: 49298 - DNA, 1660 bp, Zea Mays
ctctgtctcccatggcacgcgcgtgcctcctggtcggctgctgctccctgcgctcaccgtggctccctgctgcagctcgcccccagctcaccacgcggctcccatggcgtgctcctctctgccgagcggctcttccccacggcgccgtcgaatcccgtcttcctctgctcgcgcgggccgtgcccctgcttcccctccctagccgagctcgccgattccctttccccaagctccatggctggccgcgcccagcgtcctcctctcagcttcccacgcgcaccggcttgctccctgctcggttccgtgaccgcgccgtgtgcccatctcctatgcacgcatgctccctccctgttcctccaaaccagtcgagctcctccttgtgtccgtaccgagctccttccctacgccggtcggatctctctggtgctcccccagtctggcgcggcaaacggggaaagaaacagccgagttcctctgcgcgctaccacgtcttctcgctcggcctgctccggatccgaagctggtcaccctgtgtgctcgactttgccttgtcgcaaaaccccgacgccgttgagcctcactgcccatcacgaagttccctactatcagcctccgcacccgttccgttagaccgtcgtagtcagtttgcctccatcccgtggtggtgttgcgctaccgtcgagtcccgatatcgatccggtggtcgtcgaagtgaagctctgaacggatttgaccatatccagcactacccatgtcgttgtcgttcgccttcgtgctgtgagcgatagcatcgtcatttccttcatgtgctcaccctcgatctccgccttgccatcacccttgatcacagcactgtgtcgacgacttgcgatcctcactctcgcgctcacgctttgtcgaatgtcactctagtactcgtcagaagaagagcttcaacagttgattactgaagaaaagaagaaccctgggtgacatctacctagtactcgacggaaattctgaagtacaatttatcaccgtgtccatggaagtggagcgacttaatattggtaagcgaactcgttacttcggatagttggaatggtaatttgattggctagatttattaatcgtaataatcctcgtgttggcacaggcgcgttgtggtagtgttaaatatgtgtgaaatacgatggagttagtaatgcgaaaggtagattaaattatacgatattcaggtgagctgatgatgtaaaatataggattagtattcctatcagctagttgatagattttctagtgttattatgtcaatttggttaattgatatagtcgataccctacttaattagttagtttattctaggtttggtatttagttcgatgtcatgagggatgtgcaaattacctcgtgtaattaacaatgaatgacatcgacctatctaattagcgtggaattcaagataattgagaaacacaatttagaaagttagttaatatgcccctttactctaagttgtcggtattcgaaaatagtgaataaaaatttgacgagtaatttgatattgggtgttttgacaaaagacttgtgcttagcttattattacttgatgtttgaagtagatgcgattacgctagaaaagtgtaataattcggcgtagtcgtatatcggtaactagtg

SEQ ID NO: 49299 - DNA, 6533 bp, Zea Mays
atcatcagtaaacgtacaggcgcatcgcgaaaaagctcgcaaaatcgcagcacactagcacagaaccttggacgcgaaggcgtcataccccgatgccggcgtcgtcgtcgccggcgatggcgtcgcagcatgcgccgccgaggcgggagctcgacctcgacgctttcctcccgtcctctccgacatcctccggggcctcggacgccgacccggccgacgatgaccaccgccgcgccgtcgacgacctgctccgcctcctctcctcctcagactcggactccgattccgaggagtctagccgcatcccaagcaccagcatccagacgctatcccgagtccaagccccggcgcctgtcgctgagccctcgccgtcgccttccccatccgcgtccccgtccccgaggagatccgcatcggccttgccgtcggagaccctctcctccctcgtcgcgagaaccttctcgagcaacggcgcttcctcgtcgtcgaagcccctcccctcgctcttccggggcgtccgccccagccccaaacccggcgccgcgcttgccgctgctgccgcagcgtcccgcgcggtcctcaccccacacgccgctgccatcaagtcgcgccgatcagtatcggcgcccgtggagaaagttctggaggaagaggggagtggctccgaaggctccaaggagttccttcccactgggagcttggaagcagaggtagaagagaagggtgattcggaagcggttgctgatgcgaccaagcaaactgcaggtgggaatgtgggtgcggaactgggagaggataaacaggcagaagtgggaggtgaagagaatgctgaggctataaagctggtggaggcaagtcctctggatgctctagctgcggaggattccagtgggcatgagcaaggtaatgatgccaatttggcggaaactgaccaagttgggaatcagattgaggctgtctatgaggaaaatgaggatgaccaaactggaggtgataatcatgttcaatcaggtcagggtatggatcttattgcgattgctttagaggaaagttctgatgatgaacatgaatttgaaagatctgacagtatcttgcaagaacaagtggaatctgggagcttaattgataaagtgattgaagatagggtagagcagctggaggccagcaggaaggctgagaacacagagaagaagctgaaggtgtcaatgaaaccgttggagtgggcagaggagcttgagaagaggcaggcctcgtctggtcaacattgggaggaaggagcagctgcgcagcccatgcaactagagggaatcggaaagggcccaccagctatcggttacatgcaaattgagatggacaatccagtaacccgtgtcatgtcctcaccgtcatttaggtcagaccatggctctccccaggtgctggctgttcataggagctatatagcaatgggcacatctaaaggtgctgtcatcgtcattccaagcaaatactccattcatcaagctgatgatacagatgcaaagatgctgttcttttggaaccaaggcgagaagactcaatcaccagtgactgccatgtgctttaaccagcaaggggaccttctgctagtaggatatggtgatggtcatatgacaatttgggatgtacagaaatctgcagcagcaaaagttatatatggcgagcatacagcaccagtagtgcatgcttgttttatccgccaatctaaagccatcactggggattcaaaaggggtagttctattgcacacattttccattatccccgtaattaatcgtttaactgtcaagggaactcagcgtctttttgatgggaatactggaattgtgctctcagcctgtcctcttgtaatggatgaatcttttggttttagtaattcatctgcccagggaaatcagacaacttcctccagtggtggtcttggcagcatgatgggtggtgttgttggaggcgtggttggagtagattctggatggaagtttttcaacgaaggctcttctccaatggaggatggtgttgtagtcatgtttattatgcatcaacatgctcttgtggttagactccgtaccaatattgaccatgttgaccatattgagaccttctctagaccagatggagcacgtgagggctccatcgcgtatgctgcgtggaaatatacatcatatttgaatgaatcgtcatcagtagatgaagaacgagtgtcatggctagcacttgcatgggaccgtcaagtgcaagttgcaaagtttgttaaatcaaagatatttaaacacaaagagtggaagcttgatagttcagctgttggtgttgcctggttagacgaccagatgttagttgtccttaatttgagagggcaactctgtttattctctaaagatggcagtgagcttcgcagaactacctttgttcctgatggccttctttttgatgacaccatattgcaccatgcacatttttttaacaggtttggtaacccagagaggcattttaacagttcagtagcggtaagaggtgctacagtgtatattcttgggccatcttttctcacggtttcccgacttcttccatggaaagagcgaattgaagcactaaagagggctggcgattggatgggtgcactagacatggcaatgaggctttatgatggtcagacacagggtgttgttgatctcccaagaacggttgattctattagagatgccataatgccttacttagtagagttgctgctatcatatataagttatgtttttgaatatatttcaattgcgctgccaaatcatactggaaaagggggagaatcaggtgttctaatagaggcagatcgatccctgcttacacaaagagatgagcagtacgctcgtgtaggaggggttgcagttgagtattgtgtccacattggacggaatgatatccttttcgatacagtcttctctaagtttgctgctgcagaaagtggaggtatgtttctggaggtgctagagccttatatattgaaggatatgcttggttctctgccccctgagattatgcaagcactagtggagcattatagtggcaaagggtggttgcaacgagttgaacaatgcatccttcacatggatatttcttcattggactttaatcaggtagtcagactttgtcgtgaacatgggctatatggtgcactaatttatttatttaaccaaggcctgaatgatttccgtacaccactagaggaacttctatcagtcgttcagaacaccaacagtaaagatgatgcttctagtggatacaggatgcttgtttatctgaaatattgctttcagggtttggcatttcctccagggcatggaataattccccaatcccggcttcattcagtgagggaagaactccttcaatttctgcttgaagaatctaagccactcacttctgaagtatttaagggtttcaatgcttcttgtggaaagtgcctaaacatatgctatctgctatggttggatactgaagctactttggaagtcatcaaatgtgcttttgtacaggataactttgagtctagagatgaacttccgagtactgtcaatacatctgcttcagataatgaagatggtattgatgctggaagaccagagggccaaaatgctatggtacaaaatgtggttgatgccatcattgacatagttggtttggaaaatgatgtgattcggtctgttatgggtagaactgaatcagaattatggccttcggagaaggattttggctatttaatggagtttgtgtccttttttgtttctcacaaaagggctaatgcatctaagagggttgttatgcacattcttacttatctcatttcgtcatatgatgacacaagaacaaggattcagaaagaaaaagaagttcttcaactcttcaatgcggttccccgaaacgattggaattcggattttgtcttgaacctttgttcagatgctcatttttatcaggcctgtggtttgatatttacagccaggaatcagaatttggctgctttagatagttacatgaaggataaagaggaacctttccatgcttttatcttcattgataagaagttactagaattggttgacgatgaagctttgtcgtttcataccacagtaatatctcgctttcctgagctagtcaagctaagcagggaatgtgcatttgtcttggcgattgatcatttctgtgataagatacagcaaatattagcagagcttcgttctgaccgacacagcctctttcttttcttgaaaactgctattgaagtacacttgtctggaaaacttgacttcagtaagcttgaattaagaaacaaacaaactgttgaactccagtactcttctactgaagttgaagcttatcagcagaggctatcaaatctctccaagttatgccacaatcctgtttacatcgacgacgagttagttgagctttatctggagcttttatgtcagtatgagcgaaggtcagttctgaagtttctggagacttttgacagttacagattggaacggtgcttgcatctttgcctagattatggagttacagatgctgctgctttcttgcaagagagggttggtgatgttgggagtgcccttgaccttattctggctggacttgatgagaaaattagcttatttatctcttctgtggaaagtactttctctggcgtcgcatcaaaaagtatcgctgaaattaagcaaccagacatcgttctagaaatgagtgaggctcatccagtgcttgatgcattgcatgcctccattggattgtgccaaaggaattcacagcgcttggacccagaggaatctcagtccctttggttccaactccttgactccttctcagagccattaaaaaaactgtatgggatcaaggatgtaaatggaaaaggtgtcaagtccaattggagtgaagcatcaatggaacatctgaaggaaaaaggactatctcaacaaatgaggatttcaactaaacaaaagtgcctaaatgttctgcgaaaagtattttcacaatgtgttggagaaataatagaggccatggctgggtatattcccctaccggcaatcatggcaaaactgttatctgataatgggaatcaagagttcggtgatttcaaacttgtgatacacagaatgttatctatgtatctttacgaaaaaagaatactggaaacggctaagtcagtaattgaggatgactcattttacaccttgagcttattaaagagaggagtttgtcatgggtttgccccacagactttcgtatgctgcatatgcaactgttcactttctaaagaaggtgctatttcagccgtacgtttgttcagttgcgggcatgcaacacatcttcagtgtgagtctgagcagaccaggtcatccaatcaggaatccaaagagggatgccctgtttgtctctcaatgagtgatacgcaagctcgaagcaaatcacctatgtttgagaatgggctaatgaagtattctggggctgaacatgaagtgtcacatggcatgtatcagattcatgaagttgatcatgctgagagatctcgtgggcttcaacagatgtcacggtatgaaatactgaataatcttcagaaagcgcagaagtcctttcatatagaaaccgtacctccattgaaacttgcaccgccagctatataccatgagaagatacagaagaggaccacttcggttggtgaaactagcaaacattctgttagaagtcagaaaccccagaaaatttggcaaatgaaggagaaaaaatcaaaagaggctgggagtcatcatccacaaaagtcaagttttctacgttaatagaagaaaagattgctgatttgttaagtatgaaaccagatccaaactgattgttaatttgcttcatgccatcaccacgatcgaatcttcaagactacaaatttgtcagcgtgatggagcctgcccatcagtacatagcttttttttttgtcttggggatgcatcctgttggtgagatcctcttcccctgcaccatggtcagaggttctgtggagccaaggtgctttgggctagggaggaaattgtaacagtaaattttcatacagttcatcgtgattagttttgtgtacagagcagagcatacacgtggtgacatggtccctgtagagggacacattcgcagtaaaggtgggatgcctcgattcatactcaacaatgtaaagtaaaggtgggatacctcaattcatgatcattgtaaaatacgtgcacagtataacacaggagcactggctgagtggcatgtatccttgcagttcatcgcgattaatctctgtacagagctgttatactgtcggttttgatatcagttgcaattacacatctgctacagttttgtagtatcagatatcagaacacgtcgggcccgcagaacgcctggaagctcgtagttgtcggcgccgagcatcctgtcgccattgggttgcgctgtactgtactactactactacgcgtctgttgtctaggtgggag

SEQ ID NO: 49300 - DNA, 6390 bp, Zea Mays
agtaaacgtacaggcgcatcgcgaaaaagctcgcaaaatcgcagcacactagcacagaaccttggacgcgaaggcgtcataccccgatgccggcgtcgtcgtcgccggcgatggcgtcgcagcatgcgccgccgaggcgggagctcgacctcgacgctttcctcccgtcctctccgacatcctccggggcctcggacgccgacccggccgacgatgaccaccgccgcgccgtcgacgacctgctccgcctcctctcctcctcagactcggactccgattccgaggagtctagccgcatcccaagcaccagcatccagacgctatcccgagtccaagccccggcgcctgtcgctgagccctcgccgtcgccttccccatccgcgtccccgtccccgaggagatccgcatcggccttgccgtcggagaccctctcctccctcgtcgcgagaaccttctcgagcaacggcgcttcctcgtcgtcgaagcccctcccctcgctcttccggggcgtccgccccagccccaaacccggcgccgcgcttgccgctgctgccgcagcgtcccgcgcggtcctcaccccacacgccgctgccatcaagtcgcgccgatcagtatcggcgcccgtggagaaagttctggaggaagaggggagtggctccgaaggctccaaggagttccttcccactgggagcttggaagcagaggtagaagagaagggtgattcggaagcggttgctgatgcgaccaagcaaactgcaggtgggaatgtgggtgcggaactgggagaggataaacaggcagaagtgggaggtgaagagaatgctgaggctataaagctggtggaggcaagtcctctggatgctctagctgcggaggattccagtgggcatgagcaaggtaatgatgccaatttggcggaaactgaccaagttgggaatcagattgaggctgtctatgaggaaaatgaggatgaccaaactggaggtgataatcatgttcaatcaggtcagggtatggatcttattgcgattgctttagaggaaagttctgatgatgaacatgaatttgaaagatctgacagtatcttgcaagaacaagtggaatctgggagcttaattgataaagtgattgaagatagggtagagcagctggaggccagcaggaaggctgagaacacagagaagaagctgaaggtgtcaatgaaaccgttggagtgggcagaggagcttgagaagaggcaggcctcgtctggtcaacattgggaggaaggagcagctgcgcagcccatgcaactagagggaatcggaaagggcccaccagctatcggttacatgcaaattgagatggacaatccagtaacccgtgtcatgtcctcaccgtcatttaggtcagaccatggctctccccaggtgctggctgttcataggagctatatagcaatgggcacatctaaaggtgctgtcatcgtcattccaagcaaatactccattcatcaagctgatgatacagatgcaaagatgctgttcttttggaaccaaggcgagaagactcaatcaccagtgactgccatgtgctttaaccagcaaggggaccttctgctagtaggatatggtgatggtcatatgacaatttgggatgtacagaaatctgcagcagcaaaagttatatatggcgagcatacagcaccagtagtgcatgcttgttttatccgccaatctaaagccatcactggggattcaaaaggggtagttctattgcacacattttccattatccccgtaattaatcgtttaactgtcaagggaactcagcgtctttttgatgggaatactggaattgtgctctcagcctgtcctcttgtaatggatgaatcttttggttttagtaattcatctgcccagggaaatcagacaacttcctccagtggtggtcttggcagcatgatgggtggtgttgttggaggcgtggttggagtagattctggatggaagtttttcaacgaaggctcttctccaatggaggatggtgttgtagtcatgtttattatgcatcaacatgctcttgtggttagactccgtaccaatattgaccatgttgaccatattgagaccttctctagaccagatggagcacgtgagggctccatcgcgtatgctgcgtggaaatatacatcatatttgaatgaatcgtcatcagtagatgaagaacgagtgtcatggctagcacttgcatgggaccgtcaagtgcaagttgcaaagtttgttaaatcaaagatatttaaacacaaagagtggaagcttgatagttcagctgttggtgttgcctggttagacgaccaggtttggtaacccagagaggcattttaacagttcagtagcggtaagaggtgctacagtgtatattcttgggccatcttttctcacggtttcccgacttcttccatggaaagagcgaattgaagcactaaagagggctggcgattggatgggtgcactagacatggcaatgaggctttatgatggtcagacacagggtgttgttgatctcccaagaacggttgattctattagagatgccataatgccttacttagtagagttgctgctatcatatataagttatgtttttgaatatatttcaattgcgctgccaaatcatactggaaaagggggagaatcaggtgttctaatagaggcagatcgatccctgcttacacaaagagatgagcagtacgctcgtgtaggaggggttgcagttgagtattgtgtccacattggacggaatgatatccttttcgatacagtcttctctaagtttgctgctgcagaaagtggaggtatgtttctggaggtgctagagccttatatattgaaggatatgcttggttctctgccccctgagattatgcaagcactagtggagcattatagtggcaaagggtggttgcaacgagttgaacaatgcatccttcacatggatatttcttcattggactttaatcaggtagtcagactttgtcgtgaacatgggctatatggtgcactaatttatttatttaaccaaggcctgaatgatttccgtacaccactagaggaacttctatcagtcgttcagaacaccaacagtaaagatgatgcttctagtggatacaggatgcttgtttatctgaaatattgctttcagggtttggcatttcctccagggcatggaataattccccaatcccggcttcattcagtgagggaagaactccttcaatttctgcttgaagaatctaagccactcacttctgaagtatttaagggtttcaatgcttcttgtggaaagtgcctaaacatatgctatctgctatggttggatactgaagctactttggaagtcatcaaatgtgcttttgtacaggataactttgagtctagagatgaacttccgagtactgtcaatacatctgcttcagataatgaagatggtattgatgctggaagaccagagggccaaaatgctatggtacaaaatgtggttgatgccatcattgacatagttggtttggaaaatgatgtgattcggtctgttatgggtagaactgaatcagaattatggccttcggagaaggattttggctatttaatggagtttgtgtccttttttgtttctcacaaaagggctaatgcatctaagagggttgttatgcacattcttacttatctcatttcgtcatatgatgacacaagaacaaggattcagaaagaaaaagaagttcttcaactcttcaatgcggttccccgaaacgattggaattcggattttgtcttgaacctttgttcagatgctcatttttatcaggcctgtggtttgatatttacagccaggaatcagaatttggctgctttagatagttacatgaaggataaagaggaacctttccatgcttttatcttcattgataagaagttactagaattggttgacgatgaagctttgtcgtttcataccacagtaatatctcgctttcctgagctagtcaagctaagcagggaatgtgcatttgtcttggcgattgatcatttctgtgataagatacagcaaatattagcagagcttcgttctgaccgacacagcctctttcttttcttgaaaactgctattgaagtacacttgtctggaaaacttgacttcagtaagcttgaattaagaaacaaacaaactgttgaactccagtactcttctactgaagttgaagcttatcagcagaggctatcaaatctctccaagttatgccacaatcctgtttacatcgacgacgagttagttgagctttatctggagcttttatgtcagtatgagcgaaggtcagttctgaagtttctggagacttttgacagttacagattggaacggtgcttgcatctttgcctagattatggagttacagatgctgctgctttcttgcaagagagggttggtgatgttgggagtgcccttgaccttattctggctggacttgatgagaaaattagcttatttatctcttctgtggaaagtactttctctggcgtcgcatcaaaaagtatcgctgaaattaagcaaccagacatcgttctagaaatgagtgaggctcatccagtgcttgatgcattgcatgcctccattggattgtgccaaaggaattcacagcgcttggacccagaggaatctcagtccctttggttccaactccttgactccttctcagagccattaaaaaaactgtatgggatcaaggatgtaaatggaaaaggtgtcaagtccaattggagtgaagcatcaatggaacatctgaaggaaaaaggactatctcaacaaatgaggatttcaactaaacaaaagtgcctaaatgttctgcgaaaagtattttcacaatgtgttggagaaataatagaggccatggctgggtatattcccctaccggcaatcatggcaaaactgttatctgataatgggaatcaagagttcggtgatttcaaacttgtgatacacagaatgttatctatgtatctttacgaaaaaagaatactggaaacggctaagtcagtaattgaggatgactcattttacaccttgagcttattaaagagaggagtttgtcatgggtttgccccacagactttcgtatgctgcatatgcaactgttcactttctaaagaaggtgctatttcagccgtacgtttgttcagttgcgggcatgcaacacatcttcagtgtgagtctgagcagaccaggtcatccaatcaggaatccaaagagggatgccctgtttgtctctcaatgagtgatacgcaagctcgaagcaaatcacctatgtttgagaatgggctaatgaagtattctggggctgaacatgaagtgtcacatggcatgtatcagattcatgaagttgatcatgctgagagatctcgtgggcttcaacagatgtcacggtatgaaatactgaataatcttcagaaagcgcagaagtcctttcatatagaaaccgtacctccattgaaacttgcaccgccagctatataccatgagaagatacagaagaggaccacttcggttggtgaaactagcaaacattctgttagaagtcagaaaccccagaaaatttggcaaatgaaggagaaaaaatcaaaagaggctgggagtcatcatccacaaaagtcaagttttctacgttaatagaagaaaagattgctgatttgttaagtatgaaaccagatccaaactgattgttaatttgcttcatgccatcaccacgatcgaatcttcaagactacaaatttgtcagcgtgatggagcctgcccatcagtacatagcttttttttttgtcttggggatgcatcctgttggtgagatcctcttcccctgcaccatggtcagaggttctgtggagccaaggtgctttgggctagggaggaaattgtaacagtaaattttcatacagttcatcgtgattagttttgtgtacagagcagagcatacacgtggtgacatggtccctgtagagggacacattcgcagtaaaggtgggatgcctcgattcatactcaacaatgtaaagtaaaggtgggatacctcaattcatgatcattgtaaaatacgtgcacagtataacacaggagcactggctgagtggcatgtatccttgcagttcatcgcgattaatctctgtacagagctgttatactgtcggttttgatatcagttgcaattacacatctgctacagttttgtagtatcagatatcagaacacgtcgggcccgcagaacgcctggaagctcgtagttgtcggcgccgagcatcctgtcgccattgggttgcgctgtactgtactactactactacgcgtctgttgtctaggtgggag

SEQ ID NO: 49301 - DNA, 6516 bp, Zea Mays
cgtacaggcgcatcgcgaaaaagctcgcaaaatcgcagcacactagcacagaaccttggacgcgaaggcgtcataccccgatgccggcgtcgtcgtcgccggcgatggcgtcgcagcatgcgccgccgaggcgggagctcgacctcgacgctttcctcccgtcctctccgacatcctccggggcctcggacgccgacccggccgacgatgaccaccgccgcgccgtcgacgacctgctccgcctcctctcctcctcagactcggactccgattccgaggagtctagccgcatcccaagcaccagcatccagacgctatcccgagtccaagccccggcgcctgtcgctgagccctcgccgtcgccttccccatccgcgtccccgtccccgaggagatccgcatcggccttgccgtcggagaccctctcctccctcgtcgcgagaaccttctcgagcaacggcgcttcctcgtcgtcgaagcccctcccctcgctcttccggggcgtccgccccagccccaaacccggcgccgcgcttgccgctgctgccgcagcgtcccgcgcggtcctcaccccacacgccgctgccatcaagtcgcgccgatcagtatcggcgcccgtggagaaagttctggaggaagaggggagtggctccgaaggctccaaggagttccttcccactgggagcttggaagcagaggtagaagagaagggtgattcggaagcggttgctgatgcgaccaagcaaactgcaggtgggaatgtgggtgcggaactgggagaggataaacaggcagaagtgggaggtgaagagaatgctgaggctataaagctggtggaggcaagtcctctggatgctctagctgcggaggattccagtgggcatgagcaaggtaatgatgccaatttggcggaaactgaccaagttgggaatcagattgaggctgtctatgaggaaaatgaggatgaccaaactggaggtgataatcatgttcaatcaggtcagggtatggatcttattgcgattgctttagaggaaagttctgatgatgaacatgaatttgaaagatctgacagtatcttgcaagaacaagtggaatctgggagcttaattgataaagtgattgaagatagggtagagcagctggaggccagcaggaaggctgagaacacagagaagaagctgaaggtgtcaatgaaaccgttggagtgggcagaggagcttgagaagaggcaggcctcgtctggtcaacattgggaggaaggagcagctgcgcagcccatgcaactagagggaatcggaaagggcccaccagctatcggttacatgcaaattgagatggacaatccagtaacccgtgtcatgtcctcaccgtcatttaggtcagaccatggctctccccaggtgctggctgttcataggagctatatagcaatgggcacatctaaaggtgctgtcatcgtcattccaagcaaatactccattcatcaagctgatgatacagatgcaaagatgctgttcttttggaaccaaggcgagaagactcaatcaccagtgactgccatgtgctttaaccagcaaggggaccttctgctagtaggatatggtgatggtcatatgacaatttgggatgtacagaaatctgcagcagcaaaagttatatatggcgagcatacagcaccagtagtgcatgcttgttttatccgccaatctaaagccatcactggggattcaaaaggggtagttctattgcacacattttccattatccccgtaattaatcgtttaactgtcaagggaactcagcgtctttttgatgggaatactggaattgtgctctcagcctgtcctcttgtaatggatgaatcttttggttttagtaattcatctgcccagggaaatcagacaacttcctccagtggtggtcttggcagcatgatgggtggtgttgttggaggcgtggttggagtagattctggatggaagtttttcaacgaaggctcttctccaatggaggatggtgttgtagtcatgtttattatgcatcaacatgctcttgtgactccgtaccaatattgaccatgttgaccatattgagaccttctctagaccagatggagcacgtgagggctccatcgcgtatgctgcgtggaaatatacatcatatttgaatgaatcgtcatcagtagatgaagaacgagtgtcatggctagcacttgcatgggaccgtcaagtgcaagttgcaaagtttgttaaatcaaagatatttaaacacaaagagtggaagcttgatagttcagctgttggtgttgcctggttagacgaccagatgttagttgtccttaatttgagagggcaactctgtttattctctaaagatggcagtgagcttcgcagaactacctttgttcctgatggccttctttttgatgacaccatattgcaccatgcacatttttttaacaggtttggtaacccagagaggcattttaacagttcagtagcggtaagaggtgctacagtgtatattcttgggccatcttttctcacggtttcccgacttcttccatggaaagagcgaattgaagcactaaagagggctggcgattggatgggtgcactagacatggcaatgaggctttatgatggtcagacacagggtgttgttgatctcccaagaacggttgattctattagagatgccataatgccttacttagtagagttgctgctatcatatataagttatgtttttgaatatatttcaattgcgctgccaaatcatactggaaaagggggagaatcaggtgttctaatagaggcagatcgatccctgcttacacaaagagatgagcagtacgctcgtgtaggaggggttgcagttgagtattgtgtccacattggacggaatgatatccttttcgatacagtcttctctaagtttgctgctgcagaaagtggaggtatgtttctggaggtgctagagccttatatattgaaggatatgcttggttctctgccccctgagattatgcaagcactagtggagcattatagtggcaaagggtggttgcaacgagttgaacaatgcatccttcacatggatatttcttcattggactttaatcaggtagtcagactttgtcgtgaacatgggctatatggtgcactaatttatttatttaaccaaggcctgaatgatttccgtacaccactagaggaacttctatcagtcgttcagaacaccaacagtaaagatgatgcttctagtggatacaggatgcttgtttatctgaaatattgctttcagggtttggcatttcctccagggcatggaataattccccaatcccggcttcattcagtgagggaagaactccttcaatttctgcttgaagaatctaagccactcacttctgaagtatttaagggtttcaatgcttcttgtggaaagtgcctaaacatatgctatctgctatggttggatactgaagctactttggaagtcatcaaatgtgcttttgtacaggataactttgagtctagagatgaacttccgagtactgtcaatacatctgcttcagataatgaagatggtattgatgctggaagaccagagggccaaaatgctatggtacaaaatgtggttgatgccatcattgacatagttggtttggaaaatgatgtgattcggtctgttatgggtagaactgaatcagaattatggccttcggagaaggattttggctatttaatggagtttgtgtccttttttgtttctcacaaaagggctaatgcatctaagagggttgttatgcacattcttacttatctcatttcgtcatatgatgacacaagaacaaggattcagaaagaaaaagaagttcttcaactcttcaatgcggttccccgaaacgattggaattcggattttgtcttgaacctttgttcagatgctcatttttatcaggcctgtggtttgatatttacagccaggaatcagaatttggctgctttagatagttacatgaaggataaagaggaacctttccatgcttttatcttcattgataagaagttactagaattggttgacgatgaagctttgtcgtttcataccacagtaatatctcgctttcctgagctagtcaagctaagcagggaatgtgcatttgtcttggcgattgatcatttctgtgataagatacagcaaatattagcagagcttcgttctgaccgacacagcctctttcttttcttgaaaactgctattgaagtacacttgtctggaaaacttgacttcagtaagcttgaattaagaaacaaacaaactgttgaactccagtactcttctactgaagttgaagcttatcagcagaggctatcaaatctctccaagttatgccacaatcctgtttacatcgacgacgagttagttgagctttatctggagcttttatgtcagtatgagcgaaggtcagttctgaagtttctggagacttttgacagttacagattggaacggtgcttgcatctttgcctagattatggagttacagatgctgctgctttcttgcaagagagggttggtgatgttgggagtgcccttgaccttattctggctggacttgatgagaaaattagcttatttatctcttctgtggaaagtactttctctggcgtcgcatcaaaaagtatcgctgaaattaagcaaccagacatcgttctagaaatgagtgaggctcatccagtgcttgatgcattgcatgcctccattggattgtgccaaaggaattcacagcgcttggacccagaggaatctcagtccctttggttccaactccttgactccttctcagagccattaaaaaaactgtatgggatcaaggatgtaaatggaaaaggtgtcaagtccaattggagtgaagcatcaatggaacatctgaaggaaaaaggactatctcaacaaatgaggatttcaactaaacaaaagtgcctaaatgttctgcgaaaagtattttcacaatgtgttggagaaataatagaggccatggctgggtatattcccctaccggcaatcatggcaaaactgttatctgataatgggaatcaagagttcggtgatttcaaacttgtgatacacagaatgttatctatgtatctttacgaaaaaagaatactggaaacggctaagtcagtaattgaggatgactcattttacaccttgagcttattaaagagaggagtttgtcatgggtttgccccacagactttcgtatgctgcatatgcaactgttcactttctaaagaaggtgctatttcagccgtacgtttgttcagttgcgggcatgcaacacatcttcagtgtgagtctgagcagaccaggtcatccaatcaggaatccaaagagggatgccctgtttgtctctcaatgagtgatacgcaagctcgaagcaaatcacctatgtttgagaatgggctaatgaagtattctggggctgaacatgaagtgtcacatggcatgtatcagattcatgaagttgatcatgctgagagatctcgtgggcttcaacagatgtcacggtatgaaatactgaataatcttcagaaagcgcagaagtcctttcatatagaaaccgtacctccattgaaacttgcaccgccagctatataccatgagaagatacagaagaggaccacttcggttggtgaaactagcaaacattctgttagaagtcagaaaccccagaaaatttggcaaatgaaggagaaaaaatcaaaagaggctgggagtcatcatccacaaaagtcaagttttctacgttaatagaagaaaagattgctgatttgttaagtatgaaaccagatccaaactgattgttaatttgcttcatgccatcaccacgatcgaatcttcaagactacaaatttgtcagcgtgatggagcctgcccatcagtacatagcttttttttttgtcttggggatgcatcctgttggtgagatcctcttcccctgcaccatggtcagaggttctgtggagccaaggtgctttgggctagggaggaaattgtaacagtaaattttcatacagttcatcgtgattagttttgtgtacagagcagagcatacacgtggtgacatggtccctgtagagggacacattcgcagtaaaggtgggatgcctcgattcatactcaacaatgtaaagtaaaggtgggatacctcaattcatgatcattgtaaaatacgtgcacagtataacacaggagcactggctgagtggcatgtatccttgcagttcatcgcgattaatctctgtacagagctgttatactgtcggttttgatatcagttgcaattacacatctgctacagttttgtagtatcagatatcagaacacgtcgggcccgcagaacgcctggaagctcgtagttgtcggcgccgagcatcctgtcgccattgggttgcgctgtactgtactactactactacgcgtctgttgtctaggtgggag

SEQ ID NO: 49302 - DNA, 3455 bp, Zea Mays
gaaaaagctcgcaaaatcgcagcacactagcacagaaccttggacgcgaaggcgtcataccccgatgccggcgtcgtcgtcgccggcgatggcgtcgcagcatgcgccgccgaggcgggagctcgacctcgacgctttcctcccgtcctctccgacatcctccggggcctcggacgccgacccggccgacgatgaccaccgccgcgccgtcgacgacctgctccgcctcctctcctcctcagactcggactccgattccgaggagtctagccgcatcccaagcaccagcatccagacgctatcccgagtccaagccccggcgcctgtcgctgagccctcgccgtcgccttccccatccgcgtccccgtccccgaggagatccgcatcggccttgccgtcggagaccctctcctccctcgtcgcgagaaccttctcgagcaacggcgcttcctcgtcgtcgaagcccctcccctcgctcttccggggcgtccgccccagccccaaacccggcgccgcgcttgccgctgctgccgcagcgtcccgcgcggtcctcaccccacacgccgctgccatcaagtcgcgccgatcagtatcggcgcccgtggagaaagttctggaggaagaggggagtggctccgaaggctccaaggagttccttcccactgggagcttggaagcagaggtagaagagaagggtgattcggaagcggttgctgatgcgaccaagcaaactgcaggtgggaatgtgggtgcggaactgggagaggataaacaggcagaagtgggaggtgaagagaatgctgaggctataaagctggtggaggcaagtcctctggatgctctagctgcggaggattccagtgggcatgagcaaggtaatgatgccaatttggcggaaactgaccaagttgggaatcagattgaggctgtctatgaggaaaatgaggatgaccaaactggaggtgataatcatgttcaatcaggtcagggtatggatcttattgcgattgctttagaggaaagttctgatgatgaacatgaatttgaaagatctgacagtatcttgcaagaacaagtggaatctgggagcttaattgataaagtgattgaagatagggtagagcagctggaggccagcaggaaggctgagaacacagagaagaagctgaaggtgtcaatgaaaccgttggagtgggcagaggagcttgagaagaggcaggcctcgtctggtcaacattgggaggaaggagcagctgcgcagcccatgcaactagagggaatcggaaagggcccaccagctatcggttacatgcaaattgagatggacaatccagtaacccgtgtcatgtcctcaccgtcatttaggtcagaccatggctctccccaggtgctggctgttcataggagctatatagcaatgggcacatctaaaggtgctgtcatcgtcattccaagcaaatactccattcatcaagctgatgatacagatgcaaagatgctgttcttttggaaccaaggcgagaagactcaatcaccagtgactgccatgtgctttaaccagcaaggggaccttctgctagtaggatatggtgatggtcatatgacaatttgggatgtacagaaatctgcagcagcaaaagttatatatggcgagcatacagcaccagtagtgcatgcttgttttatccgccaatctaaagccatcactggggattcaaaaggggtagttctattgcacacattttccattatccccgtaattaatcgtttaactgtcaagggaactcagcgtctttttgatgggaatactggaattgtgctctcagcctgtcctcttgtaatggatgaatcttttggttttagtaattcatctgcccagggaaatcagacaacttcctccagtggtggtcttggcagcatgatgggtggtgttgttggaggcgtggttggagtagattctggatggaagtttttcaacgaaggctcttctccaatggaggatggtgttgtagtcatgtttattatgcatcaacatgctcttgtggttagactccgtaccaatattgaccatgttgaccatattgagaccttctctagaccagatggagcacgtgagggctccatcgcgtatgctgcgtggaaatatacatcatatttgaatgaatcgtcatcagtagatgaagaacgagtgtcatggctagcacttgcatgggaccgtcaagtgcaagttgcaaagtttgttaaatcaaagatatttaaacacaaagagtggaagcttgatagttcagctgttggtgttgcctggttagacgaccagatgttagttgtccttaatttgagagggcaactctgtttattctctaaagatggcagtgagcttcgcagaactacctttgttcctgatggccttctttttgatgacaccatattgcaccatgcacatttttttaacaggtttggtaacccagagaggcattttaacagttcagtagcggtaagaggtgctacagtgtatattcttgggccatcttttctcacggtttcccgacttcttccatggaaagagcgaattgaagcactaaagagggctggcgattggatgggtgcactagacatggcaatgaggctttatgatggtcagacacagggtgttgttgatctcccaagaacggttgattctattagagatgccataatgccttacttagtagagttgctgctatcatatataagttatgtttttgaatatatttcaattgcgctgccaaatcatactggaaaagggggagaatcaggtgttctaatagaggcagatcgatccctgcttacacaaagagatgagcagtacgctcgtgtaggaggggttgcagttgagtattgtgtccacattggacggaatgatatccttttcgatacagtcttctctaagtttgctgctgcagaaagtggaggtatgtttctggaggtgctagagccttatatattgaaggatatgcttggttctctgccccctgagattatgcaagcactagtggagcattatagtggcaaagggtggttgcaacgagttgaacaatgcatccttcacatggatatttcttcattggactttaatcaggtagtcagactttgtcgtgaacatgggctatatggtgcactaatttatttatttaaccaaggcctgaatgatttccgtacaccactagaggaacttctatcagtcgttcagaacaccaacagtaaagatgatgcttctagtggaatataacaaattaatcttgatttgccccctcattcttctggtacacagttctagtcaagctagatcgtgttctttgctcagttgactggtaattgctcttccccaatgttttacttcagagtactgcttcctaggattctgaccattgccccttgctcttggggcttagggataataaatctggaaagcgaag

SEQ ID NO: 49303 - DNA, 3450 bp, Zea Mays
gaaaaagctcgcaaaatcgcagcacactagcacagaaccttggacgcgaaggcgtcataccccgatgccggcgtcgtcgtcgccggcgatggcgtcgcagcatgcgccgccgaggcgggagctcgacctcgacgctttcctcccgtcctctccgacatcctccggggcctcggacgccgacccggccgacgatgaccaccgccgcgccgtcgacgacctgctccgcctcctctcctcctcagactcggactccgattccgaggagtctagccgcatcccaagcaccagcatccagacgctatcccgagtccaagccccggcgcctgtcgctgagccctcgccgtcgccttccccatccgcgtccccgtccccgaggagatccgcatcggccttgccgtcggagaccctctcctccctcgtcgcgagaaccttctcgagcaacggcgcttcctcgtcgtcgaagcccctcccctcgctcttccggggcgtccgccccagccccaaacccggcgccgcgcttgccgctgctgccgcagcgtcccgcgcggtcctcaccccacacgccgctgccatcaagtcgcgccgatcagtatcggcgcccgtggagaaagttctggaggaagaggggagtggctccgaaggctccaaggagttccttcccactgggagcttggaagcagaggtagaagagaagggtgattcggaagcggttgctgatgcgaccaagcaaactgcaggtgggaatgtgggtgcggaactgggagaggataaacaggcagaagtgggaggtgaagagaatgctgaggctataaagctggtggaggcaagtcctctggatgctctagctgcggaggattccagtgggcatgagcaaggtaatgatgccaatttggcggaaactgaccaagttgggaatcagattgaggctgtctatgaggaaaatgaggatgaccaaactggaggtgataatcatgttcaatcaggtcagggtatggatcttattgcgattgctttagaggaaagttctgatgatgaacatgaatttgaaagatctgacagtatcttgcaagaacaagtggaatctgggagcttaattgataaagtgattgaagatagggtagagcagctggaggccagcaggaaggctgagaacacagagaagaagctgaaggtgtcaatgaaaccgttggagtgggcagaggagcttgagaagaggcaggcctcgtctggtcaacattgggaggaaggagcagctgcgcagcccatgcaactagagggaatcggaaagggcccaccagctatcggttacatgcaaattgagatggacaatccagtaacccgtgtcatgtcctcaccgtcatttaggtcagaccatggctctccccaggtgctggctgttcataggagctatatagcaatgggcacatctaaaggtgctgtcatcgtcattccaagcaaatactccattcatcaagctgatgatacagatgcaaagatgctgttcttttggaaccaaggcgagaagactcaatcaccagtgactgccatgtgctttaaccagcaaggggaccttctgctagtaggatatggtgatggtcatatgacaatttgggatgtacagaaatctgcagcagcaaaagttatatatggcgagcatacagcaccagtagtgcatgcttgttttatccgccaatctaaagccatcactggggattcaaaaggggtagttctattgcacacattttccattatccccgtaattaatcgtttaactgtcaagggaactcagcgtctttttgatgggaatactggaattgtgctctcagcctgtcctcttgtaatggatgaatcttttggttttagtaattcatctgcccagggaaatcagacaacttcctccagtggtggtcttggcagcatgatgggtggtgttgttggaggcgtggttggagtagattctggatggaagtttttcaacgaaggctcttctccaatggaggatggtgttgtagtcatgtttattatgcatcaacatgctcttgtgactccgtaccaatattgaccatgttgaccatattgagaccttctctagaccagatggagcacgtgagggctccatcgcgtatgctgcgtggaaatatacatcatatttgaatgaatcgtcatcagtagatgaagaacgagtgtcatggctagcacttgcatgggaccgtcaagtgcaagttgcaaagtttgttaaatcaaagatatttaaacacaaagagtggaagcttgatagttcagctgttggtgttgcctggttagacgaccagatgttagttgtccttaatttgagagggcaactctgtttattctctaaagatggcagtgagcttcgcagaactacctttgttcctgatggccttctttttgatgacaccatattgcaccatgcacatttttttaacaggtttggtaacccagagaggcattttaacagttcagtagcggtaagaggtgctacagtgtatattcttgggccatcttttctcacggtttcccgacttcttccatggaaagagcgaattgaagcactaaagagggctggcgattggatgggtgcactagacatggcaatgaggctttatgatggtcagacacagggtgttgttgatctcccaagaacggttgattctattagagatgccataatgccttacttagtagagttgctgctatcatatataagttatgtttttgaatatatttcaattgcgctgccaaatcatactggaaaagggggagaatcaggtgttctaatagaggcagatcgatccctgcttacacaaagagatgagcagtacgctcgtgtaggaggggttgcagttgagtattgtgtccacattggacggaatgatatccttttcgatacagtcttctctaagtttgctgctgcagaaagtggaggtatgtttctggaggtgctagagccttatatattgaaggatatgcttggttctctgccccctgagattatgcaagcactagtggagcattatagtggcaaagggtggttgcaacgagttgaacaatgcatccttcacatggatatttcttcattggactttaatcaggtagtcagactttgtcgtgaacatgggctatatggtgcactaatttatttatttaaccaaggcctgaatgatttccgtacaccactagaggaacttctatcagtcgttcagaacaccaacagtaaagatgatgcttctagtggaatataacaaattaatcttgatttgccccctcattcttctggtacacagttctagtcaagctagatcgtgttctttgctcagttgactggtaattgctcttccccaatgttttacttcagagtactgcttcctaggattctgaccattgccccttgctcttggggcttagggataataaatctggaaagcgaag

SEQ ID NO: 49304 - DNA, 6500 bp, Zea Mays
gaaaaagctcgcaaaatcgcagcacactagcacagaaccttggacgcgaaggcgtcataccccgatgccggcgtcgtcgtcgccggcgatggcgtcgcagcatgcgccgccgaggcgggagctcgacctcgacgctttcctcccgtcctctccgacatcctccggggcctcggacgccgacccggccgacgatgaccaccgccgcgccgtcgacgacctgctccgcctcctctcctcctcagactcggactccgattccgaggagtctagccgcatcccaagcaccagcatccagacgctatcccgagtccaagccccggcgcctgtcgctgagccctcgccgtcgccttccccatccgcgtccccgtccccgaggagatccgcatcggccttgccgtcggagaccctctcctccctcgtcgcgagaaccttctcgagcaacggcgcttcctcgtcgtcgaagcccctcccctcgctcttccggggcgtccgccccagccccaaacccggcgccgcgcttgccgctgctgccgcagcgtcccgcgcggtcctcaccccacacgccgctgccatcaagtcgcgccgatcagtatcggcgcccgtggagaaagttctggaggaagaggggagtggctccgaaggctccaaggagttccttcccactgggagcttggaagcagaggtagaagagaagggtgattcggaagcggttgctgatgcgaccaagcaaactgcaggtgggaatgtgggtgcggaactgggagaggataaacaggcagaagtgggaggtgaagagaatgctgaggctataaagctggtggaggcaagtcctctggatgctctagctgcggaggattccagtgggcatgagcaaggtaatgatgccaatttggcggaaactgaccaagttgggaatcagattgaggctgtctatgaggaaaatgaggatgaccaaactggaggtgataatcatgttcaatcaggtcagggtatggatcttattgcgattgctttagaggaaagttctgatgatgaacatgaatttgaaagatctgacagtatcttgcaagaacaagtggaatctgggagcttaattgataaagtgattgaagatagggtagagcagctggaggccagcaggaaggctgagaacacagagaagaagctgaaggtgtcaatgaaaccgttggagtgggcagaggagcttgagaagaggcaggcctcgtctggtcaacattgggaggaaggagcagctgcgcagcccatgcaactagagggaatcggaaagggcccaccagctatcggttacatgcaaattgagatggacaatccagtaacccgtgtcatgtcctcaccgtcatttaggtcagaccatggctctccccaggtgctggctgttcataggagctatatagcaatgggcacatctaaaggtgctgtcatcgtcattccaagcaaatactccattcatcaagctgatgatacagatgcaaagatgctgttcttttggaaccaaggcgagaagactcaatcaccagtgactgccatgtgctttaaccagcaaggggaccttctgctagtaggatatggtgatggtcatatgacaatttgggatgtacagaaatctgcagcagcaaaagttatatatggcgagcatacagcaccagtagtgcatgcttgttttatccgccaatctaaagccatcactggggattcaaaaggggtagttctattgcacacattttccattatccccgtaattaatcgtttaactgtcaagggaactcagcgtctttttgatgggaatactggaattgtgctctcagcctgtcctcttgtaatggatgaatcttttggttttagtaattcatctgcccagggaaatcagacaacttcctccagtggtggtcttggcagcatgatgggtggtgttgttggaggcgtggttggagtagattctggatggaagtttttcaacgaaggctcttctccaatggaggatggtgttgtagtcatgtttattatgcatcaacatgctcttgtggttagactccgtaccaatattgaccatgttgaccatattgagaccttctctagaccagatggagcacgtgagggctccatcgcgtatgctgcgtggaaatatacatcatatttgaatgaatcgtcatcagtagatgaagaacgagtgtcatggctagcacttgcatgggaccgtcaagtgcaagttgcaaagtttgttaaatcaaagatatttaaacacaaagagtggaagcttgatagttcagctgttggtgttgcctggttagacgaccagatgttagttgtccttaatttgagagggcaactctgtttattctctaaagatggcagtgagcttcgcagaactacctttgttcctgatggccttctttttgatgacaccatattgcaccatgcacatttttttaacaggtttggtaacccagagaggcattttaacagttcagtagcggtaagaggtgctacagtgtatattcttgggccatcttttctcacggtttcccgacttcttccatggaaagagcgaattgaagcactaaagagggctggcgattggatgggtgcactagacatggcaatgaggctttatgatggtcagacacagggtgttgttgatctcccaagaacggttgattctattagagatgccataatgccttacttagtagagttgctgctatcatatataagttatgtttttgaatatatttcaattgcgctgccaaatcatactggaaaagggggagaatcaggtgttctaatagaggcagatcgatccctgcttacacaaagagatgagcagtacgctcgtgtaggaggggttgcagttgagtattgtgtccacattggacggaatgatatccttttcgatacagtcttctctaagtttgctgctgcagaaagtggaggtatgtttctggaggtgctagagccttatatattgaaggatatgcttggttctctgccccctgagattatgcaagcactagtggagcattatagtggcaaagggtggttgcaacgagttgaacaatgcatccttcacatggatatttcttcattggactttaatcaggtagtcagactttgtcgtgaacatgggctatatggtgcactaatttatttatttaaccaaggcctgaatgatttccgtacaccactagaggaacttctatcagtcgttcagaacaccaacagtaaagatgatgcttctagtggatacaggatgcttgtttatctgaaatattgctttcagggtttggcatttcctccagggcatggaataattccccaatcccggcttcattcagtgagggaagaactccttcaatttctgcttgaagaatctaagccactcacttctgaagtatttaagggtttcaatgcttcttgtggaaagtgcctaaacatatgctatctgctatggttggatactgaagctactttggaagtcatcaaatgtgcttttgtacaggataactttgagtctagagatgaacttccgagtactgtcaatacatctgcttcagataatgaagatggtattgatgctggaagaccagagggccaaaatgctatggtacaaaatgtggttgatgccatcattgacatagttggtttggaaaatgatgtgattcggtctgttatgggtagaactgaatcagaattatggccttcggagaaggattttggctatttaatggagtttgtgtccttttttgtttctcacaaaagggctaatgcatctaagagggttgttatgcacattcttacttatctcatttcgtcatatgatgacacaagaacaaggattcagaaagaaaaagaagttcttcaactcttcaatgcggttccccgaaacgattggaattcggattttgtcttgaacctttgttcagatgctcatttttatcaggcctgtggtttgatatttacagccaggaatcagaatttggctgctttagatagttacatgaaggataaagaggaacctttccatgcttttatcttcattgataagaagttactagaattggttgacgatgaagctttgtcgtttcataccacagtaatatctcgctttcctgagctagtcaagctaagcagggaatgtgcatttgtcttggcgattgatcatttctgtgataagatacagcaaatattagcagagcttcgttctgaccgacacagcctctttcttttcttgaaaactgctattgaagtacacttgtctggaaaacttgacttcagtaagcttgaattaagaaacaaacaaactgttgaactccagtactcttctactgaagttgaagcttatcagcagaggctatcaaatctctccaagttatgccacaatcctgtttacatcgacgacgagttagttgagctttatctggagcttttatgtcagtatgagcgaaggtcagttctgaagtttctggagacttttgacagttacagattggaacggtgcttgcatctttgcctagattatggagttacagatgctgctgctttcttgcaagagagggttggtgatgttgggagtgcccttgaccttattctggctggacttgatgagaaaattagcttatttatctcttctgtggaaagtactttctctggcgtcgcatcaaaaagtatcgctgaaattaagcaaccagacatcgttctagaaatgagctcatccagtgcttgatgcattgcatgcctccattggattgtgccaaaggaattcacagcgcttggacccagaggaatctcagtccctttggttccaactccttgactccttctcagagccattaaaaaaactgtatgggatcaaggatgtaaatggaaaaggtgtcaagtccaattggagtgaagcatcaatggaacatctgaaggaaaaaggactatctcaacaaatgaggatttcaactaaacaaaagtgcctaaatgttctgcgaaaagtattttcacaatgtgttggagaaataatagaggccatggctgggtatattcccctaccggcaatcatggcaaaactgttatctgataatgggaatcaagagttcggtgatttcaaacttgtgatacacagaatgttatctatgtatctttacgaaaaaagaatactggaaacggctaagtcagtaattgaggatgactcattttacaccttgagcttattaaagagaggagtttgtcatgggtttgccccacagactttcgtatgctgcatatgcaactgttcactttctaaagaaggtgctatttcagccgtacgtttgttcagttgcgggcatgcaacacatcttcagtgtgagtctgagcagaccaggtcatccaatcaggaatccaaagagggatgccctgtttgtctctcaatgagtgatacgcaagctcgaagcaaatcacctatgtttgagaatgggctaatgaagtattctggggctgaacatgaagtgtcacatggcatgtatcagattcatgaagttgatcatgctgagagatctcgtgggcttcaacagatgtcacggtatgaaatactgaataatcttcagaaagcgcagaagtcctttcatatagaaaccgtacctccattgaaacttgcaccgccagctatataccatgagaagatacagaagaggaccacttcggttggtgaaactagcaaacattctgttagaagtcagaaaccccagaaaatttggcaaatgaaggagaaaaaatcaaaagaggctgggagtcatcatccacaaaagtcaagttttctacgttaatagaagaaaagattgctgatttgttaagtatgaaaccagatccaaactgattgttaatttgcttcatgccatcaccacgatcgaatcttcaagactacaaatttgtcagcgtgatggagcctgcccatcagtacatagcttttttttttgtcttggggatgcatcctgttggtgagatcctcttcccctgcaccatggtcagaggttctgtggagccaaggtgctttgggctagggaggaaattgtaacagtaaattttcatacagttcatcgtgattagttttgtgtacagagcagagcatacacgtggtgacatggtccctgtagagggacacattcgcagtaaaggtgggatgcctcgattcatactcaacaatgtaaagtaaaggtgggatacctcaattcatgatcattgtaaaatacgtgcacagtataacacaggagcactggctgagtggcatgtatccttgcagttcatcgcgattaatctctgtacagagctgttatactgtcggttttgatatcagttgcaattacacatctgctacagttttgtagtatcagatatcagaacacgtcgggcccgcagaacgcctggaagctcgtagttgtcggcgccgagcatcctgtcgccattgggttgcgctgtactgtactactactactacgcgtctgttgtctaggtgggag

SEQ ID NO: 49305 - DNA, 6534 bp, Zea Mays
gaaaaagctcgcaaaatcgcagcacactagcacagaaccttggacgcgaaggcgtcataccccgatgccggcgtcgtcgtcgccggcgatggcgtcgcagcatgcgccgccgaggcgggagctcgacctcgacgctttcctcccgtcctctccgacatcctccggggcctcggacgccgacccggccgacgatgaccaccgccgcgccgtcgacgacctgctccgcctcctctcctcctcagactcggactccgattccgaggagtctagccgcatcccaagcaccagcatccagacgctatcccgagtccaagccccggcgcctgtcgctgagccctcgccgtcgccttccccatccgcgtccccgtccccgaggagatccgcatcggccttgccgtcggagaccctctcctccctcgtcgcgagaaccttctcgagcaacggcgcttcctcgtcgtcgaagcccctcccctcgctcttccggggcgtccgccccagccccaaacccggcgccgcgcttgccgctgctgccgcagcgtcccgcgcggtcctcaccccacacgccgctgccatcaagtcgcgccgatcagtatcggcgcccgtggagaaagttctggaggaagaggggagtggctccgaaggctccaaggagttccttcccactgggagcttggaagcagaggtagaagagaagggtgattcggaagcggttgctgatgcgaccaagcaaactgcaggtgggaatgtgggtgcggaactgggagaggataaacaggcagaagtgggaggtgaagagaatgctgaggctataaagctggtggaggcaagtcctctggatgctctagctgcggaggattccagtgggcatgagcaaggtaatgatgccaatttggcggaaactgaccaagttgggaatcagattgaggctgtctatgaggaaaatgaggatgaccaaactggaggtgataatcatgttcaatcaggtcagggtatggatcttattgcgattgctttagaggaaagttctgatgatgaacatgaatttgaaagatctgacagtatcttgcaagaacaagtggaatctgggagcttaattgataaagtgattgaagatagggtagagcagctggaggccagcaggaaggctgagaacacagagaagaagctgaaggtgtcaatgaaaccgttggagtgggcagaggagcttgagaagaggcaggcctcgtctggtcaacattgggaggaaggagcagctgcgcagcccatgcaactagagggaatcggaaagggcccaccagctatcggttacatgcaaattgagatggacaatccagtaacccgtgtcatgtcctcaccgtcatttaggtcagaccatggctctccccaggtgctggctgttcataggagctatatagcaatgggcacatctaaaggtgctgtcatcgtcattccaagcaaatactccattcatcaagctgatgatacagatgcaaagatgctgttcttttggaaccaaggcgagaagactcaatcaccagtgactgccatgtgctttaaccagcaaggggaccttctgctagtaggatatggtgatggtcatatgacaatttgggatgtacagaaatctgcagcagcaaaagttatatatggcgagcatacagcaccagtagtgcatgcttgttttatccgccaatctaaagccatcactggggattcaaaaggggtagttctattgcacacattttccattatccccgtaattaatcgtttaactgtcaagggaactcagcgtctttttgatgggaatactggaattgtgctctcagcctgtcctcttgtaatggatgaatcttttggttttagtaattcatctgcccagggaaatcagacaacttcctccagtggtggtcttggcagcatgatgggtggtgttgttggaggcgtggttggagtagattctggatggaagtttttcaacgaaggctcttctccaatggaggatggtgttgtagtcatgtttattatgcatcaacatgctcttgtggttagactccgtaccaatattgaccatgttgaccatattgagaccttctctagaccagatggagcacgtgagggctccatcgcgtatgctgcgtggaaatatacatcatatttgaatgaatcgtcatcagtagatgaagaacgagtgtcatggctagcacttgcatgggaccgtcaagtgcaagttgcaaagtttgttaaatcaaagatatttaaacacaaagagtggaagcttgatagttcagctgttggtgttgcctggttagacgaccagatgttagttgtccttaatttgagagggcaactctgtttattctctaaagatggcagtgagcttcgcagaactacctttgttcctgatggccttctttttgatgacaccatattgcaccatgcacatttttttaacaggtttggtaacccagagaggcattttaacagttcagtagcggtaagaggtgctacagtgtatattcttgggccatcttttctcacggtttcccgacttcttccatggaaagagcgaattgaagcactaaagagggctggcgattggatgggtgcactagacatggcaatgaggctttatgatggtcagacacagggtgttgttgatctcccaagaacggttgattctattagagatgccataatgccttacttagtagagttgctgctatcatatataagttatgtttttgaatatatttcaattgcgctgccaaatcatactggaaaagggggagaatcaggtgttctaatagaggcagatcgatccctgcttacacaaagagatgagcagtacgctcgtgtaggaggggttgcagttgagtattgtgtccacattggacggaatgatatccttttcgatacagtcttctctaagtttgctgctgcagaaagtggaggtatgtttctggaggtgctagagccttatatattgaaggatatgcttggttctctgccccctgagattatgcaagcactagtggagcattatagtggcaaagggtggttgcaacgagttgaacaatgcatccttcacatggatatttcttcattggactttaatcaggtagtcagactttgtcgtgaacatgggctatatggtgcactaatttatttatttaaccaaggcctgaatgatttccgtacaccactagaggaacttctatcagtcgttcagaacaccaacagtaaagatgatgcttctagtggatacaggatgcttgtttatctgaaatattgctttcagggtttggcatttcctccagggcatggaataattccccaatcccggcttcattcagtgagggaagaactccttcaatttctgcttgaagaatctaagccactcacttctgaagtatttaagggtttcaatgcttcttgtggaaagtgcctaaacatatgctatctgctatggttggatactgaagctactttggaagtcatcaaatgtgcttttgtacaggataactttgagtctagagatgaacttccgagtactgtcaatacatctgcttcagataatgaagatggtattgatgctggaagaccagagggccaaaatgctatggtacaaaatgtggttgatgccatcattgacatagttggtttggaaaatgatgtgattcggtctgttatgggtagaactgaatcagaattatggccttcggagaaggattttggctatttaatggagtttgtgtccttttttgtttctcacaaaagggctaatgcatctaagagggttgttatgcacattcttacttatctcatttcgtcatatgatgacacaagaacaaggattcagaaagaaaaagaagttcttcaactcttcaatgcggttccccgaaacgattggaattcggattttgtcttgaacctttgttcagatgctcatttttatcaggcctgtggtttgatatttacagccaggaatcagaatttggctgctttagatagttacatgaaggataaagaggaacctttccatgcttttatcttcattgataagaagttactagaattggttgacgatgaagctttgtcgtttcataccacagtaatatctcgctttcctgagctagtcaagctaagcagggaatgtgcatttgtcttggcgattgatcatttctgtgataagatacagcaaatattagcagagcttcgttctgaccgacacagcctctttcttttcttgaaaactgctattgaagtacacttgtctggaaaacttgacttcagtaagcttgaattaagaaacaaacaaactgttgaactccagtactcttctactgaagttgaagcttatcagcagaggctatcaaatctctccaagttatgccacaatcctgtttacatcgacgacgagttagttgagctttatctggagttacagattggaacggtgcttgcatctttgcctagattatggagttacagatgctgctgctttcttgcaagagagggttggtgatgttgggagtgcccttgaccttattctggctggacttgatgagaaaattagcttatttatctcttctgtggaaagtactttctctggcgtcgcatcaaaaagtatcgctgaaattaagcaaccagacatcgttctagaaatgagtgaggtttatttctcacacatttgaattcttgtctaggtttttaacttctcctgtgcaggtattaacattttcaacctatttgtttaaggctcatccagtgcttgatgcattgcatgcctccattggattgtgccaaaggaattcacagcgcttggacccagaggaatctcagtccctttggttccaactccttgactccttctcagagccattaaaaaaactgtatgggatcaaggatgtaaatggaaaaggtgtcaagtccaattggagtgaagcatcaatggaacatctgaaggaaaaaggactatctcaacaaatgaggatttcaactaaacaaaagtgcctaaatgttctgcgaaaagtattttcacaatgtgttggagaaataatagaggccatggctgggtatattcccctaccggcaatcatggcaaaactgttatctgataatgggaatcaagagttcggtgatttcaaacttgtgatacacagaatgttatctatgtatctttacgaaaaaagaatactggaaacggctaagtcagtaattgaggatgactcattttacaccttgagcttattaaagagaggagtttgtcatgggtttgccccacagactttcgtatgctgcatatgcaactgttcactttctaaagaaggtgctatttcagccgtacgtttgttcagttgcgggcatgcaacacatcttcagtgtgagtctgagcagaccaggtcatccaatcaggaatccaaagagggatgccctgtttgtctctcaatgagtgatacgcaagctcgaagcaaatcacctatgtttgagaatgggctaatgaagtattctggggctgaacatgaagtgtcacatggcatgtatcagattcatgaagttgatcatgctgagagatctcgtgggcttcaacagatgtcacggtatgaaatactgaataatcttcagaaagcgcagaagtcctttcatatagaaaccgtacctccattgaaacttgcaccgccagctatataccatgagaagatacagaagaggaccacttcggttggtgaaactagcaaacattctgttagaagtcagaaaccccagaaaatttggcaaatgaaggagaaaaaatcaaaagaggctgggagtcatcatccacaaaagtcaagttttctacgttaatagaagaaaagattgctgatttgttaagtatgaaaccagatccaaactgattgttaatttgcttcatgccatcaccacgatcgaatcttcaagactacaaatttgtcagcgtgatggagcctgcccatcagtacatagcttttttttttgtcttggggatgcatcctgttggtgagatcctcttcccctgcaccatggtcagaggttctgtggagccaaggtgctttgggctagggaggaaattgtaacagtaaattttcatacagttcatcgtgattagttttgtgtacagagcagagcatacacgtggtgacatggtccctgtagagggacacattcgcagtaaaggtgggatgcctcgattcatactcaacaatgtaaagtaaaggtgggatacctcaattcatgatcattgtaaaatacgtgcacagtataacacaggagcactggctgagtggcatgtatccttgcagttcatcgcgattaatctctgtacagagctgttatactgtcggttttgatatcagttgcaattacacatctgctacagttttgtagtatcagatatcagaacacgtcgggcccgcagaacgcctggaagctcgtagttgtcggcgccgagcatcctgtcgccattgggttgcgctgtactgtactactactactacgcgtctgttgtctaggtgggag

SEQ ID NO: 49306 - DNA, 6498 bp, Zea Mays
gaaaaagctcgcaaaatcgcagcacactagcacagaaccttggacgcgaaggcgtcataccccgatgccggcgtcgtcgtcgccggcgatggcgtcgcagcatgcgccgccgaggcgggagctcgacctcgacgctttcctcccgtcctctccgacatcctccggggcctcggacgccgacccggccgacgatgaccaccgccgcgccgtcgacgacctgctccgcctcctctcctcctcagactcggactccgattccgaggagtctagccgcatcccaagcaccagcatccagacgctatcccgagtccaagccccggcgcctgtcgctgagccctcgccgtcgccttccccatccgcgtccccgtccccgaggagatccgcatcggccttgccgtcggagaccctctcctccctcgtcgcgagaaccttctcgagcaacggcgcttcctcgtcgtcgaagcccctcccctcgctcttccggggcgtccgccccagccccaaacccggcgccgcgcttgccgctgctgccgcagcgtcccgcgcggtcctcaccccacacgccgctgccatcaagtcgcgccgatcagtatcggcgcccgtggagaaagttctggaggaagaggggagtggctccgaaggctccaaggagttccttcccactgggagcttggaagcagaggtagaagagaagggtgattcggaagcggttgctgatgcgaccaagcaaactgcaggtgggaatgtgggtgcggaactgggagaggataaacaggcagaagtgggaggtgaagagaatgctgaggctataaagctggtggaggcaagtcctctggatgctctagctgcggaggattccagtgggcatgagcaaggtaatgatgccaatttggcggaaactgaccaagttgggaatcagattgaggctgtctatgaggaaaatgaggatgaccaaactggaggtgataatcatgttcaatcaggtcagggtatggatcttattgcgattgctttagaggaaagttctgatgatgaacatgaatttgaaagatctgacagtatcttgcaagaacaagtggaatctgggagcttaattgataaagtgattgaagatagggtagagcagctggaggccagcaggaaggctgagaacacagagaagaagctgaaggtgtcaatgaaaccgttggagtgggcagaggagcttgagaagaggcaggcctcgtctggtcaacattgggaggaaggagcagctgcgcagcccatgcaactagagggaatcggaaagggcccaccagctatcggttacatgcaaattgagatggacaatccagtaacccgtgtcatgtcctcaccgtcatttaggtcagaccatggctctccccaggtgctggctgttcataggagctatatagcaatgggcacatctaaaggtgctgtcatcgtcattccaagcaaatactccattcatcaagctgatgatacagatgcaaagatgctgttcttttggaaccaaggcgagaagactcaatcaccagtgactgccatgtgctttaaccagcaaggggaccttctgctagtaggatatggtgatggtcatatgacaatttgggatgtacagaaatctgcagcagcaaaagttatatatggcgagcatacagcaccagtagtgcatgcttgttttatccgccaatctaaagccatcactggggattcaaaaggggtagttctattgcacacattttccattatccccgtaattaatcgtttaactgtcaagggaactcagcgtctttttgatgggaatactggaattgtgctctcagcctgtcctcttgtaatggatgaatcttttggttttagtaattcatctgcccagggaaatcagacaacttcctccagtggtggtcttggcagcatgatgggtggtgttgttggaggcgtggttggagtagattctggatggaagtttttcaacgaaggctcttctccaatggaggatggtgttgtagtcatgtttattatgcatcaacatgctcttgtggttagactccgtaccaatattgaccatgttgaccatattgagaccttctctagaccagatggagcacgtgagggctccatcgcgtatgctgcgtggaaatatacatcatatttgaatgaatcgtcatcagtagatgaagaacgagtgtcatggctagcacttgcatgggaccgtcaagtgcaagttgcaaagtttgttaaatcaaagatatttaaacacaaagagtggaagcttgatagttcagctgttggtgttgcctggttagacgaccagatgttagttgtccttaatttgagagggcaactctgtttattctctaaagatggcagtgagcttcgcagaactacctttgttcctgatggccttctttttgatgacaccatattgcaccatgcacatttttttaacaggtttggtaacccagagaggcattttaacagttcagtagcggtaagaggtgctacagtgtatattcttgggccatcttttctcacggtttcccgacttcttccatggaaagagcgaattgaagcactaaagagggctggcgattggatgggtgcactagacatggcaatgaggctttatgatggtcagacacagggtgttgttgatctcccaagaacggttgattctattagagatgccataatgccttacttagtagagttgctgctatcatatataagttatgtttttgaatatatttcaattgcgctgccaaatcatactggaaaagggggagaatcaggtgttctaatagaggcagatcgatccctgcttacacaaagagatgagcagtacgctcgtgtaggaggggttgcagttgagtattgtgtccacattggacggaatgatatccttttcgatacagtcttctctaagtttgctgctgcagaaagtggaggtatgtttctggaggtgctagagccttatatattgaaggatatgcttggttctctgccccctgagattatgcaagcactagtggagcattatagtggcaaagggtggttgcaacgagttgaacaatgcatccttcacatggatatttcttcattggactttaatcaggtagtcagactttgtcgtgaacatgggctatatggtgcactaatttatttatttaaccaaggcctgaatgatttccgtacaccactagaggaacttctatcagtcgttcagaacaccaacagtaaagatgatgcttctagtggatacaggatgcttgtttatctgaaatattgctttcagggtttggcatttcctccagggcatggaataattccccaatcccggcttcattcagtgagggaagaactccttcaatttctgcttgaagaatctaagccactcacttctgaagtatttaagggtttcaatgcttcttgtggaaagtgcctaaacatatgctatctgctatggttggatactgaagctactttggaagtcatcaaatgtgcttttgtacaggataactttgagtctagagatgaacttccgagtactgtcaatacatctgcttcagataatgaagatggtattgatgctggaagaccagagggccaaaatgctatggtacaaaatgtggttgatgccatcattgacatagttggtttggaaaatgatgtgattcggtctgttatgggtagaactgaatcagaattatggccttcggagaaggattttggctatttaatggagtttgtgtccttttttgtttctcacaaaagggctaatgcatctaagagggttgttatgcacattcttacttatctcatttcgtcatatgatgacacaagaacaaggattcagaaagaaaaagaagttcttcaactcttcaatgcggttccccgaaacgattggaattcggattttgtcttgaacctttgttcagatgctcatttttatcaggcctgtggtttgatatttacagccaggaatcagaatttggctgctttagatagttacatgaaggataaagaggaacctttccatgcttttatcttcattgataagaagttactagaattggttgacgatgaagctttgtcgtttcataccacagtaatatctcgctttcctgagctagtcaagctaagcagggaatgtgcatttgtcttggcgattgatcatttctgtgataagatacagcaaatattagcagagcttcgttctgaccgacacagcctctttcttttcttgaaaactgctattgaagtacacttgtctggaaaacttgacttcagtaagcttgaattaagaaacaaacaaactgttgaactccagtactcttctactgaagttgaagcttatcagcagaggctatcaaatctctccaagttatgccacaatcctgtttacatcgacgacgagttagttgagctttatctggagcttttatgtcagtatgagcgaaggtcagttctgaagtttctggagacttttgacagttacagattggaacggtgcttgcatctttgcctagattatggagttacagatgctgctgctttcttgcaagagagggttggtgatgttgggagtgcccttgaccttattctggctggacttgatgagaaaattagcttatttatctcttctgtggaaagtactttctctggcgtcgcatcaaaaagtatcgctgaaattaagcaaccagacatcgttctagaaatgagtgaggctcatccagtgcttgatgcattgcatgcctccattggattgtgccaaaggaattcacagcgcttggacccagaggaatctcagtccctttggttccaactccttgactccttctcagagccattaaaaaaactgtatgggatcaaggatgtaaatggaaaaggtgtcaagtccaattggagtgaagcatcaatggaacatctgaaggaaaaaggactatctcaacaaatgaggatttcaactaaacaaaagtgcctaaatgttctgcgaaaagtattttcacaatgtgttggagaaataatagaggccatggctgggtatattcccctaccggcaatcatggcaaaactgttatctgataatgggaatcaagagttcggtgatttcaaacttgtgatacacagaatgttatctatgtatctttacgaaaaaagaatactggaaacggctaagtcagtaattgaggatgactcattttacaccttgagcttattaaagagaggagtttgtcatgggtttgccccacagactttcgtatgctgcatatgcaactgttcactttctaaagaaggtgctatttcagccgtacgtttgttcagttgcgggcatgcaacacatcttcagtgtgagtctgagcagaccaggtcatccaatcaggaatccaaagagggatgccctgtttgtctctcaatgagtgatacgcaagctcgaagcaaatcacctatgtttgagaatgggctaatgaagtattctggggctgaacatgaagtgtcacatggcatgtatcagattcatgaagttgatcatgctgagagatctcgtgggcttcaacagatgtcacggtatgaaatactgaataatcttcagaaagcgcagaagtcctttcatatagaaaccgtacctccattgaaacttgcaccgccagctatataccatgagaagatacagaagaggaccacttcggttggtgaaactagcaaacattctgttagaagtcagaaaccccagaaaatttggcaaatgaaggagaaaaaatcaaaagaggctgggagtcatcatccacaaaagtcaagttttctacgttaatagaagaaaagattgctgatttgttaagtatgaaaccagatccaaactgattgttaatttgcttcatgccatcaccacgatcgaatcttcaagactacaaatttgtcagcgtgatggagcctgcccatcagtacatagcttttttttttgtcttggggatgcatcctgttggtttatcatcttctgcttaattacaggttctgtggagccaaggtgctttgggctagggaggaaattgtaacagtaaattttcatacagttcatcgtgattagttttgtgtacagagcagagcatacacgtggtgacatggtccctgtagagggacacattcgcagtaaaggtgggatgcctcgattcatactcaacaatgtaaagtaaaggtgggatacctcaattcatgatcattgtaaaatacgtgcacagtataacacaggagcactggctgagtggcatgtatccttgcagttcatcgcgattaatctctgtacagagctgttatactgtcggttttgatatcagttgcaattacacatctgctacagttttgtagtatcagatatcagaacacgtcgggcccgcagaacgcctggaagctcgtagttgtcggcgccgagcatcctgtcgccattgggttgcgctgtactgtactactactactacgcgtctgttgtctaggtgggag

SEQ ID NO: 49307 - DNA, 6545 bp, Zea Mays
gaaaaagctcgcaaaatcgcagcacactagcacagaaccttggacgcgaaggcgtcataccccgatgccggcgtcgtcgtcgccggcgatggcgtcgcagcatgcgccgccgaggcgggagctcgacctcgacgctttcctcccgtcctctccgacatcctccggggcctcggacgccgacccggccgacgatgaccaccgccgcgccgtcgacgacctgctccgcctcctctcctcctcagactcggactccgattccgaggagtctagccgcatcccaagcaccagcatccagacgctatcccgagtccaagccccggcgcctgtcgctgagccctcgccgtcgccttccccatccgcgtccccgtccccgaggagatccgcatcggccttgccgtcggagaccctctcctccctcgtcgcgagaaccttctcgagcaacggcgcttcctcgtcgtcgaagcccctcccctcgctcttccggggcgtccgccccagccccaaacccggcgccgcgcttgccgctgctgccgcagcgtcccgcgcggtcctcaccccacacgccgctgccatcaagtcgcgccgatcagtatcggcgcccgtggagaaagttctggaggaagaggggagtggctccgaaggctccaaggagttccttcccactgggagcttggaagcagaggtagaagagaagggtgattcggaagcggttgctgatgcgaccaagcaaactgcaggtgggaatgtgggtgcggaactgggagaggataaacaggcagaagtgggaggtgaagagaatgctgaggctataaagctggtggaggcaagtcctctggatgctctagctgcggaggattccagtgggcatgagcaaggtaatgatgccaatttggcggaaactgaccaagttgggaatcagattgaggctgtctatgaggaaaatgaggatgaccaaactggaggtgataatcatgttcaatcaggtcagggtatggatcttattgcgattgctttagaggaaagttctgatgatgaacatgaatttgaaagatctgacagtatcttgcaagaacaagtggaatctgggagcttaattgataaagtgattgaagatagggtagagcagctggaggccagcaggaaggctgagaacacagagaagaagctgaaggtgtcaatgaaaccgttggagtgggcagaggagcttgagaagaggcaggcctcgtctggtcaacattgggaggaaggagcagctgcgcagcccatgcaactagagggaatcggaaagggcccaccagctatcggttacatgcaaattgagatggacaatccagtaacccgtgtcatgtcctcaccgtcatttaggtcagaccatggctctccccaggtgctggctgttcataggagctatatagcaatgggcacatctaaaggtgctgtcatcgtcattccaagcaaatactccattcatcaagctgatgatacagatgcaaagatgctgttcttttggaaccaaggcgagaagactcaatcaccagtgactgccatgtgctttaaccagcaaggggaccttctgctagtaggatatggtgatggtcatatgacaatttgggatgtacagaaatctgcagcagcaaaagttatatatggcgagcatacagcaccagtagtgcatgcttgttttatccgccaatctaaagccatcactggggattcaaaaggggtagttctattgcacacattttccattatccccgtaattaatcgtttaactgtcaagggaactcagcgtctttttgatgggaatactggaattgtgctctcagcctgtcctcttgtaatggatgaatcttttggttttagtaattcatctgcccagggaaatcagacaacttcctccagtggtggtcttggcagcatgatgggtggtgttgttggaggcgtggttggagtagattctggatggaagtttttcaacgaaggctcttctccaatggaggatggtgttgtagtcatgtttattatgcatcaacatgctcttgtggttagactccgtaccaatattgaccatgttgaccatattgagaccttctctagaccagatggagcacgtgagggctccatcgcgtatgctgcgtggaaatatacatcatatttgaatgaatcgtcatcagtagatgaagaacgagtgtcatggctagcacttgcatgggaccgtcaagtgcaagttgcaaagtttgttaaatcaaagatatttaaacacaaagagtggaagcttgatagttcagctgttggtgttgcctggttagacgaccagatgttagttgtccttaatttgagagggcaactctgtttattctctaaagatggcagtgagcttcgcagaactacctttgttcctgatggccttctttttgatgacaccatattgcaccatgcacatttttttaacaggtttggtaacccagagaggcattttaacagttcagtagcggtaagaggtgctacagtgtatattcttgggccatcttttctcacggtttcccgacttcttccatggaaagagcgaattgaagcactaaagagggctggcgattggatgggtgcactagacatggcaatgaggctttatgatggtcagacacagggtgttgttgatctcccaagaacggttgattctattagagatgccataatgccttacttagtagagttgctgctatcatatataagttatgtttttgaatatatttcaattgcgctgccaaatcatactggaaaagggggagaatcaggtgttctaatagaggcagatcgatccctgcttacacaaagagatgagcagtacgctcgtgtaggaggggttgcagttgagtattgtgtccacattggacggaatgatatccttttcgatacagtcttctctaagtttgctgctgcagaaagtggaggtatgtttctggaggtgctagagccttatatattgaaggatatgcttggttctctgccccctgagattatgcaagcactagtggagcattatagtggcaaagggtggttgcaacgagttgaacaatgcatccttcacatggatatttcttcattggactttaatcaggtagtcagactttgtcgtgaacatgggctatatggtgcactaatttatttatttaaccaaggcctgaatgatttccgtacaccactagaggaacttctatcagtcgttcagaacaccaacagtaaagatgatgcttctagtggatacaggatgcttgtttatctgaaatattgctttcagggtttggcatttcctccagggcatggaataattccccaatcccggcttcattcagtgagggaagaactccttcaatttctgcttgaagaatctaagccactcacttctgaagtatttaagggtttcaatgcttcttgtggaaagtgcctaaacatatgctatctgctatggttggatactgaagctactttggaagtcatcaaatgtgcttttgtacaggataactttgagtctagagatgaacttccgagtactgtcaatacatctgcttcagataatgaagatggtattgatgctggaagaccagagggccaaaatgctatggtacaaaatgtggttgatgccatcattgacatagttggtttggaaaatgatgtgattcggtctgttatgggtagaactgaatcagaattatggccttcggagaaggattttggctatttaatggagtttgtgtccttttttgtttctcacaaaagggctaatgcatctaagagggttgttatgcacattcttacttatctcatttcgtcatatgatgacacaagaacaaggattcagaaagaaaaagaagttcttcaactcttcaatgcggttccccgaaacgattggaattcggattttgtcttgaacctttgttcagatgctcatttttatcaggcctgtggtttgatatttacagccaggaatcagaatttggctgctttagatagttacatgaaggataaagaggaacctttccatgcttttatcttcattgataagaagttactagaattggttgacgatgaagctttgtcgtttcataccacagtaatatctcgctttcctgagctagtcaagctaagcagggaatgtgcatttgtcttggcgattgatcatttctgtgataagatacagcaaatattagcagagcttcgttctgaccgacacagcctctttcttttcttgaaaactgctattgaagtacacttgtctggaaaacttgacttcagtaagcttgaattaagaaacaaacaaactgttgaactccagtactcttctactgaagttgaagcttatcagcagaggctatcaaatctctccaagttatgccacaatcctgtttacatcgacgacgagttagttgagctttatctggagcttttatgtcagtatgagcgaaggtcagttctgaagtttctggagacttttgacagttacagattggaacggtgcttgcatctttgcctagattatggagttacagatgctgctgctttcttgcaagagagggttggtgatgttgggagtgcccttgaccttattctggctggacttgatgagaaaattagcttatttatctcttctgtggaaagtactttctctggcgtcgcatcaaaaagtatcgctgaaattaagcaaccagacatcgttctagaaatgagtgaggctcatccagtgcttgatgcattgcatgcctccattggattgtgccaaaggaattcacagcgcttggacccagaggaatctcagtccctttggttccaactccttgactcgaaattattcaatagcgcatctagaaagacaatgcgagcctattgctcttctcagagccattaaaaaaactgtatgggatcaaggatgtaaatggaaaaggtgtcaagtccaattggagtgaagcatcaatggaacatctgaaggaaaaaggactatctcaacaaatgaggatttcaactaaacaaaagtgcctaaatgttctgcgaaaagtattttcacaatgtgttggagaaataatagaggccatggctgggtatattcccctaccggcaatcatggcaaaactgttatctgataatgggaatcaagagttcggtgatttcaaacttgtgatacacagaatgttatctatgtatctttacgaaaaaagaatactggaaacggctaagtcagtaattgaggatgactcattttacaccttgagcttattaaagagaggagtttgtcatgggtttgccccacagactttcgtatgctgcatatgcaactgttcactttctaaagaaggtgctatttcagccgtacgtttgttcagttgcgggcatgcaacacatcttcagtgtgagtctgagcagaccaggtcatccaatcaggaatccaaagagggatgccctgtttgtctctcaatgagtgatacgcaagctcgaagcaaatcacctatgtttgagaatgggctaatgaagtattctggggctgaacatgaagtgtcacatggcatgtatcagattcatgaagttgatcatgctgagagatctcgtgggcttcaacagatgtcacggtatgaaatactgaataatcttcagaaagcgcagaagtcctttcatatagaaaccgtacctccattgaaacttgcaccgccagctatataccatgagaagatacagaagaggaccacttcggttggtgaaactagcaaacattctgttagaagtcagaaaccccagaaaatttggcaaatgaaggagaaaaaatcaaaagaggctgggagtcatcatccacaaaagtcaagttttctacgttaatagaagaaaagattgctgatttgttaagtatgaaaccagatccaaactgattgttaatttgcttcatgccatcaccacgatcgaatcttcaagactacaaatttgtcagcgtgatggagcctgcccatcagtacatagcttttttttttgtcttggggatgcatcctgttggtttatcatcttctgcttaattacaggttctgtggagccaaggtgctttgggctagggaggaaattgtaacagtaaattttcatacagttcatcgtgattagttttgtgtacagagcagagcatacacgtggtgacatggtccctgtagagggacacattcgcagtaaaggtgggatgcctcgattcatactcaacaatgtaaagtaaaggtgggatacctcaattcatgatcattgtaaaatacgtgcacagtataacacaggagcactggctgagtggcatgtatccttgcagttcatcgcgattaatctctgtacagagctgttatactgtcggttttgatatcagttgcaattacacatctgctacagttttgtagtatcagatatcagaacacgtcgggcccgcagaacgcctggaagctcgtagttgtcggcgccgagcatcctgtcgccattgggttgcgctgtactgtactactactactacgcgtctgttgtctaggtgggag

SEQ ID NO: 49308 - DNA, 6552 bp, Zea Mays
gaaaaagctcgcaaaatcgcagcacactagcacagaaccttggacgcgaaggcgtcataccccgatgccggcgtcgtcgtcgccggcgatggcgtcgcagcatgcgccgccgaggcgggagctcgacctcgacgctttcctcccgtcctctccgacatcctccggggcctcggacgccgacccggccgacgatgaccaccgccgcgccgtcgacgacctgctccgcctcctctcctcctcagactcggactccgattccgaggagtctagccgcatcccaagcaccagcatccagacgctatcccgagtccaagccccggcgcctgtcgctgagccctcgccgtcgccttccccatccgcgtccccgtccccgaggagatccgcatcggccttgccgtcggagaccctctcctccctcgtcgcgagaaccttctcgagcaacggcgcttcctcgtcgtcgaagcccctcccctcgctcttccggggcgtccgccccagccccaaacccggcgccgcgcttgccgctgctgccgcagcgtcccgcgcggtcctcaccccacacgccgctgccatcaagtcgcgccgatcagtatcggcgcccgtggagaaagttctggaggaagaggggagtggctccgaaggctccaaggagttccttcccactgggagcttggaagcagaggtagaagagaagggtgattcggaagcggttgctgatgcgaccaagcaaactgcaggtgggaatgtgggtgcggaactgggagaggataaacaggcagaagtgggaggtgaagagaatgctgaggctataaagctggtggaggcaagtcctctggatgctctagctgcggaggattccagtgggcatgagcaaggtaatgatgccaatttggcggaaactgaccaagttgggaatcagattgaggctgtctatgaggaaaatgaggatgaccaaactggaggtgataatcatgttcaatcaggtcagggtatggatcttattgcgattgctttagaggaaagttctgatgatgaacatgaatttgaaagatctgacagtatcttgcaagaacaagtggaatctgggagcttaattgataaagtgattgaagatagggtagagcagctggaggccagcaggaaggctgagaacacagagaagaagctgaaggtgtcaatgaaaccgttggagtgggcagaggagcttgagaagaggcaggcctcgtctggtcaacattgggaggaaggagcagctgcgcagcccatgcaactagagggaatcggaaagggcccaccagctatcggttacatgcaaattgagatggacaatccagtaacccgtgtcatgtcctcaccgtcatttaggtcagaccatggctctccccaggtgctggctgttcataggagctatatagcaatgggcacatctaaaggtgctgtcatcgtcattccaagcaaatactccattcatcaagctgatgatacagatgcaaagatgctgttcttttggaaccaaggcgagaagactcaatcaccagtgactgccatgtgctttaaccagcaaggggaccttctgctagtaggatatggtgatggtcatatgacaatttgggatgtacagaaatctgcagcagcaaaagttatatatggcgagcatacagcaccagtagtgcatgcttgttttatccgccaatctaaagccatcactggggattcaaaaggggtagttctattgcacacattttccattatccccgtaattaatcgtttaactgtcaagggaactcagcgtctttttgatgggaatactggaattgtgctctcagcctgtcctcttgtaatggatgaatcttttggttttagtaattcatctgcccagggaaatcagacaacttcctccagtggtggtcttggcagcatgatgggtggtgttgttggaggcgtggttggagtagattctggatggaagtttttcaacgaaggctcttctccaatggaggatggtgttgtagtcatgtttattatgcatcaacatgctcttgtggttagactccgtaccaatattgaccatgttgaccatattgagaccttctctagaccagatggagcacgtgagggctccatcgcgtatgctgcgtggaaatatacatcatatttgaatgaatcgtcatcagtagatgaagaacgagtgtcatggctagcacttgcatgggaccgtcaagtgcaagttgcaaagtttgttaaatcaaagatatttaaacacaaagagtggaagcttgatagttcagctgttggtgttgcctggttagacgaccagatgttagttgtccttaatttgagagggcaactctgtttattctctaaagatggcagtgagcttcgcagaactacctttgttcctgatggccttctttttgatgacaccatattgcaccatgcacatttttttaacaggtttggtaacccagagaggcattttaacagttcagtagcggtaagaggtgctacagtgtatattcttgggccatcttttctcacggtttcccgacttcttccatggaaagagcgaattgaagcactaaagagggctggcgattggatgggtgcactagacatggcaatgaggctttatgatggtcagacacagggtgttgttgatctcccaagaacggttgattctattagagatgccataatgccttacttagtagagttgctgctatcatatataagttatgtttttgaatatatttcaattgcgctgccaaatcatactggaaaagggggagaatcaggtgttctaatagaggcagatcgatccctgcttacacaaagagatgagcagtacgctcgtgtaggaggggttgcagttgagtattgtgtccacattggacggaatgatatccttttcgatacagtcttctctaagtttgctgctgcagaaagtggaggtatgtttctggaggtgctagagccttatatattgaaggatatgcttggttctctgccccctgagattatgcaagcactagtggagcattatagtggcaaagggtggttgcaacgagttgaacaatgcatccttcacatggatatttcttcattggactttaatcaggtagtcagactttgtcgtgaacatgggctatatggtgcactaatttatttatttaaccaaggcctgaatgatttccgtacaccactagaggaacttctatcagtcgttcagaacaccaacagtaaagatgatgcttctagtggatacaggatgcttgtttatctgaaatattgctttcagggtttggcatttcctccagggcatggaataattccccaatcccggcttcattcagtgagggaagaactccttcaatttctgcttgaagaatctaagccactcacttctgaagtatttaagggtttcaatgcttcttgtggaaagtgcctaaacatatgctatctgctatggttggatactgaagctactttggaagtcatcaaatgtgcttttgtacaggataactttgagtctagagatgaacttccgagtactgtcaatacatctgcttcagataatgaagatggtattgatgctggaagaccagagggccaaaatgctatggtacaaaatgtggttgatgccatcattgacatagttggtttggaaaatgatgtgattcggtctgttatgggtagaactgaatcagaattatggccttcggagaaggattttggctatttaatggagtttgtgtccttttttgtttctcacaaaagggctaatgcatctaagagggttgttatgcacattcttacttatctcatttcgtcatatgatgacacaagaacaaggattcagaaagaaaaagaagttcttcaactcttcaatgcggttccccgaaacgattggaattcggattttgtcttgaacctttgttcagatgctcatttttatcaggcctgtggtttgatatttacagccaggaatcagaatttggctgctttagatagttacatgaaggataaagaggaacctttccatgcttttatcttcattgataagaagttactagaattggttgacgatgaagctttgtcgtttcataccacagtaatatctcgctttcctgagctagtcaagctaagcagggaatgtgcatttgtcttggcgattgatcatttctgtgataagatacagcaaatattagcagagcttcgttctgaccgacacagcctctttcttttcttgaaaactgctattgaagtacacttgtctggaaaacttgacttcagtaagcttgaattaagaaacaaacaaactgttgaactccagtactcttctactgaagttgaagcttatcagcagaggctatcaaatctctccaagttatgccacaatcctgtttacatcgacgacgagttagttgagctttatctggagcttttatgtcagtatgagcgaaggtcagttctgaagtttctggagacttttgacagttacagattggaacggtgcttgcatctttgcctagattatggagttacagatgctgctgctttcttgcaagagagggttggtgatgttgggagtgcccttgaccttattctggctggacttgatgagaaaattagcttatttatctcttctgtggaaagtactttctctggcgtcgcatcaaaaagtatcgctgaaattaagcaaccagacatcgttctagaaatgagtgaggctcatccagtgcttgatgcattgcatgcctccattggattgtgccaaaggaattcacagcgcttggacccagaggaatctcagtccctttggttccaactccttgactcgaaattattcaatagcgcatctagaaagacaatgcgagcctattgctcttctcagagccattaaaaaaactgtatgggatcaaggatgtaaatggaaaaggtgtcaagtccaattggagtgaagcatcaatggaacatctgaaggaaaaaggactatctcaacaaatgaggatttcaactaaacaaaagtgcctaaatgttctgcgaaaagtattttcacaatgtgttggagaaataatagaggccatggctgggtatattcccctaccggcaatcatggcaaaactgttatctgataatgggaatcaagagttcggtgatttcaaacttgtgatacacagaatgttatctatgtatctttacgaaaaaagaatactggaaacggctaagtcagtaattgaggatgactcattttacaccttgagcttattaaagagaggagtttgtcatgggtttgccccacagactttcgtatgctgcatatgcaactgttcactttctaaagaaggtgctatttcagccgtacgtttgttcagttgcgggcatgcaacacatcttcagtgtgagtctgagcagaccaggtcatccaatcaggaatccaaagagggatgccctgtttgtctctcaatgagtgatacgcaagctcgaagcaaatcacctatgtttgagaatgggctaatgaagtattctggggctgaacatgaagtgtcacatggcatgtatcagattcatgaagttgatcatgctgagagatctcgtgggcttcaacagatgtcacggtatgaaatactgaataatcttcagaaagcgcagaagtcctttcatatagaaaccgtacctccattgaaacttgcaccgccagctatataccatgagaagatacagaagaggaccacttcggttggtgaaactagcaaacattctgttagaagtcagaaaccccagaaaatttggcaaatgaaggagaaaaaatcaaaagaggctgggagtcatcatccacaaaagtcaagttttctacgttaatagaagaaaagattgctgatttgttaagtatgaaaccagatccaaactgattgttaatttgcttcatgccatcaccacgatcgaatcttcaagactacaaatttgtcagcgtgatggagcctgcccatcagtacatagcttttttttttgtcttggggatgcatcctgttggtgagatcctcttcccctgcaccatggtcagaggttctgtggagccaaggtgctttgggctagggaggaaattgtaacagtaaattttcatacagttcatcgtgattagttttgtgtacagagcagagcatacacgtggtgacatggtccctgtagagggacacattcgcagtaaaggtgggatgcctcgattcatactcaacaatgtaaagtaaaggtgggatacctcaattcatgatcattgtaaaatacgtgcacagtataacacaggagcactggctgagtggcatgtatccttgcagttcatcgcgattaatctctgtacagagctgttatactgtcggttttgatatcagttgcaattacacatctgctacagttttgtagtatcagatatcagaacacgtcgggcccgcagaacgcctggaagctcgtagttgtcggcgccgagcatcctgtcgccattgggttgcgctgtactgtactactactactacgcgtctgttgtctaggtgggag

SEQ ID NO: 49309 - DNA, 6495 bp, Zea Mays
gaaaaagctcgcaaaatcgcagcacactagcacagaaccttggacgcgaaggcgtcataccccgatgccggcgtcgtcgtcgccggcgatggcgtcgcagcatgcgccgccgaggcgggagctcgacctcgacgctttcctcccgtcctctccgacatcctccggggcctcggacgccgacccggccgacgatgaccaccgccgcgccgtcgacgacctgctccgcctcctctcctcctcagactcggactccgattccgaggagtctagccgcatcccaagcaccagcatccagacgctatcccgagtccaagccccggcgcctgtcgctgagccctcgccgtcgccttccccatccgcgtccccgtccccgaggagatccgcatcggccttgccgtcggagaccctctcctccctcgtcgcgagaaccttctcgagcaacggcgcttcctcgtcgtcgaagcccctcccctcgctcttccggggcgtccgccccagccccaaacccggcgccgcgcttgccgctgctgccgcagcgtcccgcgcggtcctcaccccacacgccgctgccatcaagtcgcgccgatcagtatcggcgcccgtggagaaagttctggaggaagaggggagtggctccgaaggctccaaggagttccttcccactgggagcttggaagcagaggtagaagagaagggtgattcggaagcggttgctgatgcgaccaagcaaactgcaggtgggaatgtgggtgcggaactgggagaggataaacaggcagaagtgggaggtgaagagaatgctgaggctataaagctggtggaggcaagtcctctggatgctctagctgcggaggattccagtgggcatgagcaaggtaatgatgccaatttggcggaaactgaccaagttgggaatcagattgaggctgtctatgaggaaaatgaggatgaccaaactggaggtgataatcatgttcaatcaggtcagggtatggatcttattgcgattgctttagaggaaagttctgatgatgaacatgaatttgaaagatctgacagtatcttgcaagaacaagtggaatctgggagcttaattgataaagtgattgaagatagggtagagcagctggaggccagcaggaaggctgagaacacagagaagaagctgaaggtgtcaatgaaaccgttggagtgggcagaggagcttgagaagaggcaggcctcgtctggtcaacattgggaggaaggagcagctgcgcagcccatgcaactagagggaatcggaaagggcccaccagctatcggttacatgcaaattgagatggacaatccagtaacccgtgtcatgtcctcaccgtcatttaggtcagaccatggctctccccaggtgctggctgttcataggagctatatagcaatgggcacatctaaaggtgctgtcatcgtcattccaagcaaatactccattcatcaagctgatgatacagatgcaaagatgctgttcttttggaaccaaggcgagaagactcaatcaccagtgactgccatgtgctttaaccagcaaggggaccttctgctagtaggatatggtgatggtcatatgacaatttgggatgtacagaaatctgcagcagcaaaagttatatatggcgagcatacagcaccagtagtgcatgcttgttttatccgccaatctaaagccatcactggggattcaaaaggggtagttctattgcacacattttccattatccccgtaattaatcgtttaactgtcaagggaactcagcgtctttttgatgggaatactggaattgtgctctcagcctgtcctcttgtaatggatgaatcttttggttttagtaattcatctgcccagggaaatcagacaacttcctccagtggtggtcttggcagcatgatgggtggtgttgttggaggcgtggttggagtagattctggatggaagtttttcaacgaaggctcttctccaatggaggatggtgttgtagtcatgtttattatgcatcaacatgctcttgtgactccgtaccaatattgaccatgttgaccatattgagaccttctctagaccagatggagcacgtgagggctccatcgcgtatgctgcgtggaaatatacatcatatttgaatgaatcgtcatcagtagatgaagaacgagtgtcatggctagcacttgcatgggaccgtcaagtgcaagttgcaaagtttgttaaatcaaagatatttaaacacaaagagtggaagcttgatagttcagctgttggtgttgcctggttagacgaccagatgttagttgtccttaatttgagagggcaactctgtttattctctaaagatggcagtgagcttcgcagaactacctttgttcctgatggccttctttttgatgacaccatattgcaccatgcacatttttttaacaggtttggtaacccagagaggcattttaacagttcagtagcggtaagaggtgctacagtgtatattcttgggccatcttttctcacggtttcccgacttcttccatggaaagagcgaattgaagcactaaagagggctggcgattggatgggtgcactagacatggcaatgaggctttatgatggtcagacacagggtgttgttgatctcccaagaacggttgattctattagagatgccataatgccttacttagtagagttgctgctatcatatataagttatgtttttgaatatatttcaattgcgctgccaaatcatactggaaaagggggagaatcaggtgttctaatagaggcagatcgatccctgcttacacaaagagatgagcagtacgctcgtgtaggaggggttgcagttgagtattgtgtccacattggacggaatgatatccttttcgatacagtcttctctaagtttgctgctgcagaaagtggaggtatgtttctggaggtgctagagccttatatattgaaggatatgcttggttctctgccccctgagattatgcaagcactagtggagcattatagtggcaaagggtggttgcaacgagttgaacaatgcatccttcacatggatatttcttcattggactttaatcaggtagtcagactttgtcgtgaacatgggctatatggtgcactaatttatttatttaaccaaggcctgaatgatttccgtacaccactagaggaacttctatcagtcgttcagaacaccaacagtaaagatgatgcttctagtggatacaggatgcttgtttatctgaaatattgctttcagggtttggcatttcctccagggcatggaataattccccaatcccggcttcattcagtgagggaagaactccttcaatttctgcttgaagaatctaagccactcacttctgaagtatttaagggtttcaatgcttcttgtggaaagtgcctaaacatatgctatctgctatggttggatactgaagctactttggaagtcatcaaatgtgcttttgtacaggataactttgagtctagagatgaacttccgagtactgtcaatacatctgcttcagataatgaagatggtattgatgctggaagaccagagggccaaaatgctatggtacaaaatgtggttgatgccatcattgacatagttggtttggaaaatgatgtgattcggtctgttatgggtagaactgaatcagaattatggccttcggagaaggattttggctatttaatggagtttgtgtccttttttgtttctcacaaaagggctaatgcatctaagagggttgttatgcacattcttacttatctcatttcgtcatatgatgacacaagaacaaggattcagaaagaaaaagaagttcttcaactcttcaatgcggttccccgaaacgattggaattcggattttgtcttgaacctttgttcagatgctcatttttatcaggcctgtggtttgatatttacagccaggaatcagaatttggctgctttagatagttacatgaaggataaagaggaacctttccatgcttttatcttcattgataagaagttactagaattggttgacgatgaagctttgtcgtttcataccacagtaatatctcgctttcctgagctagtcaagctaagcagggaatgtgcatttgtcttggcgattgatcatttctgtgataagatacagcaaatattagcagagcttcgttctgaccgacacagcctctttcttttcttgaaaactgctattgaagtacacttgtctggaaaacttgacttcagtaagcttgaattaagaaacaaacaaactgttgaactccagtactcttctactgaagttgaagcttatcagcagaggctatcaaatctctccaagttatgccacaatcctgtttacatcgacgacgagttagttgagctttatctggagcttttatgtcagtatgagcgaaggtcagttctgaagtttctggagacttttgacagttacagattggaacggtgcttgcatctttgcctagattatggagttacagatgctgctgctttcttgcaagagagggttggtgatgttgggagtgcccttgaccttattctggctggacttgatgagaaaattagcttatttatctcttctgtggaaagtactttctctggcgtcgcatcaaaaagtatcgctgaaattaagcaaccagacatcgttctagaaatgagctcatccagtgcttgatgcattgcatgcctccattggattgtgccaaaggaattcacagcgcttggacccagaggaatctcagtccctttggttccaactccttgactccttctcagagccattaaaaaaactgtatgggatcaaggatgtaaatggaaaaggtgtcaagtccaattggagtgaagcatcaatggaacatctgaaggaaaaaggactatctcaacaaatgaggatttcaactaaacaaaagtgcctaaatgttctgcgaaaagtattttcacaatgtgttggagaaataatagaggccatggctgggtatattcccctaccggcaatcatggcaaaactgttatctgataatgggaatcaagagttcggtgatttcaaacttgtgatacacagaatgttatctatgtatctttacgaaaaaagaatactggaaacggctaagtcagtaattgaggatgactcattttacaccttgagcttattaaagagaggagtttgtcatgggtttgccccacagactttcgtatgctgcatatgcaactgttcactttctaaagaaggtgctatttcagccgtacgtttgttcagttgcgggcatgcaacacatcttcagtgtgagtctgagcagaccaggtcatccaatcaggaatccaaagagggatgccctgtttgtctctcaatgagtgatacgcaagctcgaagcaaatcacctatgtttgagaatgggctaatgaagtattctggggctgaacatgaagtgtcacatggcatgtatcagattcatgaagttgatcatgctgagagatctcgtgggcttcaacagatgtcacggtatgaaatactgaataatcttcagaaagcgcagaagtcctttcatatagaaaccgtacctccattgaaacttgcaccgccagctatataccatgagaagatacagaagaggaccacttcggttggtgaaactagcaaacattctgttagaagtcagaaaccccagaaaatttggcaaatgaaggagaaaaaatcaaaagaggctgggagtcatcatccacaaaagtcaagttttctacgttaatagaagaaaagattgctgatttgttaagtatgaaaccagatccaaactgattgttaatttgcttcatgccatcaccacgatcgaatcttcaagactacaaatttgtcagcgtgatggagcctgcccatcagtacatagcttttttttttgtcttggggatgcatcctgttggtgagatcctcttcccctgcaccatggtcagaggttctgtggagccaaggtgctttgggctagggaggaaattgtaacagtaaattttcatacagttcatcgtgattagttttgtgtacagagcagagcatacacgtggtgacatggtccctgtagagggacacattcgcagtaaaggtgggatgcctcgattcatactcaacaatgtaaagtaaaggtgggatacctcaattcatgatcattgtaaaatacgtgcacagtataacacaggagcactggctgagtggcatgtatccttgcagttcatcgcgattaatctctgtacagagctgttatactgtcggttttgatatcagttgcaattacacatctgctacagttttgtagtatcagatatcagaacacgtcgggcccgcagaacgcctggaagctcgtagttgtcggcgccgagcatcctgtcgccattgggttgcgctgtactgtactactactactacgcgtctgttgtctaggtgggag

SEQ ID NO: 49310 - DNA, 6353 bp, Zea Mays
gaaaaagctcgcaaaatcgcagcacactagcacagaaccttggacgcgaaggcgtcataccccgatgccggcgtcgtcgtcgccggcgatggcgtcgcagcatgcgccgccgaggcgggagctcgacctcgacgctttcctcccgtcctctccgacatcctccggggcctcggacgccgacccggccgacgatgaccaccgccgcgccgtcgacgacctgctccgcctcctctcctcctcagactcggactccgattccgaggagtctagccgcatcccaagcaccagcatccagacgctatcccgagtccaagccccggcgcctgtcgctgagccctcgccgtcgccttccccatccgcgtccccgtccccgaggagatccgcatcggccttgccgtcggagaccctctcctccctcgtcgcgagaaccttctcgagcaacggcgcttcctcgtcgtcgaagcccctcccctcgctcttccggggcgtccgccccagccccaaacccggcgccgcgcttgccgctgctgccgcagcgtcccgcgcggtcctcaccccacacgccgctgccatcaagtcgcgccgatcagtatcggcgcccgtggagaaagttctggaggaagaggggagtggctccgaaggctccaaggagttccttcccactgggagcttggaagcagaggtagaagagaagggtgattcggaagcggttgctgatgcgaccaagcaaactgcaggtgggaatgtgggtgcggaactgggagaggataaacaggcagaagtgggaggtgaagagaatgctgaggctataaagctggtggaggcaagtcctctggatgctctagctgcggaggattccagtgggcatgagcaaggtaatgatgccaatttggcggaaactgaccaagttgggaatcagattgaggctgtctatgaggaaaatgaggatgaccaaactggaggtgataatcatgttcaatcaggtcagggtatggatcttattgcgattgctttagaggaaagttctgatgatgaacatgaatttgaaagatctgacagtatcttgcaagaacaagtggaatctgggagcttaattgataaagtgattgaagatagggtagagcagctggaggccagcaggaaggctgagaacacagagaagaagctgaaggtgtcaatgaaaccgttggagtgggcagaggagcttgagaagaggcaggcctcgtctggtcaacattgggaggaaggagcagctgcgcagcccatgcaactagagggaatcggaaagggcccaccagctatcggttacatgcaaattgagatggacaatccagtaacccgtgtcatgtcctcaccgtcatttaggtcagaccatggctctccccaggtgctggctgttcataggagctatatagcaatgggcacatctaaaggtgctgtcatcgtcattccaagcaaatactccattcatcaagctgatgatacagatgcaaagatgctgttcttttggaaccaaggcgagaagactcaatcaccagtgactgccatgtgctttaaccagcaaggggaccttctgctagtaggatatggtgatggtcatatgacaatttgggatgtacagaaatctgcagcagcaaaagttatatatggcgagcatacagcaccagtagtgcatgcttgttttatccgccaatctaaagccatcactggggattcaaaaggggtagttctattgcacacattttccattatccccgtaattaatcgtttaactgtcaagggaactcagcgtctttttgatgggaatactggaattgtgctctcagcctgtcctcttgtaatggatgaatcttttggttttagtaattcatctgcccagggaaatcagacaacttcctccagtggtggtcttggcagcatgatgggtggtgttgttggaggcgtggttggagtagattctggatggaagtttttcaacgaaggctcttctccaatggaggatggtgttgtagtcatgtttattatgcatcaacatgctcttgtgactccgtaccaatattgaccatgttgaccatattgagaccttctctagaccagatggagcacgtgagggctccatcgcgtatgctgcgtggaaatatacatcatatttgaatgaatcgtcatcagtagatgaagaacgagtgtcatggctagcacttgcatgggaccgtcaagtgcaagttgcaaagtttgttaaatcaaagatatttaaacacaaagagtggaagcttgatagttcagctgttggtgttgcctggttagacgaccaggtttggtaacccagagaggcattttaacagttcagtagcggtaagaggtgctacagtgtatattcttgggccatcttttctcacggtttcccgacttcttccatggaaagagcgaattgaagcactaaagagggctggcgattggatgggtgcactagacatggcaatgaggctttatgatggtcagacacagggtgttgttgatctcccaagaacggttgattctattagagatgccataatgccttacttagtagagttgctgctatcatatataagttatgtttttgaatatatttcaattgcgctgccaaatcatactggaaaagggggagaatcaggtgttctaatagaggcagatcgatccctgcttacacaaagagatgagcagtacgctcgtgtaggaggggttgcagttgagtattgtgtccacattggacggaatgatatccttttcgatacagtcttctctaagtttgctgctgcagaaagtggaggtatgtttctggaggtgctagagccttatatattgaaggatatgcttggttctctgccccctgagattatgcaagcactagtggagcattatagtggcaaagggtggttgcaacgagttgaacaatgcatccttcacatggatatttcttcattggactttaatcaggtagtcagactttgtcgtgaacatgggctatatggtgcactaatttatttatttaaccaaggcctgaatgatttccgtacaccactagaggaacttctatcagtcgttcagaacaccaacagtaaagatgatgcttctagtggatacaggatgcttgtttatctgaaatattgctttcagggtttggcatttcctccagggcatggaataattccccaatcccggcttcattcagtgagggaagaactccttcaatttctgcttgaagaatctaagccactcacttctgaagtatttaagggtttcaatgcttcttgtggaaagtgcctaaacatatgctatctgctatggttggatactgaagctactttggaagtcatcaaatgtgcttttgtacaggataactttgagtctagagatgaacttccgagtactgtcaatacatctgcttcagataatgaagatggtattgatgctggaagaccagagggccaaaatgctatggtacaaaatgtggttgatgccatcattgacatagttggtttggaaaatgatgtgattcggtctgttatgggtagaactgaatcagaattatggccttcggagaaggattttggctatttaatggagtttgtgtccttttttgtttctcacaaaagggctaatgcatctaagagggttgttatgcacattcttacttatctcatttcgtcatatgatgacacaagaacaaggattcagaaagaaaaagaagttcttcaactcttcaatgcggttccccgaaacgattggaattcggattttgtcttgaacctttgttcagatgctcatttttatcaggcctgtggtttgatatttacagccaggaatcagaatttggctgctttagatagttacatgaaggataaagaggaacctttccatgcttttatcttcattgataagaagttactagaattggttgacgatgaagctttgtcgtttcataccacagtaatatctcgctttcctgagctagtcaagctaagcagggaatgtgcatttgtcttggcgattgatcatttctgtgataagatacagcaaatattagcagagcttcgttctgaccgacacagcctctttcttttcttgaaaactgctattgaagtacacttgtctggaaaacttgacttcagtaagcttgaattaagaaacaaacaaactgttgaactccagtactcttctactgaagttgaagcttatcagcagaggctatcaaatctctccaagttatgccacaatcctgtttacatcgacgacgagttagttgagctttatctggagcttttatgtcagtatgagcgaaggtcagttctgaagtttctggagacttttgacagttacagattggaacggtgcttgcatctttgcctagattatggagttacagatgctgctgctttcttgcaagagagggttggtgatgttgggagtgcccttgaccttattctggctggacttgatgagaaaattagcttatttatctcttctgtggaaagtactttctctggcgtcgcatcaaaaagtatcgctgaaattaagcaaccagacatcgttctagaaatgagtgagtgcttgatgcattgcatgcctccattggattgtgccaaaggaattcacagcgcttggacccagaggaatctcagtccctttggttccaactccttgactccttctcagagccattaaaaaaactgtatgggatcaaggatgtaaatggaaaaggtgtcaagtccaattggagtgaagcatcaatggaacatctgaaggaaaaaggactatctcaacaaatgaggatttcaactaaacaaaagtgcctaaatgttctgcgaaaagtattttcacaatgtgttggagaaataatagaggccatggctgggtatattcccctaccggcaatcatggcaaaactgttatctgataatgggaatcaagagttcggtgatttcaaacttgtgatacacagaatgttatctatgtatctttacgaaaaaagaatactggaaacggctaagtcagtaattgaggatgactcattttacaccttgagcttattaaagagaggagtttgtcatgggtttgccccacagactttcgtatgctgcatatgcaactgttcactttctaaagaaggtgctatttcagccgtacgtttgttcagttgcgggcatgcaacacatcttcagtgtgagtctgagcagaccaggtcatccaatcaggaatccaaagagggatgccctgtttgtctctcaatgagtgatacgcaagctcgaagcaaatcacctatgtttgagaatgggctaatgaagtattctggggctgaacatgaagtgtcacatggcatgtatcagattcatgaagttgatcatgctgagagatctcgtgggcttcaacagatgtcacggtatgaaatactgaataatcttcagaaagcgcagaagtcctttcatatagaaaccgtacctccattgaaacttgcaccgccagctatataccatgagaagatacagaagaggaccacttcggttggtgaaactagcaaacattctgttagaagtcagaaaccccagaaaatttggcaaatgaaggagaaaaaatcaaaagaggctgggagtcatcatccacaaaagtcaagttttctacgttaatagaagaaaagattgctgatttgttaagtatgaaaccagatccaaactgattgttaatttgcttcatgccatcaccacgatcgaatcttcaagactacaaatttgtcagcgtgatggagcctgcccatcagtacatagcttttttttttgtcttggggatgcatcctgttggtgagatcctcttcccctgcaccatggtcagaggttctgtggagccaaggtgctttgggctagggaggaaattgtaacagtaaattttcatacagttcatcgtgattagttttgtgtacagagcagagcatacacgtggtgacatggtccctgtagagggacacattcgcagtaaaggtgggatgcctcgattcatactcaacaatgtaaagtaaaggtgggatacctcaattcatgatcattgtaaaatacgtgcacagtataacacaggagcactggctgagtggcatgtatccttgcagttcatcgcgattaatctctgtacagagctgttatactgtcggttttgatatcagttgcaattacacatctgctacagttttgtagtatcagatatcagaacacgtcgggcccgcagaacgcctggaagctcgtagttgtcggcgccgagcatcctgtcgccattgggttgcgctgtactgtactactactactacgcgtctgttgtctaggtgggag

SEQ ID NO: 49311 - DNA, 6434 bp, Zea Mays
gaaaaagctcgcaaaatcgcagcacactagcacagaaccttggacgcgaaggcgtcataccccgatgccggcgtcgtcgtcgccggcgatggcgtcgcagcatgcgccgccgaggcgggagctcgacctcgacgctttcctcccgtcctctccgacatcctccggggcctcggacgccgacccggccgacgatgaccaccgccgcgccgtcgacgacctgctccgcctcctctcctcctcagactcggactccgattccgaggagtctagccgcatcccaagcaccagcatccagacgctatcccgagtccaagccccggcgcctgtcgctgagccctcgccgtcgccttccccatccgcgtccccgtccccgaggagatccgcatcggccttgccgtcggagaccctctcctccctcgtcgcgagaaccttctcgagcaacggcgcttcctcgtcgtcgaagcccctcccctcgctcttccggggcgtccgccccagccccaaacccggcgccgcgcttgccgctgctgccgcagcgtcccgcgcggtcctcaccccacacgccgctgccatcaagtcgcgccgatcagtatcggcgcccgtggagaaagttctggaggaagaggggagtggctccgaaggctccaaggagttccttcccactgggagcttggaagcagaggtagaagagaagggtgattcggaagcggttgctgatgcgaccaagcaaactgcaggtgggaatgtgggtgcggaactgggagaggataaacaggcagaagtgggaggtgaagagaatgctgaggctataaagctggtggaggcaagtcctctggatgctctagctgcggaggattccagtgggcatgagcaaggtaatgatgccaatttggcggaaactgaccaagttgggaatcagattgaggctgtctatgaggaaaatgaggatgaccaaactggaggtgataatcatgttcaatcaggtcagggtatggatcttattgcgattgctttagaggaaagttctgatgatgaacatgaatttgaaagatctgacagtatcttgcaagaacaagtggaatctgggagcttaattgataaagtgattgaagatagggtagagcagctggaggccagcaggaaggctgagaacacagagaagaagctgaaggtgtcaatgaaaccgttggagtgggcagaggagcttgagaagaggcaggcctcgtctggtcaacattgggaggaaggagcagctgcgcagcccatgcaactagagggaatcggaaagggcccaccagctatcggttacatgcaaattgagatggacaatccagtaacccgtgtcatgtcctcaccgtcatttaggtcagaccatggctctccccaggtgctggctgttcataggagctatatagcaatgggcacatctaaaggtgctgtcatcgtcattccaagcaaatactccattcatcaagctgatgatacagatgcaaagatgctgttcttttggaaccaaggcgagaagactcaatcaccagtgactgccatgtgctttaaccagcaaggggaccttctgctagtaggatatggtgatggtcatatgacaatttgggatgtacagaaatctgcagcagcaaaagttatatatggcgagcatacagcaccagtagtgcatgcttgttttatccgccaatctaaagccatcactggggattcaaaaggggtagttctattgcacacattttccattatccccgtaattaatcgtttaactgtcaagggaactcagcgtctttttgatgggaatactggaattgtgctctcagcctgtcctcttgtaatggatgaatcttttggttttagtaattcatctgcccagggaaatcagacaacttcctccagtggtggtcttggcagcatgatgggtggtgttgttggaggcgtggttggagtagattctggatggaagtttttcaacgaaggctcttctccaatggaggatggtgttgtagtcatgtttattatgcatcaacatgctcttgtgactccgtaccaatattgaccatgttgaccatattgagaccttctctagaccagatggagcacgtgagggctccatcgcgtatgctgcgtggaaatatacatcatatttgaatgaatcgtcatcagtagatgaagaacgagtgtcatggctagcacttgcatgggaccgtcaagtgcaagttgcaaagtttgttaaatcaaagatatttaaacacaaagagtggaagcttgatagttcagctgttggtgttgcctggttagacgaccagatgttagttgtccttaatttgagagggcaactctgtttattctctaaagatggcagtgagcttcgcagaactacctttgttcctgatggccttctttttgatgacaccatattgcaccatgcacatttttttaacaggtttggtaacccagagaggcattttaacagttcagtagcggtaagaggtgctacagtgtatattcttgggccatcttttctcacggtttcccgacttcttccatggaaagagcgaattgaagcactaaagagggctggcgattggatgggtgcactagacatggcaatgaggctttatgatggtcagacacagggtgttgttgatctcccaagaacggttgattctattagagatgccataatgccttacttagtagagttgctgctatcatatataagttatgtttttgaatatatttcaattgcgctgccaaatcatactggaaaagggggagaatcaggtgttctaatagaggcagatcgatccctgcttacacaaagagatgagcagtacgctcgtgtaggaggggttgcagttgagtattgtgtccacattggacggaatgatatccttttcgatacagtcttctctaagtttgctgctgcagaaagtggaggtatgtttctggaggtgctagagccttatatattgaaggatatgcttggttctctgccccctgagattatgcaagcactagtggagcattatagtggcaaagggtggttgcaacgagttgaacaatgcatccttcacatggatatttcttcattggactttaatcaggtagtcagactttgtcgtgaacatgggctatatggtgcactaatttatttatttaaccaaggcctgaatgatttccgtacaccactagaggaacttctatcagtcgttcagaacaccaacagtaaagatgatgcttctagtggatacaggatgcttgtttatctgaaatattgctttcagggtttggcatttcctccagggcatggaataattccccaatcccggcttcattcagtgagggaagaactccttcaatttctgcttgaagaatctaagccactcacttctgaagtatttaagggtttcaatgcttcttgtggaaagtgcctaaacatatgctatctgctatggttggatactgaagctactttggaagtcatcaaatgtgcttttgtacaggataactttgagtctagagatgaacttccgagtactgtcaatacatctgcttcagataatgaagatggtattgatgctggaagaccagagggccaaaatgctatggtacaaaatgtggttgatgccatcattgacatagttggtttggaaaatgatgtgattcggtctgttatgggtagaactgaatcagaattatggccttcggagaaggattttggctatttaatggagtttgtgtccttttttgtttctcacaaaagggctaatgcatctaagagggttgttatgcacattcttacttatctcatttcgtcatatgatgacacaagaacaaggattcagaaagaaaaagaagttcttcaactcttcaatgcggttccccgaaacgattggaattcggattttgtcttgaacctttgttcagatgctcatttttatcaggcctgtggtttgatatttacagccaggaatcagaatttggctgctttagatagttacatgaaggataaagaggaacctttccatgcttttatcttcattgataagaagttactagaattggttgacgatgaagctttgtcgtttcataccacagtaatatctcgctttcctgagctagtcaagctaagcagggaatgtgcatttgtcttggcgattgatcatttctgtgataagatacagcaaatattagcagagcttcgttctgaccgacacagcctctttcttttcttgaaaactgctattgaagtacacttgtctggaaaacttgacttcagtaagcttgaattaagaaacaaacaaactgttgaactccagtactcttctactgaagttgaagcttatcagcagaggctatcaaatctctccaagttatgccacaatcctgtttacatcgacgacgagttagttgagctttatctggagttacagattggaacggtgcttgcatctttgcctagattatggagttacagatgctgctgctttcttgcaagagagggttggtgatgttgggagtgcccttgaccttattctggctggacttgatgagaaaattagcttatttatctcttctgtggaaagtactttctctggcgtcgcatcaaaaagtatcgctgaaattaagcaaccagacatcgttctagaaatgagtgagtgcttgatgcattgcatgcctccattggattgtgccaaaggaattcacagcgcttggacccagaggaatctcagtccctttggttccaactccttgactccttctcagagccattaaaaaaactgtatgggatcaaggatgtaaatggaaaaggtgtcaagtccaattggagtgaagcatcaatggaacatctgaaggaaaaaggactatctcaacaaatgaggatttcaactaaacaaaagtgcctaaatgttctgcgaaaagtattttcacaatgtgttggagaaataatagaggccatggctgggtatattcccctaccggcaatcatggcaaaactgttatctgataatgggaatcaagagttcggtgatttcaaacttgtgatacacagaatgttatctatgtatctttacgaaaaaagaatactggaaacggctaagtcagtaattgaggatgactcattttacaccttgagcttattaaagagaggagtttgtcatgggtttgccccacagactttcgtatgctgcatatgcaactgttcactttctaaagaaggtgctatttcagccgtacgtttgttcagttgcgggcatgcaacacatcttcagtgtgagtctgagcagaccaggtcatccaatcaggaatccaaagagggatgccctgtttgtctctcaatgagtgatacgcaagctcgaagcaaatcacctatgtttgagaatgggctaatgaagtattctggggctgaacatgaagtgtcacatggcatgtatcagattcatgaagttgatcatgctgagagatctcgtgggcttcaacagatgtcacggtatgaaatactgaataatcttcagaaagcgcagaagtcctttcatatagaaaccgtacctccattgaaacttgcaccgccagctatataccatgagaagatacagaagaggaccacttcggttggtgaaactagcaaacattctgttagaagtcagaaaccccagaaaatttggcaaatgaaggagaaaaaatcaaaagaggctgggagtcatcatccacaaaagtcaagttttctacgttaatagaagaaaagattgctgatttgttaagtatgaaaccagatccaaactgattgttaatttgcttcatgccatcaccacgatcgaatcttcaagactacaaatttgtcagcgtgatggagcctgcccatcagtacatagcttttttttttgtcttggggatgcatcctgttggtgagatcctcttcccctgcaccatggtcagaggttctgtggagccaaggtgctttgggctagggaggaaattgtaacagtaaattttcatacagttcatcgtgattagttttgtgtacagagcagagcatacacgtggtgacatggtccctgtagagggacacattcgcagtaaaggtgggatgcctcgattcatactcaacaatgtaaagtaaaggtgggatacctcaattcatgatcattgtaaaatacgtgcacagtataacacaggagcactggctgagtggcatgtatccttgcagttcatcgcgattaatctctgtacagagctgttatactgtcggttttgatatcagttgcaattacacatctgctacagttttgtagtatcagatatcagaacacgtcgggcccgcagaacgcctggaagctcgtagttgtcggcgccgagcatcctgtcgccattgggttgcgctgtactgtactactactactacgcgtctgttgtctaggtgggag

SEQ ID NO: 49312 - DNA, 6490 bp, Zea Mays
gaaaaagctcgcaaaatcgcagcacactagcacagaaccttggacgcgaaggcgtcataccccgatgccggcgtcgtcgtcgccggcgatggcgtcgcagcatgcgccgccgaggcgggagctcgacctcgacgctttcctcccgtcctctccgacatcctccggggcctcggacgccgacccggccgacgatgaccaccgccgcgccgtcgacgacctgctccgcctcctctcctcctcagactcggactccgattccgaggagtctagccgcatcccaagcaccagcatccagacgctatcccgagtccaagccccggcgcctgtcgctgagccctcgccgtcgccttccccatccgcgtccccgtccccgaggagatccgcatcggccttgccgtcggagaccctctcctccctcgtcgcgagaaccttctcgagcaacggcgcttcctcgtcgtcgaagcccctcccctcgctcttccggggcgtccgccccagccccaaacccggcgccgcgcttgccgctgctgccgcagcgtcccgcgcggtcctcaccccacacgccgctgccatcaagtcgcgccgatcagtatcggcgcccgtggagaaagttctggaggaagaggggagtggctccgaaggctccaaggagttccttcccactgggagcttggaagcagaggtagaagagaagggtgattcggaagcggttgctgatgcgaccaagcaaactgcaggtgggaatgtgggtgcggaactgggagaggataaacaggcagaagtgggaggtgaagagaatgctgaggctataaagctggtggaggcaagtcctctggatgctctagctgcggaggattccagtgggcatgagcaaggtaatgatgccaatttggcggaaactgaccaagttgggaatcagattgaggctgtctatgaggaaaatgaggatgaccaaactggaggtgataatcatgttcaatcaggtcagggtatggatcttattgcgattgctttagaggaaagttctgatgatgaacatgaatttgaaagatctgacagtatcttgcaagaacaagtggaatctgggagcttaattgataaagtgattgaagatagggtagagcagctggaggccagcaggaaggctgagaacacagagaagaagctgaaggtgtcaatgaaaccgttggagtgggcagaggagcttgagaagaggcaggcctcgtctggtcaacattgggaggaaggagcagctgcgcagcccatgcaactagagggaatcggaaagggcccaccagctatcggttacatgcaaattgagatggacaatccagtaacccgtgtcatgtcctcaccgtcatttaggtcagaccatggctctccccaggtgctggctgttcataggagctatatagcaatgggcacatctaaaggtgctgtcatcgtcattccaagcaaatactccattcatcaagctgatgatacagatgcaaagatgctgttcttttggaaccaaggcgagaagactcaatcaccagtgactgccatgtgctttaaccagcaaggggaccttctgctagtaggatatggtgatggtcatatgacaatttgggatgtacagaaatctgcagcagcaaaagttatatatggcgagcatacagcaccagtagtgcatgcttgttttatccgccaatctaaagccatcactggggattcaaaaggggtagttctattgcacacattttccattatccccgtaattaatcgtttaactgtcaagggaactcagcgtctttttgatgggaatactggaattgtgctctcagcctgtcctcttgtaatggatgaatcttttggttttagtaattcatctgcccagggaaatcagacaacttcctccagtggtggtcttggcagcatgatgggtggtgttgttggaggcgtggttggagtagattctggatggaagtttttcaacgaaggctcttctccaatggaggatggtgttgtagtcatgtttattatgcatcaacatgctcttgtggttagactccgtaccaatattgaccatgttgaccatattgagaccttctctagaccagatggagcacgtgagggctccatcgcgtatgctgcgtggaaatatacatcatatttgaatgaatcgtcatcagtagatgaagaacgagtgtcatggctagcacttgcatgggaccgtcaagtgcaagttgcaaagtttgttaaatcaaagatatttaaacacaaagagtggaagcttgatagttcagctgttggtgttgcctggttagacgaccagatgttagttgtccttaatttgagagggcaactctgtttattctctaaagatggcagtgagcttcgcagaactacctttgttcctgatggccttctttttgatgacaccatattgcaccatgcacatttttttaacaggtttggtaacccagagaggcattttaacagttcagtagcggtaagaggtgctacagtgtatattcttgggccatcttttctcacggtttcccgacttcttccatggaaagagcgaattgaagcactaaagagggctggcgattggatgggtgcactagacatggcaatgaggctttatgatggtcagacacagggtgttgttgatctcccaagaacggttgattctattagagatgccataatgccttacttagtagagttgctgctatcatatataagttatgtttttgaatatatttcaattgcgctgccaaatcatactggaaaagggggagaatcaggtgttctaatagaggcagatcgatccctgcttacacaaagagatgagcagtacgctcgtgtaggaggggttgcagttgagtattgtgtccacattggacggaatgatatccttttcgatacagtcttctctaagtttgctgctgcagaaagtggaggtatgtttctggaggtgctagagccttatatattgaaggatatgcttggttctctgccccctgagattatgcaagcactagtggagcattatagtggcaaagggtggttgcaacgagttgaacaatgcatccttcacatggatatttcttcattggactttaatcaggtagtcagactttgtcgtgaacatgggctatatggtgcactaatttatttatttaaccaaggcctgaatgatttccgtacaccactagaggaacttctatcagtcgttcagaacaccaacagtaaagatgatgcttctagtggatacaggatgcttgtttatctgaaatattgctttcagggtttggcatttcctccagggcatggaataattccccaatcccggcttcattcagtgagggaagaactccttcaatttctgcttgaagaatctaagccactcacttctgaagtatttaagggtttcaatgcttcttgtggaaagtgcctaaacatatgctatctgctatggttggatactgaagctactttggaagtcatcaaatgtgcttttgtacaggataactttgagtctagagatgaacttccgagtactgtcaatacatctgcttcagataatgaagatggtattgatgctggaagaccagagggccaaaatgctatggtacaaaatgtggttgatgccatcattgacatagttggtttggaaaatgatgtgattcggtctgttatgggtagaactgaatcagaattatggccttcggagaaggattttggctatttaatggagtttgtgtccttttttgtttctcacaaaagggctaatgcatctaagagggttgttatgcacattcttacttatctcatttcgtcatatgatgacacaagaacaaggattcagaaagaaaaagaagttcttcaactcttcaatgcggttccccgaaacgattggaattcggattttgtcttgaacctttgttcagatgctcatttttatcaggcctgtggtttgatatttacagccaggaatcagaatttggctgctttagatagttacatgaaggataaagaggaacctttccatgcttttatcttcattgataagaagttactagaattggttgacgatgaagctttgtcgtttcataccacagtaatatctcgctttcctgagctagtcaagctaagcagggaatgtgcatttgtcttggcgattgatcatttctgtgataagatacagcaaatattagcagagcttcgttctgaccgacacagcctctttcttttcttgaaaactgctattgaagtacacttgtctggaaaacttgacttcagtaagcttgaattaagaaacaaacaaactgttgaactccagtactcttctactgaagttgaagcttatcagcagaggctatcaaatctctccaagttatgccacaatcctgtttacatcgacgacgagttagttgagctttatctggagcttttatgtcagtatgagcgaaggtcagttctgaagtttctggagacttttgacagttacagattggaacggtgcttgcatctttgcctagattatggagttacagatgctgctgctttcttgcaagagagggttggtgatgttgggagtgcccttgaccttattctggctggacttgatgagaaaattagcttatttatctcttctgtggaaagtactttctctggcgtcgcatcaaaaagtatcgctgaaattaagcaaccagacatcgttctagaaatgagtgaggctcatccagtgcttgatgcattgcatgcctccattggattgtgccaaaggaattcacagcgcttggacccagaggaatctcagtccctttggttccaactccttgactcagccattaaaaaaactgtatgggatcaaggatgtaaatggaaaaggtgtcaagtccaattggagtgaagcatcaatggaacatctgaaggaaaaaggactatctcaacaaatgaggatttcaactaaacaaaagtgcctaaatgttctgcgaaaagtattttcacaatgtgttggagaaataatagaggccatggctgggtatattcccctaccggcaatcatggcaaaactgttatctgataatgggaatcaagagttcggtgatttcaaacttgtgatacacagaatgttatctatgtatctttacgaaaaaagaatactggaaacggctaagtcagtaattgaggatgactcattttacaccttgagcttattaaagagaggagtttgtcatgggtttgccccacagactttcgtatgctgcatatgcaactgttcactttctaaagaaggtgctatttcagccgtacgtttgttcagttgcgggcatgcaacacatcttcagtgtgagtctgagcagaccaggtcatccaatcaggaatccaaagagggatgccctgtttgtctctcaatgagtgatacgcaagctcgaagcaaatcacctatgtttgagaatgggctaatgaagtattctggggctgaacatgaagtgtcacatggcatgtatcagattcatgaagttgatcatgctgagagatctcgtgggcttcaacagatgtcacggtatgaaatactgaataatcttcagaaagcgcagaagtcctttcatatagaaaccgtacctccattgaaacttgcaccgccagctatataccatgagaagatacagaagaggaccacttcggttggtgaaactagcaaacattctgttagaagtcagaaaccccagaaaatttggcaaatgaaggagaaaaaatcaaaagaggctgggagtcatcatccacaaaagtcaagttttctacgttaatagaagaaaagattgctgatttgttaagtatgaaaccagatccaaactgattgttaatttgcttcatgccatcaccacgatcgaatcttcaagactacaaatttgtcagcgtgatggagcctgcccatcagtacatagcttttttttttgtcttggggatgcatcctgttggtttatcatcttctgcttaattacaggttctgtggagccaaggtgctttgggctagggaggaaattgtaacagtaaattttcatacagttcatcgtgattagttttgtgtacagagcagagcatacacgtggtgacatggtccctgtagagggacacattcgcagtaaaggtgggatgcctcgattcatactcaacaatgtaaagtaaaggtgggatacctcaattcatgatcattgtaaaatacgtgcacagtataacacaggagcactggctgagtggcatgtatccttgcagttcatcgcgattaatctctgtacagagctgttatactgtcggttttgatatcagttgcaattacacatctgctacagttttgtagtatcagatatcagaacacgtcgggcccgcagaacgcctggaagctcgtagttgtcggcgccgagcatcctgtcgccattgggttgcgctgtactgtactactactactacgcgtctgttgtctaggtgggag

SEQ ID NO: 49313 - DNA, 6830 bp, Zea Mays
gaaaaagctcgcaaaatcgcagcacactagcacagaaccttggacgcgaaggcgtcataccccgatgccggcgtcgtcgtcgccggcgatggcgtcgcagcatgcgccgccgaggcgggagctcgacctcgacgctttcctcccgtcctctccgacatcctccggggcctcggacgccgacccggccgacgatgaccaccgccgcgccgtcgacgacctgctccgcctcctctcctcctcagactcggactccgattccgaggagtctagccgcatcccaagcaccagcatccagacgctatcccgagtccaagccccggcgcctgtcgctgagccctcgccgtcgccttccccatccgcgtccccgtccccgaggagatccgcatcggccttgccgtcggagaccctctcctccctcgtcgcgagaaccttctcgagcaacggcgcttcctcgtcgtcgaagcccctcccctcgctcttccggggcgtccgccccagccccaaacccggcgccgcgcttgccgctgctgccgcagcgtcccgcgcggtcctcaccccacacgccgctgccatcaagtcgcgccgatcagtatcggcgcccgtggagaaagttctggaggaagaggggagtggctccgaaggctccaaggagttccttcccactgggagcttggaagcagaggtagaagagaagggtgattcggaagcggttgctgatgcgaccaagcaaactgcaggtgggaatgtgggtgcggaactgggagaggataaacaggcagaagtgggaggtgaagagaatgctgaggctataaagctggtggaggcaagtcctctggatgctctagctgcggaggattccagtgggcatgagcaaggtaatgatgccaatttggcggaaactgaccaagttgggaatcagattgaggctgtctatgaggaaaatgaggatgaccaaactggaggtgataatcatgttcaatcaggtcagggtatggatcttattgcgattgctttagaggaaagttctgatgatgaacatgaatttgaaagatctgacagtatcttgcaagaacaagtggaatctgggagcttaattgataaagtgattgaagatagggtagagcagctggaggccagcaggaaggctgagaacacagagaagaagctgaaggtgtcaatgaaaccgttggagtgggcagaggagcttgagaagaggcaggcctcgtctggtcaacattgggaggaaggagcagctgcgcagcccatgcaactagagggaatcggaaagggcccaccagctatcggttacatgcaaattgagatggacaatccagtaacccgtgtcatgtcctcaccgtcatttaggtcagaccatggctctccccaggtgctggctgttcataggagctatatagcaatgggcacatctaaaggtgctgtcatcgtcattccaagcaaatactccattcatcaagctgatgatacagatgcaaagatgctgttcttttggaaccaaggcgagaagactcaatcaccagtgactgccatgtgctttaaccagcaaggggaccttctgctagtaggatatggtgatggtcatatgacaatttgggatgtacagaaatctgcagcagcaaaagttatatatggcgagcatacagcaccagtagtgcatgcttgttttatccgccaatctaaagccatcactggggattcaaaaggggtagttctattgcacacattttccattatccccgtaattaatcgtttaactgtcaagggaactcagcgtctttttgatgggaatactggaattgtgctctcagcctgtcctcttgtaatggatgaatcttttggttttagtaattcatctgcccagggaaatcagacaacttcctccagtggtggtcttggcagcatgatgggtggtgttgttggaggcgtggttggagtagattctggatggaagtttttcaacgaaggctcttctccaatggaggatggtgttgtagtcatgtttattatgcatcaacatgctcttgtggttagactccgtaccaatattgaccatgttgaccatattgagaccttctctagaccagatggagcacgtgagggctccatcgcgtatgctgcgtggaaatatacatcatatttgaatgaatcgtcatcagtagatgaagaacgagtgtcatggctagcacttgcatgggaccgtcaagtgcaagttgcaaagtttgttaaatcaaagatatttaaacacaaagagtggaagcttgatagttcagctgttggtgttgcctggttagacgaccagatgttagttgtccttaatttgagagggcaactctgtttattctctaaagatggcagtgagcttcgcagaactacctttgttcctgatggccttctttttgatgacaccatattgcaccatgcacatttttttaacaggtttggtaacccagagaggcattttaacagttcagtagcggtaagaggtgctacagtgtatattcttgggccatcttttctcacggtttcccgacttcttccatggaaagagcgaattgaagcactaaagagggctggcgattggatgggtgcactagacatggcaatgaggctttatgatggtcagacacagggtgttgttgatctcccaagaacggttgattctattagagatgccataatgccttacttagtagagttgctgctatcatatataagttatgtttttgaatatatttcaattgcgctgccaaatcatactggaaaagggggagaatcaggtgttctaatagaggcagatcgatccctgcttacacaaagagatgagcagtacgctcgtgtaggaggggttgcagttgagtattgtgtccacattggacggaatgatatccttttcgatacagtcttctctaagtttgctgctgcagaaagtggaggtatgtttctggaggtgctagagccttatatattgaaggatatgcttggttctctgccccctgagattatgcaagcactagtggagcattatagtggcaaagggtggttgcaacgagttgaacaatgcatccttcacatggatatttcttcattggactttaatcaggtagtcagactttgtcgtgaacatgggctatatggtgcactaatttatttatttaaccaaggcctgaatgatttccgtacaccactagaggaacttctatcagtcgttcagaacaccaacagtaaagatgatgcttctagtggatacaggatgcttgtttatctgaaatattgctttcagggtttggcatttcctccagggcatggaataattccccaatcccggcttcattcagtgagggaagaactccttcaatttctgcttgaagaatctaagccactcacttctgaagtatttaagggtttcaatgcttcttgtggaaagtgcctaaacatatgctatctgctatggttggatactgaagctactttggaagtcatcaaatgtgcttttgtacaggataactttgagtctagagatgaacttccgagtactgtcaatacatctgcttcagataatgaagatggtattgatgctggaagaccagagggccaaaatgctatggtacaaaatgtggttgatgccatcattgacatagttggtttggaaaatgatgtgattcggtctgttatgggtagaactgaatcagaattatggccttcggagaaggattttggctatttaatggagtttgtgtccttttttgtttctcacaaaagggctaatgcatctaagagggttgttatgcacattcttacttatctcatttcgtcatatgatgacacaagaacaaggattcagaaagaaaaagaagttcttcaactcttcaatgcggttccccgaaacgattggaattcggattttgtcttgaacctttgttcagatgctcatttttatcaggcctgtggtttgatatttacagccaggaatcagaatttggctgctttagatagttacatgaaggataaagaggaacctttccatgcttttatcttcattgataagaagttactagaattggttgacgatgaagctttgtcgtttcataccacagtaatatctcgctttcctgagctagtcaagctaagcagggaatgtgcatttgtcttggcgattgatcatttctgtgataagatacagcaaatattagcagagcttcgttctgaccgacacagcctctttcttttcttgaaaactgctattgaagtacacttgtctggaaaacttgacttcagtaagcttgaattaagaaacaaacaaactgttgaactccagtactcttctactgaagttgaagcttatcagcagaggctatcaaatctctccaagttatgccacaatcctgtttacatcgacgacgagttagttgagctttatctggagcttttatgtcagtatgagcgaaggtcagttctgaagtttctggagacttttgacagttacagattggaacggtgcttgcatctttgcctagattatggagttacagatgctgctgctttcttgcaagagagggttggtgatgttgggagtgcccttgaccttattctggctggacttgatgagaaaattagcttatttatctcttctgtggaaagtactttctctggcgtcgcatcaaaaagtatcgctgaaattaagcaaccagacatcgttctagaaatgagtgaggctcatccagtgcttgatgcattgcatgcctccattggattgtgccaaaggaattcacagcgcttggacccagaggaatctcagtccctttggttccaactccttgactcgaaattattcaatagcgcatctagaaagacaatgcgagcctattgctgtaagcctgtgataatttgggggaagttttttccaaactgttctcaatttttgtcatgctcatagtttgctgaagacatatttaaggggtgtttgtttgagattataatatgtccagattatataatctaataaattttgaactaacactttcttcaaaatttattggattatataatctggacagattataatcccaaacaaacaccccattatatatttatattttgtactgatgtatactagtacttcttccaaattgttgggttattaattcagcttctcagagccattaaaaaaactgtatgggatcaaggatgtaaatggaaaaggtgtcaagtccaattggagtgaagcatcaatggaacatctgaaggaaaaaggactatctcaacaaatgaggatttcaactaaacaaaagtgcctaaatgttctgcgaaaagtattttcacaatgtgttggagaaataatagaggccatggctgggtatattcccctaccggcaatcatggcaaaactgttatctgataatgggaatcaagagttcggtgatttcaaacttgtgatacacagaatgttatctatgtatctttacgaaaaaagaatactggaaacggctaagtcagtaattgaggatgactcattttacaccttgagcttattaaagagaggagtttgtcatgggtttgccccacagactttcgtatgctgcatatgcaactgttcactttctaaagaaggtgctatttcagccgtacgtttgttcagttgcgggcatgcaacacatcttcagtgtgagtctgagcagaccaggtcatccaatcaggaatccaaagagggatgccctgtttgtctctcaatgagtgatacgcaagctcgaagcaaatcacctatgtttgagaatgggctaatgaagtattctggggctgaacatgaagtgtcacatggcatgtatcagattcatgaagttgatcatgctgagagatctcgtgggcttcaacagatgtcacggtatgaaatactgaataatcttcagaaagcgcagaagtcctttcatatagaaaccgtacctccattgaaacttgcaccgccagctatataccatgagaagatacagaagaggaccacttcggttggtgaaactagcaaacattctgttagaagtcagaaaccccagaaaatttggcaaatgaaggagaaaaaatcaaaagaggctgggagtcatcatccacaaaagtcaagttttctacgttaatagaagaaaagattgctgatttgttaagtatgaaaccagatccaaactgattgttaatttgcttcatgccatcaccacgatcgaatcttcaagactacaaatttgtcagcgtgatggagcctgcccatcagtacatagcttttttttttgtcttggggatgcatcctgttggtgagatcctcttcccctgcaccatggtcagaggttctgtggagccaaggtgctttgggctagggaggaaattgtaacagtaaattttcatacagttcatcgtgattagttttgtgtacagagcagagcatacacgtggtgacatggtccctgtagagggacacattcgcagtaaaggtgggatgcctcgattcatactcaacaatgtaaagtaaaggtgggatacctcaattcatgatcattgtaaaatacgtgcacagtataacacaggagcactggctgagtggcatgtatccttgcagttcatcgcgattaatctctgtacagagctgttatactgtcggttttgatatcagttgcaattacacatctgctacagttttgtagtatcagatatcagaacacgtcgggcccgcagaacgcctggaagctcgtagttgtcggcgccgagcatcctgtcgccattgggttgcgctgtactgtactactactactacgcgtctgttgtctaggtgggag

SEQ ID NO: 49314 - DNA, 6488 bp, Zea Mays
gaaaaagctcgcaaaatcgcagcacactagcacagaaccttggacgcgaaggcgtcataccccgatgccggcgtcgtcgtcgccggcgatggcgtcgcagcatgcgccgccgaggcgggagctcgacctcgacgctttcctcccgtcctctccgacatcctccggggcctcggacgccgacccggccgacgatgaccaccgccgcgccgtcgacgacctgctccgcctcctctcctcctcagactcggactccgattccgaggagtctagccgcatcccaagcaccagcatccagacgctatcccgagtccaagccccggcgcctgtcgctgagccctcgccgtcgccttccccatccgcgtccccgtccccgaggagatccgcatcggccttgccgtcggagaccctctcctccctcgtcgcgagaaccttctcgagcaacggcgcttcctcgtcgtcgaagcccctcccctcgctcttccggggcgtccgccccagccccaaacccggcgccgcgcttgccgctgctgccgcagcgtcccgcgcggtcctcaccccacacgccgctgccatcaagtcgcgccgatcagtatcggcgcccgtggagaaagttctggaggaagaggggagtggctccgaaggctccaaggagttccttcccactgggagcttggaagcagaggtagaagagaagggtgattcggaagcggttgctgatgcgaccaagcaaactgcaggtgggaatgtgggtgcggaactgggagaggataaacaggcagaagtgggaggtgaagagaatgctgaggctataaagctggtggaggcaagtcctctggatgctctagctgcggaggattccagtgggcatgagcaaggtaatgatgccaatttggcggaaactgaccaagttgggaatcagattgaggctgtctatgaggaaaatgaggatgaccaaactggaggtgataatcatgttcaatcaggtcagggtatggatcttattgcgattgctttagaggaaagttctgatgatgaacatgaatttgaaagatctgacagtatcttgcaagaacaagtggaatctgggagcttaattgataaagtgattgaagatagggtagagcagctggaggccagcaggaaggctgagaacacagagaagaagctgaaggtgtcaatgaaaccgttggagtgggcagaggagcttgagaagaggcaggcctcgtctggtcaacattgggaggaaggagcagctgcgcagcccatgcaactagagggaatcggaaagggcccaccagctatcggttacatgcaaattgagatggacaatccagtaacccgtgtcatgtcctcaccgtcatttaggtcagaccatggctctccccaggtgctggctgttcataggagctatatagcaatgggcacatctaaaggtgctgtcatcgtcattccaagcaaatactccattcatcaagctgatgatacagatgcaaagatgctgttcttttggaaccaaggcgagaagactcaatcaccagtgactgccatgtgctttaaccagcaaggggaccttctgctagtaggatatggtgatggtcatatgacaatttgggatgtacagaaatctgcagcagcaaaagttatatatggcgagcatacagcaccagtagtgcatgcttgttttatccgccaatctaaagccatcactggggattcaaaaggggtagttctattgcacacattttccattatccccgtaattaatcgtttaactgtcaagggaactcagcgtctttttgatgggaatactggaattgtgctctcagcctgtcctcttgtaatggatgaatcttttggttttagtaattcatctgcccagggaaatcagacaacttcctccagtggtggtcttggcagcatgatgggtggtgttgttggaggcgtggttggagtagattctggatggaagtttttcaacgaaggctcttctccaatggaggatggtgttgtagtcatgtttattatgcatcaacatgctcttgtggttagactccgtaccaatattgaccatgttgaccatattgagaccttctctagaccagatggagcacgtgagggctccatcgcgtatgctgcgtggaaatatacatcatatttgaatgaatcgtcatcagtagatgaagaacgagtgtcatggctagcacttgcatgggaccgtcaagtgcaagttgcaaagtttgttaaatcaaagatatttaaacacaaagagtggaagcttgatagttcagctgttggtgttgcctggttagacgaccagatgttagttgtccttaatttgagagggcaactctgtttattctctaaagatggcagtgagcttcgcagaactacctttgttcctgatggccttctttttgatgacaccatattgcaccatgcacatttttttaacaggtttggtaacccagagaggcattttaacagttcagtagcggtaagaggtgctacagtgtatattcttgggccatcttttctcacggtttcccgacttcttccatggaaagagcgaattgaagcactaaagagggctggcgattggatgggtgcactagacatggcaatgaggctttatgatggtcagacacagggtgttgttgatctcccaagaacggttgattctattagagatgccataatgccttacttagtagagttgctgctatcatatataagttatgtttttgaatatatttcaattgcgctgccaaatcatactggaaaagggggagaatcaggtgttctaatagaggcagatcgatccctgcttacacaaagagatgagcagtacgctcgtgtaggaggggttgcagttgagtattgtgtccacattggacggaatgatatccttttcgatacagtcttctctaagtttgctgctgcagaaagtggaggtatgtttctggaggtgctagagccttatatattgaaggatatgcttggttctctgccccctgagattatgcaagcactagtggagcattatagtggcaaagggtggttgcaacgagttgaacaatgcatccttcacatggatatttcttcattggactttaatcaggtagtcagactttgtcgtgaacatgggctatatggtgcactaatttatttatttaaccaaggcctgaatgatttccgtacaccactagaggaacttctatcagtcgttcagaacaccaacagtaaagatgatgcttctagtggatacaggatgcttgtttatctgaaatattgctttcagggtttggcatttcctccagggcatggaataattccccaatcccggcttcattcagtgagggaagaactccttcaatttctgcttgaagaatctaagccactcacttctgaagtatttaagggtttcaatgcttcttgtggaaagtgcctaaacatatgctatctgctatggttggatactgaagctactttggaagtcatcaaatgtgcttttgtacaggataactttgagtctagagatgaacttccgagtactgtcaatacatctgcttcagataatgaagatggtattgatgctggaagaccagagggccaaaatgctatggtacaaaatgtggttgatgccatcattgacatagttggtttggaaaatgatgtgattcggtctgttatgggtagaactgaatcagaattatggccttcggagaaggattttggctatttaatggagtttgtgtccttttttgtttctcacaaaagggctaatgcatctaagagggttgttatgcacattcttacttatctcatttcgtcatatgatgacacaagaacaaggattcagaaagaaaaagaagttcttcaactcttcaatgcggttccccgaaacgattggaattcggattttgtcttgaacctttgttcagatgctcatttttatcaggcctgtggtttgatatttacagccaggaatcagaatttggctgctttagatagttacatgaaggataaagaggaacctttccatgcttttatcttcattgataagaagttactagaattggttgacgatgaagctttgtcgtttcataccacagtaatatctcgctttcctgagctagtcaagctaagcagggaatgtgcatttgtcttggcgattgatcatttctgtgataagatacagcaaatattagcagagcttcgttctgaccgacacagcctctttcttttcttgaaaactgctattgaagtacacttgtctggaaaacttgacttcagtaagcttgaattaagaaacaaacaaactgttgaactccagtactcttctactgaagttgaagcttatcagcagaggctatcaaatctctccaagttatgccacaatcctgtttacatcgacgacgagttagttgagctttatctggagcttttatgtcagtatgagcgaaggtcagttctgaagtttctggagacttttgacagttacagattggaacggtgcttgcatctttgcctagattatggagttacagatgctgctgctttcttgcaagagagggttggtgatgttgggagtgcccttgaccttattctggctggacttgatgagaaaattagcttatttatctcttctgtggaaagtactttctctggcgtcgcatcaaaaagtatcgctgaaattaagcaaccagacatcgttctagaaatgagtgagtgcttgatgcattgcatgcctccattggattgtgccaaaggaattcacagcgcttggacccagaggaatctcagtccctttggttccaactccttgactccttctcagagccattaaaaaaactgtatgggatcaaggatgtaaatggaaaaggtgtcaagtccaattggagtgaagcatcaatggaacatctgaaggaaaaaggactatctcaacaaatgaggatttcaactaaacaaaagtgcctaaatgttctgcgaaaagtattttcacaatgtgttggagaaataatagaggccatggctgggtatattcccctaccggcaatcatggcaaaactgttatctgataatgggaatcaagagttcggtgatttcaaacttgtgatacacagaatgttatctatgtatctttacgaaaaaagaatactggaaacggctaagtcagtaattgaggatgactcattttacaccttgagcttattaaagagaggagtttgtcatgggtttgccccacagactttcgtatgctgcatatgcaactgttcactttctaaagaaggtgctatttcagccgtacgtttgttcagttgcgggcatgcaacacatcttcagtgtgagtctgagcagaccaggtcatccaatcaggaatccaaagagggatgccctgtttgtctctcaatgagtgatacgcaagctcgaagcaaatcacctatgtttgagaatgggctaatgaagtattctggggctgaacatgaagtgtcacatggcatgtatcagattcatgaagttgatcatgctgagagatctcgtgggcttcaacagatgtcacggtatgaaatactgaataatcttcagaaagcgcagaagtcctttcatatagaaaccgtacctccattgaaacttgcaccgccagctatataccatgagaagatacagaagaggaccacttcggttggtgaaactagcaaacattctgttagaagtcagaaaccccagaaaatttggcaaatgaaggagaaaaaatcaaaagaggctgggagtcatcatccacaaaagtcaagttttctacgttaatagaagaaaagattgctgatttgttaagtatgaaaccagatccaaactgattgttaatttgcttcatgccatcaccacgatcgaatcttcaagactacaaatttgtcagcgtgatggagcctgcccatcagtacatagcttttttttttgtcttggggatgcatcctgttggtttatcatcttctgcttaattacaggttctgtggagccaaggtgctttgggctagggaggaaattgtaacagtaaattttcatacagttcatcgtgattagttttgtgtacagagcagagcatacacgtggtgacatggtccctgtagagggacacattcgcagtaaaggtgggatgcctcgattcatactcaacaatgtaaagtaaaggtgggatacctcaattcatgatcattgtaaaatacgtgcacagtataacacaggagcactggctgagtggcatgtatccttgcagttcatcgcgattaatctctgtacagagctgttatactgtcggttttgatatcagttgcaattacacatctgctacagttttgtagtatcagatatcagaacacgtcgggcccgcagaacgcctggaagctcgtagttgtcggcgccgagcatcctgtcgccattgggttgcgctgtactgtactactactactacgcgtctgttgtctaggtgggag

SEQ ID NO: 49315 - DNA, 6475 bp, Zea Mays
gaaaaagctcgcaaaatcgcagcacactagcacagaaccttggacgcgaaggcgtcataccccgatgccggcgtcgtcgtcgccggcgatggcgtcgcagcatgcgccgccgaggcgggagctcgacctcgacgctttcctcccgtcctctccgacatcctccggggcctcggacgccgacccggccgacgatgaccaccgccgcgccgtcgacgacctgctccgcctcctctcctcctcagactcggactccgattccgaggagtctagccgcatcccaagcaccagcatccagacgctatcccgagtccaagccccggcgcctgtcgctgagccctcgccgtcgccttccccatccgcgtccccgtccccgaggagatccgcatcggccttgccgtcggagaccctctcctccctcgtcgcgagaaccttctcgagcaacggcgcttcctcgtcgtcgaagcccctcccctcgctcttccggggcgtccgccccagccccaaacccggcgccgcgcttgccgctgctgccgcagcgtcccgcgcggtcctcaccccacacgccgctgccatcaagtcgcgccgatcagtatcggcgcccgtggagaaagttctggaggaagaggggagtggctccgaaggctccaaggagttccttcccactgggagcttggaagcagaggtagaagagaagggtgattcggaagcggttgctgatgcgaccaagcaaactgcaggtgggaatgtgggtgcggaactgggagaggataaacaggcagaagtgggaggtgaagagaatgctgaggctataaagctggtggaggcaagtcctctggatgctctagctgcggaggattccagtgggcatgagcaaggtaatgatgccaatttggcggaaactgaccaagttgggaatcagattgaggctgtctatgaggaaaatgaggatgaccaaactggaggtgataatcatgttcaatcaggtcagggtatggatcttattgcgattgctttagaggaaagttctgatgatgaacatgaatttgaaagatctgacagtatcttgcaagaacaagtggaatctgggagcttaattgataaagtgattgaagatagggtagagcagctggaggccagcaggaaggctgagaacacagagaagaagctgaaggtgtcaatgaaaccgttggagtgggcagaggagcttgagaagaggcaggcctcgtctggtcaacattgggaggaaggagcagctgcgcagcccatgcaactagagggaatcggaaagggcccaccagctatcggttacatgcaaattgagatggacaatccagtaacccgtgtcatgtcctcaccgtcatttaggtcagaccatggctctccccaggtgctggctgttcataggagctatatagcaatgggcacatctaaaggtgctgtcatcgtcattccaagcaaatactccattcatcaagctgatgatacagatgcaaagatgctgttcttttggaaccaaggcgagaagactcaatcaccagtgactgccatgtgctttaaccagcaaggggaccttctgctagtaggatatggtgatggtcatatgacaatttgggatgtacagaaatctgcagcagcaaaagttatatatggcgagcatacagcaccagtagtgcatgcttgttttatccgccaatctaaagccatcactggggattcaaaaggggtagttctattgcacacattttccattatccccgtaattaatcgtttaactgtcaagggaactcagcgtctttttgatgggaatactggaattgtgctctcagcctgtcctcttgtaatggatgaatcttttggttttagtaattcatctgcccagggaaatcagacaacttcctccagtggtggtcttggcagcatgatgggtggtgttgttggaggcgtggttggagtagattctggatggaagtttttcaacgaaggctcttctccaatggaggatggtgttgtagtcatgtttattatgcatcaacatgctcttgtggttagactccgtaccaatattgaccatgttgaccatattgagaccttctctagaccagatggagcacgtgagggctccatcgcgtatgctgcgtggaaatatacatcatatttgaatgaatcgtcatcagtagatgaagaacgagtgtcatggctagcacttgcatgggaccgtcaagtgcaagttgcaaagtttgttaaatcaaagatatttaaacacaaagagtggaagcttgatagttcagctgttggtgttgcctggttagacgaccagatgttagttgtccttaatttgagagggcaactctgtttattctctaaagatggcagtgagcttcgcagaactacctttgttcctgatggccttctttttgatgacaccatattgcaccatgcacatttttttaacaggtttggtaacccagagaggcattttaacagttcagtagcggtaagaggtgctacagtgtatattcttgggccatcttttctcacggtttcccgacttcttccatggaaagagcgaattgaagcactaaagagggctggcgattggatgggtgcactagacatggcaatgaggctttatgatggtcagacacagggtgttgttgatctcccaagaacggttgattctattagagatgccataatgccttacttagtagagttgctgctatcatatataagttatgtttttgaatatatttcaattgcgctgccaaatcatactggaaaagggggagaatcaggtgttctaatagaggcagatcgatccctgcttacacaaagagatgagcagtacgctcgtgtaggaggggttgcagttgagtattgtgtccacattggacggaatgatatccttttcgatacagtcttctctaagtttgctgctgcagaaagtggaggtatgtttctggaggtgctagagccttatatattgaaggatatgcttggttctctgccccctgagattatgcaagcactagtggagcattatagtggcaaagggtggttgcaacgagttgaacaatgcatccttcacatggatatttcttcattggactttaatcaggtagtcagactttgtcgtgaacatgggctatatggtgcactaatttatttatttaaccaaggcctgaatgatttccgtacaccactagaggaacttctatcagtcgttcagaacaccaacagtaaagatgatgcttctagtggatacaggatgcttgtttatctgaaatattgctttcagggtttggcatttcctccagggcatggaataattccccaatcccggcttcattcagtgagggaagaactccttcaatttctgcttgaagaatctaagccactcacttctgaagtatttaagggtttcaatgcttcttgtggaaagtgcctaaacatatgctatctgctatggttggatactgaagctactttggaagtcatcaaatgtgcttttgtacaggataactttgagtctagagatgaacttccgagtactgtcaatacatctgcttcagataatgaagatggtattgatgctggaagaccagagggccaaaatgctatggtacaaaatgtggttgatgccatcattgacatagttggtttggaaaatgatgtgattcggtctgttatgggtagaactgaatcagaattatggccttcggagaaggattttggctatttaatggagtttgtgtccttttttgtttctcacaaaagggctaatgcatctaagagggttgttatgcacattcttacttatctcatttcgtcatatgatgacacaagaacaaggattcagaaagaaaaagaagttcttcaactcttcaatgcggttccccgaaacgattggaattcggattttgtcttgaacctttgttcagatgctcatttttatcaggcctgtggtttgatatttacagccaggaatcagaatttggctgctttagatagttacatgaaggataaagaggaacctttccatgcttttatcttcattgataagaagttactagaattggttgacgatgaagctttgtcgtttcataccacagtaatatctcgctttcctgagctagtcaagctaagcagggaatgtgcatttgtcttggcgattgatcatttctgtgataagatacagcaaatattagcagagcttcgttctgaccgacacagcctctttcttttcttgaaaactgctattgaagtacacttgtctggaaaacttgacttcagtaagcttgaattaagaaacaaacaaactgttgaactccagtactcttctactgaagttgaagcttatcagcagaggctatcaaatctctccaagttatgccacaatcctgtttacatcgacgacgagttagttgagctttatctggagttacagattggaacggtgcttgcatctttgcctagattatggagttacagatgctgctgctttcttgcaagagagggttggtgatgttgggagtgcccttgaccttattctggctggacttgatgagaaaattagcttatttatctcttctgtggaaagtactttctctggcgtcgcatcaaaaagtatcgctgaaattaagcaaccagacatcgttctagaaatgagtgaggctcatccagtgcttgatgcattgcatgcctccattggattgtgccaaaggaattcacagcgcttggacccagaggaatctcagtccctttggttccaactccttgactccttctcagagccattaaaaaaactgtatgggatcaaggatgtaaatggaaaaggtgtcaagtccaattggagtgaagcatcaatggaacatctgaaggaaaaaggactatctcaacaaatgaggatttcaactaaacaaaagtgcctaaatgttctgcgaaaagtattttcacaatgtgttggagaaataatagaggccatggctgggtatattcccctaccggcaatcatggcaaaactgttatctgataatgggaatcaagagttcggtgatttcaaacttgtgatacacagaatgttatctatgtatctttacgaaaaaagaatactggaaacggctaagtcagtaattgaggatgactcattttacaccttgagcttattaaagagaggagtttgtcatgggtttgccccacagactttcgtatgctgcatatgcaactgttcactttctaaagaaggtgctatttcagccgtacgtttgttcagttgcgggcatgcaacacatcttcagtgtgagtctgagcagaccaggtcatccaatcaggaatccaaagagggatgccctgtttgtctctcaatgagtgatacgcaagctcgaagcaaatcacctatgtttgagaatgggctaatgaagtattctggggctgaacatgaagtgtcacatggcatgtatcagattcatgaagttgatcatgctgagagatctcgtgggcttcaacagatgtcacggtatgaaatactgaataatcttcagaaagcgcagaagtcctttcatatagaaaccgtacctccattgaaacttgcaccgccagctatataccatgagaagatacagaagaggaccacttcggttggtgaaactagcaaacattctgttagaagtcagaaaccccagaaaatttggcaaatgaaggagaaaaaatcaaaagaggctgggagtcatcatccacaaaagtcaagttttctacgttaatagaagaaaagattgctgatttgttaagtatgaaaccagatccaaactgattgttaatttgcttcatgccatcaccacgatcgaatcttcaagactacaaatttgtcagcgtgatggagcctgcccatcagtacatagcttttttttttgtcttggggatgcatcctgttggtgagatcctcttcccctgcaccatggtcagaggtttatcatcttctgcttaattacaggttctgtggagccaaggtgctttgggctagggaggaaattgtaacagtaaattttcatacagttcatcgtgattagttttgtgtacagagcagagcatacacgtggtgacatggtccctgtagagggacacattcgcagtaaaggtgggatgcctcgattcatactcaacaatgtaaagtaaaggtgggatacctcaattcatgatcattgtaaaatacgtgcacagtataacacaggagcactggctgagtggcatgtatccttgcagttcatcgcgattaatctctgtacagagctgttatactgtcggttttgatatcagttgcaattacacatctgctacagttttgtagtatcagatatcagaacacgtcgggcccgcagaacgcctggaagctcgtagttgtcggcgccgagcatcctgtcgccattgggttgcgctgtactgtactactactactacgcgtctgttgtctaggtgggag

SEQ ID NO: 49316 - DNA, 6493 bp, Zea Mays
gaaaaagctcgcaaaatcgcagcacactagcacagaaccttggacgcgaaggcgtcataccccgatgccggcgtcgtcgtcgccggcgatggcgtcgcagcatgcgccgccgaggcgggagctcgacctcgacgctttcctcccgtcctctccgacatcctccggggcctcggacgccgacccggccgacgatgaccaccgccgcgccgtcgacgacctgctccgcctcctctcctcctcagactcggactccgattccgaggagtctagccgcatcccaagcaccagcatccagacgctatcccgagtccaagccccggcgcctgtcgctgagccctcgccgtcgccttccccatccgcgtccccgtccccgaggagatccgcatcggccttgccgtcggagaccctctcctccctcgtcgcgagaaccttctcgagcaacggcgcttcctcgtcgtcgaagcccctcccctcgctcttccggggcgtccgccccagccccaaacccggcgccgcgcttgccgctgctgccgcagcgtcccgcgcggtcctcaccccacacgccgctgccatcaagtcgcgccgatcagtatcggcgcccgtggagaaagttctggaggaagaggggagtggctccgaaggctccaaggagttccttcccactgggagcttggaagcagaggtagaagagaagggtgattcggaagcggttgctgatgcgaccaagcaaactgcaggtgggaatgtgggtgcggaactgggagaggataaacaggcagaagtgggaggtgaagagaatgctgaggctataaagctggtggaggcaagtcctctggatgctctagctgcggaggattccagtgggcatgagcaaggtaatgatgccaatttggcggaaactgaccaagttgggaatcagattgaggctgtctatgaggaaaatgaggatgaccaaactggaggtgataatcatgttcaatcaggtcagggtatggatcttattgcgattgctttagaggaaagttctgatgatgaacatgaatttgaaagatctgacagtatcttgcaagaacaagtggaatctgggagcttaattgataaagtgattgaagatagggtagagcagctggaggccagcaggaaggctgagaacacagagaagaagctgaaggtgtcaatgaaaccgttggagtgggcagaggagcttgagaagaggcaggcctcgtctggtcaacattgggaggaaggagcagctgcgcagcccatgcaactagagggaatcggaaagggcccaccagctatcggttacatgcaaattgagatggacaatccagtaacccgtgtcatgtcctcaccgtcatttaggtcagaccatggctctccccaggtgctggctgttcataggagctatatagcaatgggcacatctaaaggtgctgtcatcgtcattccaagcaaatactccattcatcaagctgatgatacagatgcaaagatgctgttcttttggaaccaaggcgagaagactcaatcaccagtgactgccatgtgctttaaccagcaaggggaccttctgctagtaggatatggtgatggtcatatgacaatttgggatgtacagaaatctgcagcagcaaaagttatatatggcgagcatacagcaccagtagtgcatgcttgttttatccgccaatctaaagccatcactggggattcaaaaggggtagttctattgcacacattttccattatccccgtaattaatcgtttaactgtcaagggaactcagcgtctttttgatgggaatactggaattgtgctctcagcctgtcctcttgtaatggatgaatcttttggttttagtaattcatctgcccagggaaatcagacaacttcctccagtggtggtcttggcagcatgatgggtggtgttgttggaggcgtggttggagtagattctggatggaagtttttcaacgaaggctcttctccaatggaggatggtgttgtagtcatgtttattatgcatcaacatgctcttgtgactccgtaccaatattgaccatgttgaccatattgagaccttctctagaccagatggagcacgtgagggctccatcgcgtatgctgcgtggaaatatacatcatatttgaatgaatcgtcatcagtagatgaagaacgagtgtcatggctagcacttgcatgggaccgtcaagtgcaagttgcaaagtttgttaaatcaaagatatttaaacacaaagagtggaagcttgatagttcagctgttggtgttgcctggttagacgaccagatgttagttgtccttaatttgagagggcaactctgtttattctctaaagatggcagtgagcttcgcagaactacctttgttcctgatggccttctttttgatgacaccatattgcaccatgcacatttttttaacaggtttggtaacccagagaggcattttaacagttcagtagcggtaagaggtgctacagtgtatattcttgggccatcttttctcacggtttcccgacttcttccatggaaagagcgaattgaagcactaaagagggctggcgattggatgggtgcactagacatggcaatgaggctttatgatggtcagacacagggtgttgttgatctcccaagaacggttgattctattagagatgccataatgccttacttagtagagttgctgctatcatatataagttatgtttttgaatatatttcaattgcgctgccaaatcatactggaaaagggggagaatcaggtgttctaatagaggcagatcgatccctgcttacacaaagagatgagcagtacgctcgtgtaggaggggttgcagttgagtattgtgtccacattggacggaatgatatccttttcgatacagtcttctctaagtttgctgctgcagaaagtggaggtatgtttctggaggtgctagagccttatatattgaaggatatgcttggttctctgccccctgagattatgcaagcactagtggagcattatagtggcaaagggtggttgcaacgagttgaacaatgcatccttcacatggatatttcttcattggactttaatcaggtagtcagactttgtcgtgaacatgggctatatggtgcactaatttatttatttaaccaaggcctgaatgatttccgtacaccactagaggaacttctatcagtcgttcagaacaccaacagtaaagatgatgcttctagtggatacaggatgcttgtttatctgaaatattgctttcagggtttggcatttcctccagggcatggaataattccccaatcccggcttcattcagtgagggaagaactccttcaatttctgcttgaagaatctaagccactcacttctgaagtatttaagggtttcaatgcttcttgtggaaagtgcctaaacatatgctatctgctatggttggatactgaagctactttggaagtcatcaaatgtgcttttgtacaggataactttgagtctagagatgaacttccgagtactgtcaatacatctgcttcagataatgaagatggtattgatgctggaagaccagagggccaaaatgctatggtacaaaatgtggttgatgccatcattgacatagttggtttggaaaatgatgtgattcggtctgttatgggtagaactgaatcagaattatggccttcggagaaggattttggctatttaatggagtttgtgtccttttttgtttctcacaaaagggctaatgcatctaagagggttgttatgcacattcttacttatctcatttcgtcatatgatgacacaagaacaaggattcagaaagaaaaagaagttcttcaactcttcaatgcggttccccgaaacgattggaattcggattttgtcttgaacctttgttcagatgctcatttttatcaggcctgtggtttgatatttacagccaggaatcagaatttggctgctttagatagttacatgaaggataaagaggaacctttccatgcttttatcttcattgataagaagttactagaattggttgacgatgaagctttgtcgtttcataccacagtaatatctcgctttcctgagctagtcaagctaagcagggaatgtgcatttgtcttggcgattgatcatttctgtgataagatacagcaaatattagcagagcttcgttctgaccgacacagcctctttcttttcttgaaaactgctattgaagtacacttgtctggaaaacttgacttcagtaagcttgaattaagaaacaaacaaactgttgaactccagtactcttctactgaagttgaagcttatcagcagaggctatcaaatctctccaagttatgccacaatcctgtttacatcgacgacgagttagttgagctttatctggagcttttatgtcagtatgagcgaaggtcagttctgaagtttctggagacttttgacagttacagattggaacggtgcttgcatctttgcctagattatggagttacagatgctgctgctttcttgcaagagagggttggtgatgttgggagtgcccttgaccttattctggctggacttgatgagaaaattagcttatttatctcttctgtggaaagtactttctctggcgtcgcatcaaaaagtatcgctgaaattaagcaaccagacatcgttctagaaatgagtgaggctcatccagtgcttgatgcattgcatgcctccattggattgtgccaaaggaattcacagcgcttggacccagaggaatctcagtccctttggttccaactccttgactccttctcagagccattaaaaaaactgtatgggatcaaggatgtaaatggaaaaggtgtcaagtccaattggagtgaagcatcaatggaacatctgaaggaaaaaggactatctcaacaaatgaggatttcaactaaacaaaagtgcctaaatgttctgcgaaaagtattttcacaatgtgttggagaaataatagaggccatggctgggtatattcccctaccggcaatcatggcaaaactgttatctgataatgggaatcaagagttcggtgatttcaaacttgtgatacacagaatgttatctatgtatctttacgaaaaaagaatactggaaacggctaagtcagtaattgaggatgactcattttacaccttgagcttattaaagagaggagtttgtcatgggtttgccccacagactttcgtatgctgcatatgcaactgttcactttctaaagaaggtgctatttcagccgtacgtttgttcagttgcgggcatgcaacacatcttcagtgtgagtctgagcagaccaggtcatccaatcaggaatccaaagagggatgccctgtttgtctctcaatgagtgatacgcaagctcgaagcaaatcacctatgtttgagaatgggctaatgaagtattctggggctgaacatgaagtgtcacatggcatgtatcagattcatgaagttgatcatgctgagagatctcgtgggcttcaacagatgtcacggtatgaaatactgaataatcttcagaaagcgcagaagtcctttcatatagaaaccgtacctccattgaaacttgcaccgccagctatataccatgagaagatacagaagaggaccacttcggttggtgaaactagcaaacattctgttagaagtcagaaaccccagaaaatttggcaaatgaaggagaaaaaatcaaaagaggctgggagtcatcatccacaaaagtcaagttttctacgttaatagaagaaaagattgctgatttgttaagtatgaaaccagatccaaactgattgttaatttgcttcatgccatcaccacgatcgaatcttcaagactacaaatttgtcagcgtgatggagcctgcccatcagtacatagcttttttttttgtcttggggatgcatcctgttggtttatcatcttctgcttaattacaggttctgtggagccaaggtgctttgggctagggaggaaattgtaacagtaaattttcatacagttcatcgtgattagttttgtgtacagagcagagcatacacgtggtgacatggtccctgtagagggacacattcgcagtaaaggtgggatgcctcgattcatactcaacaatgtaaagtaaaggtgggatacctcaattcatgatcattgtaaaatacgtgcacagtataacacaggagcactggctgagtggcatgtatccttgcagttcatcgcgattaatctctgtacagagctgttatactgtcggttttgatatcagttgcaattacacatctgctacagttttgtagtatcagatatcagaacacgtcgggcccgcagaacgcctggaagctcgtagttgtcggcgccgagcatcctgtcgccattgggttgcgctgtactgtactactactactacgcgtctgttgtctaggtgggag

SEQ ID NO: 49317 - DNA, 3311 bp, Zea Mays
aaaaattgcagacctggcgcctagactcctagctacaattactaagcggattgcgaacaacagaactatacaggatgcttgtttatctgaaatattgctttcagggtttggcatttcctccagggcatggaataattccccaatcccggcttcattcagtgagggaagaactccttcaatttctgcttgaagaatctaagccactcacttctgaagtatttaagggtttcaatgcttcttgtggaaagtgcctaaacatatgctatctgctatggttggatactgaagctactttggaagtcatcaaatgtgcttttgtacaggataactttgagtctagagatgaacttccgagtactgtcaatacatctgcttcagataatgaagatggtattgatgctggaagaccagagggccaaaatgctatggtacaaaatgtggttgatgccatcattgacatagttggtttggaaaatgatgtgattcggtctgttatgggtagaactgaatcagaattatggccttcggagaaggattttggctatttaatggagtttgtgtccttttttgtttctcacaaaagggctaatgcatctaagagggttgttatgcacattcttacttatctcatttcgtcatatgatgacacaagaacaaggattcagaaagaaaaagaagttcttcaactcttcaatgcggttccccgaaacgattggaattcggattttgtcttgaacctttgttcagatgctcatttttatcaggcctgtggtttgatatttacagccaggaatcagaatttggctgctttagatagttacatgaaggataaagaggaacctttccatgcttttatcttcattgataagaagttactagaattggttgacgatgaagctttgtcgtttcataccacagtaatatctcgctttcctgagctagtcaagctaagcagggaatgtgcatttgtcttggcgattgatcatttctgtgataagatacagcaaatattagcagagcttcgttctgaccgacacagcctctttcttttcttgaaaactgctattgaagtacacttgtctggaaaacttgacttcagtaagcttgaattaagaaacaaacaaactgttgaactccagtactcttctactgaagttgaagcttatcagcagaggctatcaaatctctccaagttatgccacaatcctgtttacatcgacgacgagttagttgagctttatctggagcttttatgtcagtatgagcgaaggtcagttctgaagtttctggagacttttgacagttacagattggaacggtgcttgcatctttgcctagattatggagttacagatgctgctgctttcttgcaagagagggttggtgatgttgggagtgcccttgaccttattctggctggacttgatgagaaaattagcttatttatctcttctgtggaaagtactttctctggcgtcgcatcaaaaagtatcgctgaaattaagcaaccagacatcgttctagaaatgagtgaggctcatccagtgcttgatgcattgcatgcctccattggattgtgccaaaggaattcacagcgcttggacccagaggaatctcagtccctttggttccaactccttgactccttctcagagccattaaaaaaactgtatgggatcaaggatgtaaatggaaaaggtgtcaagtccaattggagtgaagcatcaatggaacatctgaaggaaaaaggactatctcaacaaatgaggatttcaactaaacaaaagtgcctaaatgttctgcgaaaagtattttcacaatgtgttggagaaataatagaggccatggctgggtatattcccctaccggcaatcatggcaaaactgttatctgataatgggaatcaagagttcggtgatttcaaacttgtgatacacagaatgttatctatgtatctttacgaaaaaagaatactggaaacggctaagtcagtaattgaggatgactcattttacaccttgagcttattaaagagaggagtttgtcatgggtttgccccacagactttcgtatgctgcatatgcaactgttcactttctaaagaaggtgctatttcagccgtacgtttgttcagttgcgggcatgcaacacatcttcagtgtgagtctgagcagaccaggtcatccaatcaggaatccaaagagggatgccctgtttgtctctcaatgagtgatacgcaagctcgaagcaaatcacctatgtttgagaatgggctaatgaagtattctggggctgaacatgaagtgtcacatggcatgtatcagattcatgaagttgatcatgctgagagatctcgtgggcttcaacagatgtcacggtatgaaatactgaataatcttcagaaagcgcagaagtcctttcatatagaaaccgtacctccattgaaacttgcaccgccagctatataccatgagaagatacagaagaggaccacttcggttggtgaaactagcaaacattctgttagaagtcagaaaccccagaaaatttggcaaatgaaggagaaaaaatcaaaagaggctgggagtcatcatccacaaaagtcaagttttctacgttaatagaagaaaagattgctgatttgttaagtatgaaaccagatccaaactgattgttaatttgcttcatgccatcaccacgatcgaatcttcaagactacaaatttgtcagcgtgatggagcctgcccatcagtacatagcttttttttttgtcttggggatgcatcctgttggtgagatcctcttcccctgcaccatggtcagaggttctgtggagccaaggtgctttgggctagggaggaaattgtaacagtaaattttcatacagttcatcgtgattagttttgtgtacagagcagagcatacacgtggtgacatggtccctgtagagggacacattcgcagtaaaggtgggatgcctcgattcatactcaacaatgtaaagtaaaggtgggatacctcaattcatgatcattgtaaaatacgtgcacagtataacacaggagcactggctgagtggcatgtatccttgcagttcatcgcgattaatctctgtacagagctgttatactgtcggttttgatatcagttgcaattacacatctgctacagttttgtagtatcagatatcagaacacgtcgggcccgcagaacgcctggaagctcgtagttgtcggcgccgagcatcctgtcgccattgggttgcgctgtactgtactactactactacgcgtctgttgtctaggtgggag

SEQ ID NO: 49318 - DNA, 3187 bp, Zea Mays
atacaggatgcttgtttatctgaaatattgctttcagggtttggcatttcctccagggcatggaataattccccaatcccggcttcattcagtgagggaagaactccttcaatttctgcttgaagaatctaagccactcacttctgaagtatttaagggtttcaatgcttcttgtggaaagtgcctaaacatatgctatctgctatggttggatactgaagctactttggaagtcatcaaatgtgcttttgtacaggataactttgagtctagagatgaacttccgagtactgtcaatacatctgcttcagataatgaagatggtattgatgctggaagaccagagggccaaaatgctatggtacaaaatgtggttgatgccatcattgacatagttggtttggaaaatgatgtgattcggtctgttatgggtagaactgaatcagaattatggccttcggagaaggattttggctatttaatggagtttgtgtccttttttgtttctcacaaaagggctaatgcatctaagagggttgttatgcacattcttacttatctcatttcgtcatatgatgacacaagaacaaggattcagaaagaaaaagaagttcttcaactcttcaatgcggttccccgaaacgattggaattcggattttgtcttgaacctttgttcagatgctcatttttatcaggcctgtggtttgatatttacagccaggaatcagaatttggctgctttagatagttacatgaaggataaagaggaacctttccatgcttttatcttcattgataagaagttactagaattggttgacgatgaagctttgtcgtttcataccacagtaatatctcgctttcctgagctagtcaagctaagcagggaatgtgcatttgtcttggcgattgatcatttctgtgataagatacagcaaatattagcagagcttcgttctgaccgacacagcctctttcttttcttgaaaactgctattgaagtacacttgtctggaaaacttgacttcagtaagcttgaattaagaaacaaacaaactgttgaactccagtactcttctactgaagttgaagcttatcagcagaggctatcaaatctctccaagttatgccacaatcctgtttacatcgacgacgagttagttgagctttatctggagcttttatgtcagtatgagcgaaggtcagttctgaagtttctggagacttttgacagttacagattggaacggtgcttgcatctttgcctagattatggagttacagatgctgctgctttcttgcaagagagggttggtgatgttgggagtgcccttgaccttattctggctggacttgatgagaaaattagcttatttatctcttctgtggaaagtactttctctggcgtcgcatcaaaaagtatcgctgaaattaagcaaccagacatcgttctagaaatgagtgaggaattcacagcgcttggacccagaggaatctcagtccctttggttccaactccttgactccttctcagagccattaaaaaaactgtatgggatcaaggatgtaaatggaaaaggtgtcaagtccaattggagtgaagcatcaatggaacatctgaaggaaaaaggactatctcaacaaatgaggatttcaactaaacaaaagtgcctaaatgttctgcgaaaagtattttcacaatgtgttggagaaataatagaggccatggctgggtatattcccctaccggcaatcatggcaaaactgttatctgataatgggaatcaagagttcggtgatttcaaacttgtgatacacagaatgttatctatgtatctttacgaaaaaagaatactggaaacggctaagtcagtaattgaggatgactcattttacaccttgagcttattaaagagaggagtttgtcatgggtttgccccacagactttcgtatgctgcatatgcaactgttcactttctaaagaaggtgctatttcagccgtacgtttgttcagttgcgggcatgcaacacatcttcagtgtgagtctgagcagaccaggtcatccaatcaggaatccaaagagggatgccctgtttgtctctcaatgagtgatacgcaagctcgaagcaaatcacctatgtttgagaatgggctaatgaagtattctggggctgaacatgaagtgtcacatggcatgtatcagattcatgaagttgatcatgctgagagatctcgtgggcttcaacagatgtcacggtatgaaatactgaataatcttcagaaagcgcagaagtcctttcatatagaaaccgtacctccattgaaacttgcaccgccagctatataccatgagaagatacagaagaggaccacttcggttggtgaaactagcaaacattctgttagaagtcagaaaccccagaaaatttggcaaatgaaggagaaaaaatcaaaagaggctgggagtcatcatccacaaaagtcaagttttctacgttaatagaagaaaagattgctgatttgttaagtatgaaaccagatccaaactgattgttaatttgcttcatgccatcaccacgatcgaatcttcaagactacaaatttgtcagcgtgatggagcctgcccatcagtacatagcttttttttttgtcttggggatgcatcctgttggtttatcatcttctgcttaattacaggttctgtggagccaaggtgctttgggctagggaggaaattgtaacagtaaattttcatacagttcatcgtgattagttttgtgtacagagcagagcatacacgtggtgacatggtccctgtagagggacacattcgcagtaaaggtgggatgcctcgattcatactcaacaatgtaaagtaaaggtgggatacctcaattcatgatcattgtaaaatacgtgcacagtataacacaggagcactggctgagtggcatgtatccttgcagttcatcgcgattaatctctgtacagagctgttatactgtcggttttgatatcagttgcaattacacatctgctacagttttgtagtatcagatatcagaacacgtcgggcccgcagaacgcctggaagctcgtagttgtcggcgccgagcatcctgtcgccattgggttgcgctgtactgtactactactactacgcgtctgttgtctaggtgggag

SEQ ID NO: 49319 - DNA, 471 bp, Zea Mays
cttcccccgcttctcgacgtcggcgatcagcacacggcacgaccgtacgagcgacaaggttttctgccagaggaatatgacagcttctttgttaagtacctttatccatcgttcactccaacagttgttctgtttttggctggtacggttgggtatggtgtcctcaaatactttgaaagcgagaaaagcaaaagctagatgacagcacgaagcatgtttggagcaatgatgagggtagagttagcaaatgtgcttgttatgtatgaagtagcttaaagcagcagatatgtgccagagaataggctggtgtttttatttatttttccttatatcctgcatcccaaattcctaattattcttttttgtttgtttgtaaattaacgatcaatggatactttcctgaatatgtattaagttgagttgtatattggtttttggcgatcaattggcttgttgagaccattttgacca

SEQ ID NO: 49320 - DNA, 998 bp, Zea Mays
aaggcgtgcatcatatccaaagtgaactggtagcttgtgcttctggtgccaactttacaccacatattattaatgttgctgctggtgaggatgtcagcatgaaggtcatatctttctcccaacaaggtccaagggctatttgcattctatctgccaatggagttatcgcaaatgttacactgcgtcaacaagactcattaggtggtacagttacttatgagggtcggttcgagctgctctccctgtccggatctttcactcccactgatagcggcggcggcaccagaagccgctcaggtgggatgagcgtgtccttagcagccgccgacggccgcgtcatcggaggcggagtcgccggcctcctcgtggccgccagccctgtccaggtcgtggtgggaagcttcctcccgagctaccagctggaccagggcgccaacaagaagccggtgatagagatcacgacagtgccgccggcgcccgtcgggttcaccatctcaagcggggacatggacgacgcgtacagcggcagccagcatccaaggtcggcggcggcgaaagggggctcgaccaccacggcactgttcaaggtggagaactggacggcgcccgcgcccgcgcccgatcaggcgaggaaggcgccggcgccggaggccaaagtccccgtccccggaggctgaagccgacatcctctacctagctagccggccgaccgtcgatcgatcaggccctgcagcttgttgggaatccagtaattcgtgatccttgtaaccgacgccgtcttagtacagaagtggatcagtatgaatcacccgctgttcatcattaattaggtgtcgacattttcccggtttatatatgtgtggagtttcattatccattgtttaaataacggtgtatgtatactggttagcagtaatacagtcgtcgtagcacagtgccaattttttgtgtgttcatctgaaacatcaaacaagtaatatacacagcatgtagtgtag

SEQ ID NO: 49321 - DNA, 1755 bp, Zea Mays
ggcgcgcggcattggtcggtccggagcggtttcgcgtcatcgatgcggttcgctgatacggcaatacggcatgcatgagcggcgacgcacgcacgcactagaaggaaacttctgggggagtccggagaagctttcgttccttcgtccttctccttcccaccgccacgccacgccacgccacgccggctcggtacatatactagcctgcctcgatcggcctccctcgcattccccctcgatcggcctccctcccccaagatcctccactcgatcccaaacaaaccaacaaatccatccatcgcacatggacgcgttcttctcggcctcctccgcgtcggcgccctacggctacggcgccggcggatggagctacgactcgctcaagaacttccgccagatcacccccgccgtccagacccacctcaagctcaaattctcctgcgggttgcgtgtagctgatgcgtaattccctgacgtaatcttgtgattcgcgcgcgtcgtgttccttgcgttgagaactgcaactgcggatgccaccgattcgatcgattcgtcactttaagaacatgcatgatccggttagaacagcaagatatgataaatcgatttgaatccaaatctgaccctctggttcggcttggttgcctgcaggtctacctcaccctgtgcgcggcgctggcctcgtcggcggtgggcgcttacctgcacgtggtctggaacatcggcggtacgctgacaatgctcggttgcgtcggcagcatcgcctggctcttctcggtgcccgtctacgaggagaggaagaggtatgggctgctgatggcggctgccctcctggaaggcgcttcggtcggacccctcgtcaagctcgccgtggaatttgacccaagcatcctggtgacggcgttcgtggggactgccatcgcgttcgcgtgcttcaccggcgcggccatggtggccaggcgcagggagtacctctacctgggtgggctgctctcgtcggggctctccatcctgctctggctgcagctagccggctccatcttcggccactccgcaaccagcttcatgttcgaggtctacttcgggctgctcatcttcctgggctacgtggtgtacgacacgcaggagatcatcgagagggcgcaccgcggcgacatggaccacgtcaagcacgccctcaccctcttcacagacttcgtggccgtcctcgtccgcgtcctcgtcatcatggtgagtgagctctttcctcttggtgatgatgctgggttgctgccgcggattatattggtggaatagcttgcgcatgattttgatttcagatttctccctgtgctgccggtggcggttgtttctgaatggctgtactgaccgaaccgttggtgttgcatgctctgcagctcaagaacggggccgacaagtcggaggacaagaagaggaagaagaggtcgtgagcgcgtcgagaagggaagctcttccacttccacatatgcataggagtaactgctggggttccttcctggggtggaagtgtggaactgagctgagtgttcagaagtgttcctttgttcggcacctttgttctcttcctctcttgatgagtctgtaaatagctatgtcaatctggttaagcttggtttggttgcctgtgcctgtgttcgctggcctttggatagaatgcaaattaaagatgttgctattgcacagtccattcctgtccttgtttgtgacggtttatagtagtagtgatgatcgtca

SEQ ID NO: 49322 - DNA, 1174 bp, Zea Mays
gctgtgtcgtgtcgctctgtgccaccccaccagcctccctccccctcttctactcctggatcggcccagcttctttaattcccttccttcgcctggccgcgaccagtaccacccaccgctcgctctcgctcccaggcctcctgccgcccggcccgcgccgcgccatggaagagccgccgccggggagcagcaaggccgccgcggcgcgcgcgccccgggtggtgggcgtgctggcggggctgctggagcgcgcggcggagcgcggcgacacggcgacgccgacgctggcggactcggcgttccggggccgcgcgctgccggggatccccgtgcggcggtacgcggagcggatataccggtacgccgggtgcagcccggcctgctacgtcctcgcctacgtctacctcgaccgcctcgcgcggggccaatgcgacgccggcgccggcgaggacgaggacgaggacgaggcggcggttgtcggcatcgactcgtacaccgtccaccgcctcctcatcacctccgtcttggtcgccgccaagttcatggacgacagccatttctgcattccgctcacaacaacaacaacaaaaaaaaggagcagccggtagcggtaggtgtgcggtggtgccgtggtggtacctggcaccacaacaacgcctacttcgcgcgggtgggcggcgtggaggtggcggagatgaacgcgctggagctgcgcctcctcttcgccctgcgcttccgcctcaacgtcgcccccgacaccttcgcgcggtactgcgccgcgctcgagtgccacgtcgacacgcccgacgccggcggccccgtgccgcggatgccgccctcctcccacgtcgacggcgaggaggcagtgaccagcagcaagggcaaggttgccgccgccggtggcggttccgtcgtcgtccagcgtagtcaccgtcagcggagagccgtggtacagatcatgacgacggcccaatgacgacgacggacggcctaggtcgacgtacgggagattgtttcatttgttcttttttaatatacgctccatataagcttttgtacgcacctgctatatacactccataagcttttgtacacccgtctatggctcgatatcgagccatccagcggttgattggttgtctatacgagattacgaggggaggctggcctgcac

SEQ ID NO: 49323 - DNA, 1792 bp, Zea Mays
gctgtgtcgtgtcgctctgtgccaccccaccagcctccctccccctcttctactcctggatcggcccagcttctttaattcccttccttcgcctggccgcgaccagtaccacccaccgctcgctctcgctcccaggcctcctgccgcccggcccgcgccgcgccatggaagagccgccgccggggagcagcaaggccgccgcggcgcgcgcgccccgggtggtgggcgtgctggcggggctgctggagcgcgcggcggagcgcggcgacacggcgacgccgacgctggcggactcggcgttccggggccgcgcgctgccggggatccccgtgcggcggtacgcggagcggatataccggtacgccgggtgcagcccggcctgctacgtcctcgcctacgtctacctcgaccgcctcgcgcggggccaatgcgacgccggcgccggcgaggacgaggacgaggacgaggcggcggttgtcggcatcgactcgtacaccgtccaccgcctcctcatcacctccgtcttggtcgccgccaagttcatggacgacaggttttagtgtctgcaagagaagaagttgaagcagagttgtcacctgcaatgaatgctgcaattaagatcttcaagcatataaacgagatagaagatatcaattctgatggaactttaatggctcctgcaccagaaatttcttctgttagattattagttccttttgcacaagctctccatgtaattggcaagcaaggagtcacaattaagtcaattcaggaaagtacaggtagtaccgtaaggatcatggatgaagatgagctattgagtcatgagacaatgggtgaaagaattgtggagataaatggtgcttcgctcgaggttctgaatgccctaaaattggtgcttggacttctccggaagttcctagttgatcatggtgtgcttcatcttttcgaaaggaagaacccagaagtagctcaaccacagagtcgtggtaacccaaaaggcagtagattcttgtatggacatgatccatcttttcatgccccgtactctcgagatctcagccaaccagctgattcgttaataacaaagattacacggacaatgcaaatcccgctggcagatgttggagagataattggcgtaaggggagaaaacgttgaactcattcgttctgttagtggagcagttgtcgttcttgagaaaatcggaaacggtcaagaggttcgagtcatgattgaaggcactccttcacaagttcaaactgcacatcaacttgtacaggaggctctttcaggtgacagagggctaccgtccgggagcagttactacagcgctgaggggggcgacggtgacccaagtctggtaaagcccccacatgctggcccaaggtttctgcaccccatctcagcaatcgaagcaagttgggactacctgccatggcagtaccaagaacaaacgccccgtgacgaccatcggggataccctactctctctgattacagaggctacttgccataggaagcgcactcagctgccaaggtaccttttgcagccaccgttacaagatcgtgtggacgattgatgtggaatggcaacatgtagtagctgccgtcccgtaccttctctatctaggactaggagccgagtaatggctgccattcatagaggggacgacgtggatcgcttgtatgaaaaagattgaacaaactagcaactgcactagattgtttcgtgagctgtcctctgtcttaccacgtgctcaccaaaagctgagcctcaagttccttgtcc

SEQ ID NO: 49324 - DNA, 1758 bp, Zea Mays
agttcggcccggctctcaaccagccggaaaaccccacagaagcgtttccttcgctcgcttcccttcgctccgccgcgtcctcgaaagtcgaaacccccacccgtcatggagccacccgcgtggtcgccgccgcgtgaggaggaggaggaggaggagaccgagatcgacttcgacgaggaggaggacccggaggaggtggagccgtggttcacgtcctccggctcggagccggagctagaaccagagccagagccgaagcacccggcgccgaccccatcccccgcccccgcttgggctgagccggagcagcagccggctccggtcacggcggtggaggcgacgaagaagggcgagggggaggatgcgaggccgcggtggcccgggtggcctggcgcgagcgtgttccgcctggtggtgcccgcggacaaggtcggcggaatcatcgggcgccgcggcgacaccatcaagcgcctctgcgacgagacccgcgcccgcgtccgcgtcctcgacgccccgcacggggacggggccttcagccggattgttttagtgtctgcaagagaagaagttgaagcagagttgtcacctgcaatgaatgctgcaattaagatcttcaagcatataaacgagatagaagatatcaattctgatggaactttaatggctcctgcaccagaaatttcttctgttagattattagttccttttgcacaagctctccatgtaattggcaagcaaggagtcacaattaagtcaattcaggaaagtacaggtagtaccgtaaggatcatggatgaagatgagctattgagtcatgagacaatgggtgaaagaattgtggagataaatggtgcttcgctcgaggttctgaatgccctaaaattggtgcttggacttctccggaagttcctagttgatcatggtgtgcttcatcttttcgaaaggaagagtcgtggtaacccaaaaggcagtagattcttgtatggacatgatccatcttttcatgccccgtactctcgagatctcagccaaccagctgattcgttaataacaaagattacacggacaatgcaaatcccgctggcagatgttggagagataattggcgtaaggggagaaaacgttgaactcattcgttctgttagtggagcagttgtcgttcttgagaaaatcggaaacggtcaagaggttcgagtcatgattgaaggcactccttcacaagttcaaactgcacatcaacttgtacaggaggctctttcaggtgacagagggctaccgtccgggagcagttactacagcgctgaggggggcgacggtgacccaagtctggtaaagcccccacatgctggcccaaggtttctgcaccccatctcagcaatcgaagcaagttgggactacctgccatggcagtaccaagaacaaacgccccgtgacgaccatcggggataccctactctctctgattacagaggctacttgccataggaagcgcactcagctgccaaggtaccttttgcagccaccgttacaagatcgtgtggacgattgatgtggaatggcaacatgtagtagctgccgtcccgtaccttctctatctaggactaggagccgagtaatggctgccattcatagaggggacgacgtggatcgcttgtatgaaaaagattgaacaaactagcaactgcactagattgtttcgtgagctgtcctctgtcttaccacgtgctcaccaaaagctgagcctcaagttccttgtcc

SEQ ID NO: 49325 - DNA, 3653 bp, Zea Mays
cgagtactccacaccacaccagtccagctgtccgcccccgccacttcgagttcggttggaggcttggaggcttgggcaaaaccctcctcgtcgtcgcgcgctccgcctgcaccacccgccgccgaagagctctctttcaaaaactagcaaagatggtacaatgtactcaacctcctccccagttaaagctcccagagagtaagatcacagaaccgacagatgatgagaaccaagatttgccaccaaaacctgagaaaaggactaggatgcaccacattgagaggcacagatcttgtgttgtgaccttatctgacatagaacttaatggtctgcaacctcgtcatctgcaccaacccattgagatcagcccaggaggatcacagtgttcgctccatgaagaaacacctacagatactaatgcatcacacaggcatgcaattgcagatgctgcttgggaagccctcaaaaggtcaatggtttacttcagaggccaaccaattggaactgttgccgcaatagacaagtctcagggggcagcactgaactatgaccaggttttcatgagggatttcattcctagcgcattggcttttcttatgaaaggagagcacttgattgtgaagaactttctggtagaaactgcacgccttcagtcaagggagaagatggttgaccttttcaagcttggtcagggtgtgatgcctgcaagctttaaggtgcatcatcgcaaccctactcagaagacagaaagcttactggctgattttggtgaaactgccattgggagggttgctcctgtagattctggcttatggtggattattctccttcgtgcttacaccaaatggacaggggacaattctctggctgaaagtactaactgccaaagggccatgcaccttattctcaggttgtgtctctcagaggggtgtgatacttctccagccttgctttgtgctgatggatgctccatgatagaccgaagaatgggcatatatggctacccaattgaaatccaggctctctttttcatggctatgagatgcgccctgagtctgttgaaacaagagtccgatgctgacttcgtgaaccacatcacaaaaagaatccaagctctgagctaccacttgcacagttactactggttggacttccagagacttaatgacatataccgctacaagaccgaagagtactcacagacagctctgaacaagttcaacgtgatgcccgaatcgatacctgactggatatttgacttcatgcctagccgtggtgggtacttcattggcaacgttagtcccgcgaggatggatttccgctggttctgcctaggcaacttcatcgcgattctgtcgtcgttggctaccggagagcaggctgaagcgatactggatcttgtggaggagcgctggcaagaactcatcggtgagatgccgctcaagatctgttaccctgcgatggaaaatcaggaatggcagatagtcactggatgcgacccgaagaacaccaggtggagctatcacaacggaggctcgtggccagtgctgctgtggctgctggtggcggtgagcgtgaagctggggcggccgcacctggcgcggagagccgtggagctgatggagcagcggctggccaaggacgacttccccgagtactacgacggcaaggccgggcggtacgtggggaagcaggcgcgcaagttccagacgtggtccgtggccggctacctggtggccaagatgctcctggacgacccctctcacctgcgaatcgtggcgctggagggcgacagccactccagggcccccttcctcaagcgctccaactcgtgcccatgacccccaggccccagcacagcacaggccgcatgcattacctttccacgcaccagtttgcccacaccgagactacgagagtaaaaagtttcgtttcgatgcagtgcattcttcttactacataagtatgtataatcaagcggtagtagtgtgatgtgctaccaagaggaggatgacagggacaggataccgagtatgtatgtactgtctccatttgccagatcagatgccactaaactggttaacattttggaatgtcaggggctcacggctagcaatgcgtctggtagctgaggaaatgtaaaaactccatgtgctgatatactgtttcttagacctgacggcatgcggtcctggtgctgataaaaagctattgatattcaccatcttcatgttagcttctgtagctgctggagaagtacacgctggacaggaccggccctgccgccctggtggctacttctccagctggaccccggcctggccctgctggccacacgctatcggctatcctctcccctctatccttttcttcactccccccacacactgtcactgccagcctccccttcgcttcgcttagctcgccgtcaccatggcgacctccaccttctctccgcgccccgccaccctcaagcccctgcgggcacgcgccaagcccgccggcctccagctccacctcctccccttcccgcgcctccgcgtcgcctgcgccaccgccgccggggaggcgccgcccgttgagcagcgggacgaggtggagccggcctctgccgcggcatccaacgggactgccgttaaggtcgaggcgtccgccgcgaagcccgagtccccgcccgcgcccgcgccggtcccggccttccgcgacgccaggtgggtcaacggcacctgggacctcaccaagttcgacaagggcggcggcgtcgactgggacgccgtcatcgacgccgaggccaggagaaggaaatggctcgaagactacccggaggcgacgagcacagacgatgccgtcgtcttcgacacctccattatcccgtggtgggcatggatgaagcggttccaccttcctgaagccgagaagctaaacggtcgggccgccatggttggcttcttcatggcctacttcgtggacagcttgacgggcgtgggcctcgtcgaccagatgggcaacttcttctgcaagacgctgctgttcgtcgccgtcgccggcgtgctgctggtcaggaagaacgaggacgtggagtcgctcaagaagctcatcgacgagactacgttctacgacaggcagtggcaggctacctggcaagatgacccaaccgaggggccaaagaattagttcggcgttgggggtgcaaacgcagaatgctcgcttcttgtggtgtgtctttgcctctttcttcggcccctttttgtttcaccgtttagtcaggcttggaggaactttttgatgaacgtcataatctatctacgtgatcttgtgcaaaaacaaaaggtatgggagtactttctgtgctagagataataatcatgttgcagtttcactggtttatgctttctgtcaacacgcgtcaaggtgctcgtcgaagaagactttgagcaaatcgcaaataatttgatgtcagacatggaattcgctcacatatcgatcaaataaatgccatgtcaaggtactcgtcgaagaagattagtctgaaaccaacctgtgagacacaaagcgaaaaggcatgcctgttgatggttaacttttcacgtactactacttgctttgatctggcatggaattcaagtcaggcatgacacgactgaataaattac

SEQ ID NO: 49326 - DNA, 2386 bp, Zea Mays
cagctgtccgcccccgccacttcgagttcggttggaggcttggaggcttgggcaaaaccctcctcgtcgtcgcgcgctccgcctgcaccacccgccgccgaagagctctctttcaaaaactagcaaagatggtacaatgtactcaacctcctccccagttaaagctcccagagagtaagatcacagaaccgacagatgatgagaaccaagatttgccaccaaaacctgagaaaaggactaggatgcaccacattgagaggcacagatcttgtgttgtgaccttatctgacatagaacttaatggtctgcaacctcgtcatctgcaccaacccattgagatcagcccaggaggatcacagtgttcgctccatgaagaaacacctacagatactaatgcatcacacaggcatgcaattgcagatgctgcttgggaagccctcaaaaggtcaatggtttacttcagaggccaaccaattggaactgttgccgcaatagacaagtctcagggggcagcactgaactatgaccaggttttcatgagggatttcattcctagcgcattggcttttcttatgaaaggagagcacttgattgtgaagaactttctggtagaaactgcacgccttcagtcaagggagaagatggttgaccttttcaagcttggtcagggtgtgatgcctgcaagctttaaggtgcatcatcgcaaccctactcagaagacagaaagcttactggctgattttggtgaaactgccattgggagggttgctcctgtagattctggcttatggtggattattctccttcgtgcttacaccaaatggacaggggacaattctctggctgaaagtactaactgccaaagggccatgcaccttattctcaggttgtgtctctcagaggggtgtgatacttctccagccttgctttgtgctgatggatgctccatgatagaccgaagaatgggcatatatggctacccaattgaaatccaggctctctttttcatggctatgagatgcgccctgagtctgttgaaacaagagtccgatgctgacttcgtgaaccacatcacaaaaagaatccaagctctgagctaccacttgcacagttactactggttggacttccagagacttaatgacatataccgctacaagaccgaagagtactcacagacagctctgaacaagttcaacgtgatgcccgaatcgatacctgactggatatttgacttcatgcctagccgtggtgggtacttcattggcaacgttagtcccgcgaggatggatttccgctggttctgcctaggcaacttcatcgcgattctgtcgtcgttggctaccggagagcaggctgaagcgatactggatcttgtggaggagcgctggcaagaactcatcggtgagatgccgctcaagatctgttaccctgcgatggaaaatcaggaatggcagatagtcactggatgcgacccgaagaacaccaggtggagctatcacaacggaggctcgtggccagaggccaggagaaggaaatggctcgaagactacccggaggcgacgagcacagacgatgccgtcgtcttcgacacctccattatcccgtggtgggcatggatgaagcggttccaccttcctgaagccgagaagctaaacggtcgggccgccatggttggcttcttcatggcctacttcgtggacagcttgacgggcgtgggcctcgtcgaccagatgggcaacttcttctgcaagacgctgctgttcgtcgccgtcgccggcgtgctgctggtcaggaagaacgaggacgtggagtcgctcaagaagctcatcgacgagactacgttctacgacaggcagtggcaggctacctggcaagatgacccaaccgaggggccaaagaattagttcggcgttgggggtgcaaacgcagaatgctcgcttcttgtggtgtgtctttgcctctttcttcggcccctttttgtttcaccgtttagtcaggcttggaggaactttttgatgaacgtcataatctatctacgtgatcttgtgcaaaaacaaaaggtatgggagtactttctgtgctagagataataatcatgttgcagtttcactggtttatgctttctgtcaacacgcgtcaaggtgctcgtcgaagaagactttgagcaaatcgcaaataatttgatgtcagacatggaattcgctcacatatcgatcaaataaatgccatgtcaaggtactcgtcgaagaagattagtctgaaaccaacctgtgagacacaaagcgaaaaggcatgcctgttgatggttaacttttcacgtactactacttgctttgatctggcatggaattcaagtcaggcatgacacgactgaataaattac

SEQ ID NO: 49327 - DNA, 4107 bp, Zea Mays
cagctgtccgcccccgccacttcgagttcggttggaggcttggaggcttgggcaaaaccctcctcgtcgtcgcgcgctccgcctgcaccacccgccgccgaagagctctctttcaaaaactagcaaagatggtacaatgtactcaacctcctccccagttaaagctcccagagagtaagatcacagaaccgacagatgatgagaaccaagatttgccaccaaaacctgagaaaaggactaggatgcaccacattgagaggcacagatcttgtgttgtgaccttatctgacatagaacttaatggtctgcaacctcgtcatctgcaccaacccattgagatcagcccaggaggatcacagtgttcgctccatgaagaaacacctacagatactaatgcatcacacaggcatgcaattgcagatgctgcttgggaagccctcaaaaggtcaatggtttacttcagaggccaaccaattggaactgttgccgcaatagacaagtctcagggggcagcactgaactatgaccaggttttcatgagggatttcattcctagcgcattggcttttcttatgaaaggagagcacttgattgtgaagaactttctggtagaaactgcacgccttcagtcaagggagaagatggttgaccttttcaagcttggtcagggtgtgatgcctgcaagctttaaggtgcatcatcgcaaccctactcagaagacagaaagcttactggctgattttggtgaaactgccattgggagggttgctcctgtagattctggcttatggtggattattctccttcgtgcttacaccaaatggacaggggacaattctctggctgaaagtactaactgccaaagggccatgcaccttattctcaggttgtgtctctcagaggggtgtgatacttctccagccttgctttgtgctgatggatgctccatgatagaccgaagaatgggcatatatggctacccaattgaaatccaggctctctttttcatggctatgagatgcgccctgagtctgttgaaacaagagtccgatgctgacttcgtgaaccacatcacaaaaagaatccaagctctgagctaccacttgcacagttactactggttggacttccagagacttaatgacatataccgctacaagaccgaagagtactcacagacagctctgaacaagttcaacgtgatgcccgaatcgatacctgactggatatttgacttcatgcctagccgtggtgggtacttcattggcaacgttagtcccgcgaggatggatttccgctggttctgcctaggcaacttcatcgcgattctgtcgtcgttggctaccggagagcaggctgaagcgatactggatcttgtggaggagcgctggcaagaactcatcggtgagatgccgctcaagatctgttaccctgcgatggaaaatcaggaatggcagatagtcactggatgcgacccgaagaacaccaggtggagctatcacaacggaggctcgtggccagtgctgctgtggctgctggtggcggtgagcgtgaagctggggcggccgcacctggcgcggagagccgtggagctgatggagcagcggctggccaaggacgacttccccgagtactacgacggcaaggccgggcggtacgtggggaagcaggcgcgcaagttccagacgtggtccgtggccggctacctggtggccaagatgctcctggacgacccctctcacctgcgaatcgtggcgctggagggcgacagccactccagggcccccttcctcaagcgctccaactcgtgcccatgacccccaggccccagcacagcacaggccgcatgcattacctttccacgcaccagtttgcccacaccgagactacgagagtaaaaagtttcgtttcgatgcagtgcattcttcttactacataagtatgtataatcaagcggtagtagtgtgatgtgctaccaagaggaggatgacagggacaggataccgagtatgtatgtactgtctccatttgccagatcagatgccactaaactggttaacattttggaatgtcaggggctcacggctagcaatgcgtctggtagctgaggaaatgtaaaaactccatgtgctgatatactgtttcttagacctgacggcatgcggtcctggtgctgataaaaagctattgatattcaccatcttcatgttagcttctgtagctgctggagaagtacacgctggacaggaccggccctgccgccctggtggctacttctccagctggaccccggcctggccctgctggccacacgctatcggctatcctctcccctctatccttttcttcactccccccacacactgtcactgccagcctccccttcgcttcgcttagctcgccgtcaccatggcgacctccaccttctctccgcgccccgccaccctcaagcccctgcgggcacgcgccaagcccgccggcctccagctccacctcctccccttcccgcgcctccgcgtcgcctgcgccaccgccgccggggaggcgccgcccgttgagcagcgggacgaggtggagccggcctctgccgcggcatccaacgggactgccgttaaggtcgaggcgtccgccgcgaagcccgagtccccgcccgcgcccgcgccggtcccggccttccgcgacgccaggtgggtcaacggcacctgggacctcaccaagttcgacaagggcggcggcgtcgactgggacgccgtcatcgacgccggtgagggctcctccttcctagtatctctatcctatgtggaaccaggattggattcacatgctggagcgggaattgctgcctgtctgtcatagtgccatcgccatgctaatatgctatcctagattggtggatggctgcggcgtgcgccaccaacctgattttttctgtggttgtagagctttgaaaagtctggtggttcaagatgaatttccagtttaggattaggagaaattaagaaggaatttgacttgctatagatttaaacccacccacccgatcccccgagatgttagctggctggttgggactggggagacgaatacaagagggaagatgagtgaactggctagaaaaacagagtcctgcatgtacaggacacgcaacgcatgtgtaaactcagacatttgttgctttgctacgatgagtgacagatagacaggcaactgatgccaatagctccatctttgtttgattccagaggccaggagaaggaaatggctcgaagactacccggaggcgacgagcacagacgatgccgtcgtcttcgacacctccattatcccgtggtgggcatggatgaagcggttccaccttcctgaagccgagaagctaaacggtcgggccgccatggttggcttcttcatggcctacttcgtggacagcttgacgggcgtgggcctcgtcgaccagatgggcaacttcttctgcaagacgctgctgttcgtcgccgtcgccggcgtgctgctggtcaggaagaacgaggacgtggagtcgctcaagaagctcatcgacgagactacgttctacgacaggcagtggcaggctacctggcaagatgacccaaccgaggggccaaagaattagttcggcgttgggggtgcaaacgcagaatgctcgcttcttgtggtgtgtctttgcctctttcttcggcccctttttgtttcaccgtttagtcaggcttggaggaactttttgatgaacgtcataatctatctacgtgatcttgtgcaaaaacaaaaggtatgggagtactttctgtgctagagataataatcatgttgcagtttcactggtttatgctttctgtcaacacgcgtcaaggtgctcgtcgaagaagactttgagcaaatcgcaaataatttgatgtcagacatggaattcgctcacatatcgatcaaataaatgccatgtcaaggtactcgtcgaagaagattagtctgaaaccaacctgtgagacacaaagcgaaaaggcatgcctgttgatggttaacttttcacgtactactacttgctttgatctggcatggaattcaagtcaggcatgacacgactgaataaattac

SEQ ID NO: 49328 - DNA, 2514 bp, Zea Mays
gtccgcccccgccacttcgagttcggttggaggcttggaggcttgggcaaaaccctcctcgtcgtcgcgcgctccgcctgcaccacccgccgccgaagagctctctttcaaaaactagcaaagatggtacaatgtactcaacctcctccccagttaaagctcccagagagtaagatcacagaaccgacagatgatgagaaccaagatttgccaccaaaacctgagaaaaggactaggatgcaccacattgagaggcacagatcttgtgttgtgaccttatctgacatagaacttaatggtctgcaacctcgtcatctgcaccaacccattgagatcagcccaggaggatcacagtgttcgctccatgaagaaacacctacagatactaatgcatcacacaggcatgcaattgcagatgctgcttgggaagccctcaaaaggtcaatggtttacttcagaggccaaccaattggaactgttgccgcaatagacaagtctcagggggcagcactgaactatgaccaggttttcatgagggatttcattcctagcgcattggcttttcttatgaaaggagagcacttgattgtgaagaactttctggtagaaactgcacgccttcagtcaagggagaagatggttgaccttttcaagcttggtcagggtgtgatgcctgcaagctttaaggtgcatcatcgcaaccctactcagaagacagaaagcttactggctgattttggtgaaactgccattgggagggttgctcctgtagattctggcttatggtggattattctccttcgtgcttacaccaaatggacaggggacaattctctggctgaaagtactaactgccaaagggccatgcaccttattctcaggttgtgtctctcagaggggtgtgatacttctccagccttgctttgtgctgatggatgctccatgatagaccgaagaatgggcatatatggctacccaattgaaatccaggctctctttttcatggctatgagatgcgccctgagtctgttgaaacaagagtccgatgctgacttcgtgaaccacatcacaaaaagaatccaagctctgagctaccacttgcacagttactactggttggacttccagagacttaatgacatataccgctacaagaccgaagagtactcacagacagctctgaacaagttcaacgtgatgcccgaatcgatacctgactggatatttgacttcatgcctagccgtggtgggtacttcattggcaacgttagtcccgcgaggatggatttccgctggttctgcctaggcaacttcatcgcgattctgtcgtcgttggctaccggagagcaggctgaagcgatactggatcttgtggaggagcgctggcaagaactcatcggtgagatgccgctcaagatctgttaccctgcgatggaaaatcaggaatggcagatagtcactggatgcgacccgaagaacaccaggtggagctatcacaacggaggctcgtggccagtgctgctgtggctgctggtggcggtgagcgtgaagctggggcggccgcacctggcgcggagagccgtggagctgatggagcagcggctggccaaggacgacttccccgagtactacgacggcaaggccgggcgaggccaggagaaggaaatggctcgaagactacccggaggcgacgagcacagacgatgccgtcgtcttcgacacctccattatcccgtggtgggcatggatgaagcggttccaccttcctgaagccgagaagctaaacggtcgggccgccatggttggcttcttcatggcctacttcgtggacagcttgacgggcgtgggcctcgtcgaccagatgggcaacttcttctgcaagacgctgctgttcgtcgccgtcgccggcgtgctgctggtcaggaagaacgaggacgtggagtcgctcaagaagctcatcgacgagactacgttctacgacaggcagtggcaggctacctggcaagatgacccaaccgaggggccaaagaattagttcggcgttgggggtgcaaacgcagaatgctcgcttcttgtggtgtgtctttgcctctttcttcggcccctttttgtttcaccgtttagtcaggcttggaggaactttttgatgaacgtcataatctatctacgtgatcttgtgcaaaaacaaaaggtatgggagtactttctgtgctagagataataatcatgttgcagtttcactggtttatgctttctgtcaacacgcgtcaaggtgctcgtcgaagaagactttgagcaaatcgcaaataatttgatgtcagacatggaattcgctcacatatcgatcaaataaatgccatgtcaaggtactcgtcgaagaagattagtctgaaaccaacctgtgagacacaaagcgaaaaggcatgcctgttgatggttaacttttcacgtactactacttgctttgatctggcatggaattcaagtcaggcatgacacgactgaataaattac

SEQ ID NO: 49329 - DNA, 1811 bp, Zea Mays
cttcgagttcggttggaggcttggaggcttgggcaaaaccctcctcgtcgtcgcgcgctccgcctgcaccacccgccgccgaagagctctctttcaaaaactagcaaagatggtacaatgtactcaacctcctccccagttaaagctcccagagagtaagatcacagaaccgacagatgatgagaaccaagatttgccaccaaaacctgagaaaaggactaggatgcaccacattgagaggcacagatcttgtgttgtgaccttatctgacatagaacttaatggtctgcaacctcgtcatctgcaccaacccattgagatcagcccaggaggatcacagtgttcgctccatgaagaaacacctacagatactaatgcatcacacaggcatgcaattgcagatgctgcttgggaagccctcaaaaggtcaatggtttacttcagaggccaaccaattggaactgttgccgcaatagacaagtctcagggggcagcactgaactatgaccaggttttcatgagggatttcattcctagcgcattggcttttcttatgaaaggagagcacttgattgtgaagaactttctggtagaaactgcacgccttcagtcaagggagaagatggttgaccttttcaagcttggtcagggtgtgatgcctgcaagctttaaggtgcatcatcgcaaccctactcagaagacagaaagcttactggctgattttggtgaaactgccattgggagggttgctcctgtagattctggcttatggtggattattctccttcgtgcttacaccaaatggacaggggacaattctctggctgaaagtactaactgccaaagggccatgcaccttattctcaggttgtgtctctcagaggggtgtgatacttctccagccttgctttgtgctgatggatgctccatgatagaccgaagaatgaggccaggagaaggaaatggctcgaagactacccggaggcgacgagcacagacgatgccgtcgtcttcgacacctccattatcccgtggtgggcatggatgaagcggttccaccttcctgaagccgagaagctaaacggtcgggccgccatggttggcttcttcatggcctacttcgtggacagcttgacgggcgtgggcctcgtcgaccagatgggcaacttcttctgcaagacgctgctgttcgtcgccgtcgccggcgtgctgctggtcaggaagaacgaggacgtggagtcgctcaagaagctcatcgacgagactacgttctacgacaggcagtggcaggctacctggcaagatgacccaaccgaggggccaaagaattagttcggcgttgggggtgcaaacgcagaatgctcgcttcttgtggtgtgtctttgcctctttcttcggcccctttttgtttcaccgtttagtcaggcttggaggaactttttgatgaacgtcataatctatctacgtgatcttgtgcaaaaacaaaaggtatgggagtactttctgtgctagagataataatcatgttgcagtttcactggtttatgctttctgtcaacacgcgtcaaggtgctcgtcgaagaagactttgagcaaatcgcaaataatttgatgtcagacatggaattcgctcacatatcgatcaaataaatgccatgtcaaggtactcgtcgaagaagattagtctgaaaccaacctgtgagacacaaagcgaaaaggcatgcctgttgatggttaacttttcacgtactactacttgctttgatctggcatggaattcaagtcaggcatgacacgactgaataaattac

SEQ ID NO: 49330 - DNA, 2993 bp, Zea Mays
gttcggttggaggcttggaggcttgggcaaaaccctcctcgtcgtcgcgcgctccgcctgcaccacccgccgccgaagagctctctttcaaaaactagcaaagatggtacaatgtactcaacctcctccccagttaaagctcccagagagtaagatcacagaaccgacagatgatgagaaccaagatttgccaccaaaacctgagaaaaggactaggatgcaccacattgagaggcacagatcttgtgttgtgaccttatctgacatagaacttaatggtctgcaacctcgtcatctgcaccaacccattgagatcagcccaggaggatcacagtgttcgctccatgaagaaacacctacagatactaatgcatcacacaggcatgcaattgcagatgctgcttgggaagccctcaaaaggtcaatggtttacttcagaggccaaccaattggaactgttgccgcaatagacaagtctcagggggcagcactgaactatgaccaggttttcatgagggatttcattcctagcgcattggcttttcttatgaaaggagagcacttgattgtgaagaactttctggtagaaactgcacgccttcagtcaagggagaagatggttgaccttttcaagcttggtcagggtgtgatgcctgcaagctttaaggtgcatcatcgcaaccctactcagaagacagaaagcttactggctgattttggtgaaactgccattgggagggttgctcctgtagattctggcttatggtggattattctccttcgtgcttacaccaaatggacaggggacaattctctggctgaaagtactaactgccaaagggccatgcaccttattctcaggttgtgtctctcagaggggtgtgatacttctccagccttgctttgtgctgatggatgctccatgatagaccgaagaatgggcatatatggctacccaattgaaatccaggctctctttttcatggctatgagatgcgccctgagtctgttgaaacaagagtccgatgctgacttcgtgaaccacatcacaaaaagaatccaagctctgagctaccacttgcacagttactactggttggacttccagagacttaatgacatataccgctacaagaccgaagagtactcacagacagctctgaacaagttcaacgtgatgcccgaatcgatacctgactggatatttgacttcatgcctagccgtggtgggtacttcattggcaacgttagtcccgcgaggatggatttccgctggttctgcctaggcaacttcatcgcgattctgtcgtcgttggctaccggagagcaggctgaagcgatactggatcttgtggaggagcgctggcaagaactcatcggtgagatgccgctcaagatctgttaccctgcgatggaaaatcaggaatggcagatagtcactggatgcgacccgaagaacaccaggtggagctatcacaacggaggctcgtggccagtgctgctgtggctgctggtggcggtgagcgtgaagctggggcggccgcacctggcgcggagagccgtggagctgatggagcagcggctggccaaggacgacttccccgagtactacgacggcaaggccgggcggtacgtggggaagcaggcgcgcaagttccagacgtggtccgtggccggctacctggtggccaagatgctcctggacgacccctctcacctgcgaatcgtggcgctggagggcgacagccactccagggcccccttcctcaagcgctccaactcgtgcccatgacccccaggccccagcacagcacaggccgcatgcattacctttccacgcaccagtttgcccacaccgagactacgagagtaaaaagtttcgtttcgatgcagtgcattcttcttactacataagtatgtataatcaagcggtagtagtgtgatgtgctaccaagaggaggatgacagggacaggataccgagtataggccaggagaaggaaatggctcgaagactacccggaggcgacgagcacagacgatgccgtcgtcttcgacacctccattatcccgtggtgggcatggatgaagcggttccaccttcctgaagccgagaagctaaacggttctctcaccaagcgcctctctccttttgtcctgtcattttaagctaactgctgcatatgacgggttgctttgaacagcggttggatacgatgtgttcggttccacttcaaaccctagttcttctcgtctgatgcgtgcaggtcgggccgccatggttggcttcttcatggcctacttcgtggacagcttgacgggcgtgggcctcgtcgaccagatgggcaacttcttctgcaagacgctgctgttcgtcgccgtcgccggcgtgctgctggtcaggaagaacgaggacgtggagtcgctcaagaagctcatcgacgagactacgttctacgacaggcagtggcaggctacctggcaagatgacccaaccgaggggccaaagaattagttcggcgttgggggtgcaaacgcagaatgctcgcttcttgtggtgtgtctttgcctctttcttcggcccctttttgtttcaccgtttagtcaggcttggaggaactttttgatgaacgtcataatctatctacgtgatcttgtgcaaaaacaaaaggtatgggagtactttctgtgctagagataataatcatgttgcagtttcactggtttatgctttctgtcaacacgcgtcaaggtgctcgtcgaagaagactttgagcaaatcgcaaataatttgatgtcagacatggaattcgctcacatatcgatcaaataaatgccatgtcaaggtactcgtcgaagaagattagtctgaaaccaacctgtgagacacaaagcgaaaaggcatgcctgttgatggttaacttttcacgtactactacttgctttgatctggcatggaattcaagtcaggcatgacacgactgaataaattac

SEQ ID NO: 49331 - DNA, 3593 bp, Zea Mays
tcaactccgtagggataccctggctgtgcctggtgcctgcccgccgccgccgtcctgcccacccgcccacctgcacgcacccagatgccacctgccgctgccggccgccactgctgccggcggccacgtccgcggcgctgaccaccgcccgcctcgccatgccccgcatcctcctcgcccagttctcccgccgccggctccacgctcacctctcgcgtcccctcgccattctctcgaacgccttctcggcgtccgccgcctcgtctcggccgcgcccgccgccgctcccgccactctctccgctgctcccagcgcgccccgaggacgcgcgcctcgtagccgcgtcctcgtccgccatcgccgccgccttccacgactggttccacgagtcccgcaactccgcttctgcgccgacaccgcccaaggcgctcgacgcgatctacgaggcgctcgcgtccgatgagacggccccgctagaggcgctcccgctctcggagacgctcgtcctcgccgtgctccgccaccatccgagggggttccacaacgacgccgccctgctgctgctccgcctcaagttcttcgactggtcgggccgtcaccggcgctaccaccacacgcgggccgtctaccacaccgtcttccgcctccttagatgcgcgcgccgcaatgccgtccttctcgattggctccaccgcttcttcgacacctccgcgagaggcggccacctgcgtttccacgacacgctcatcatcggctatgccatcgcgggcgacccgcagcgcgggctcaacatcttcggccgcatgcgcttccacggcctcgaccccgaccccgtctcttcacgtatcctcctcaactccctggtcgatgcgtcgatgcacgatcttgccgagtccttcgcccacaaccttgcccccagccccgtcgctacaagcatatgcatcaagagcctctgtcgtcgcgcccgcctcgacgatgccgttgctctcctcgacaccatgccgtttgctgatgcatcccgtggcccggcggctggctgcatcctcaccgagttctgccgccgtggacgttttgcggaggcaagcgagctcgttagtaagtttccatccagtgatgtgtatggtgcgtggatcaatggactctttggtgctggcgagcttgatgctacgatgaagttcctctctgataagaaggaaagtgaaggctacatccttgatgggcggcggtgtgacagccttatttatcgcttgcttgtcaggaacagacttggcgaagtgtatgacttgcttgttcaaatgatggaggagggcattgctcctggcatacgcaccatgaatgctgcgctttgcttcttttgcaaggctggtcttgttgaagtagccatggatttgtataggtcgagagtggagctcgggatcaacccaaacaaagatgtctaccataatctgatcaaggcactgtgccatggtggggagacagaggaagcatgcctggtatttgaggaaactatggaaggagggtacttcccggggcgtcggacatttaccatgctttcaaacgtgctgtgtcaggaggggaagctggacagggtgcgggagctgctaaatagggcagtcaagcaggaagcctgggcagttgactctgttttggccaagtacctcgcggcactatgcaagagtgggaacatggaggcggcatgcgaactgcctcatgtagcaagcagcaagagccatgtgggcttatatcgctatgagtcaacatacaagaacctgattcgagcattggtattgactaagagggtggacgcgctgccaaggcttatactgcaaatgcaagaaatggggcacatcccaagccggagcctctatgtgtcagttgtctgttctttgtgtgaaatgaataggtatgccgaggttcttgatctgttagacaaccagttaatgcggaatgagatccatcccgttgtgtgctacaaccacttcatttctggtgctggtcatgctaagagggcagacatggccaaggcgatatatgaccgaatggaggcttcagggattgaaccatcaataacaagcaacgtgcttcttctcattagttatgtaaggagcaaaaatctcgggggtgcacttaatttttttaacctcgttcgtcggaagaaaacaccttgtgccaggttatataatgtatttatatctggcctatgtgaagttaggaagcctgagcaggcaatgatgttctttagggaagcaagggataatggtataatcccaagcatgtactgctacgagaatcttcttctcttgctgtgctctgttagcgattataccaatgctgtaaaggttgttgatgatttcagagaaacgggtcgccctgtttcagctttcttgactaatgttcttctgttgcacacattgatgggccacaagcttctgcaggcttttttacgttcaagagataaatcaaagcctctagaactgaaaggtgaagatatccaaggtcggaaggcaggaaggctcttgattggtgatctagttgcctcgtttgcaagtggtatcagaaacatgagtgacttagagcatttgggagaggagatggaaaagtattttcctgttgatatttacacttataacatgctgttacgagggttctctatggcaggaaggatggactctgcctgtaggttgtatgaaaggatatgcaggcaagggtatcaaccaaatcgatggacttttgatacaattgtgcatgggttctgcaagaatggtgacataattgaagctcagaggtggatggatgcattgtatcgaagtggtttctatcccacttggtacactatgagggtatacaacaatttgttgttgcgagcacaagacaagaagatcatttctttgtatgagtaacgatatctatttcatattcgactggtggtctgctctctgccttgatcctattatgcagctgacacaggcattctcttggaagatcaaatatactcttcgtagacatgtactccaagatttaacacttctttttaaggaagcgcatctcatctatcatcacctgatgtctgggatgcttctgggatatcagtttacgtgtagcatggagttctcctttgactttgatgtatctatcagtggtactcaatttttgcgaaaaggtcctctaatgtaatggttaagacttccgagcagcacttataggtctcgggttcgatccctcttgagaacgaatttcgggcttagctaaaaaaaatctcctctatatgtcccatccgctctcggagatcgatatcaaacgcgtcaccctccagctgggccgttgtagagtgggcaattgatcagcccgttagtgatggagggcagagtttgagggttttctcggtcgggatcatgtactgggagaacggtctttccctcctctgccgagtttttttagttctcatttttgctgtagaattatacattgtgcctgaagtttcaaggttcctggcattcaatattttgcgagtgtttattcatatggagtactagattatagtaagaatggtcaagcactgtaatagagtcaattgtccgatgcgtatagcagaa

SEQ ID NO: 49332 - DNA, 3059 bp, Zea Mays
gtcaatatccaagctggagtatggctcatgaccaacctggcagattttgggatttgtataagattgctcaagagaataaaaaaagttatttgaggaatagtatcatgaggaaccgattgcaaccaccggatccggtatgcagaagagtagcgtatttcatcgagatagaaagtcagaacttaccgagcaatcatcgtgaacgcgccagattgtttcccccaagaggttagcaaccgaaagaatagtcagctgcggaaaactcttctcctccttcagagggatggtgtttgtgatgattacttcttggaacaatccacttgatagcctttcgatggcgggtgggctggaaagcaagcatatacttctcgggcgccttcctggtgcagtagctcagctcctttggaaatggtacctgtttgggtttgatggtcccatgaggataatgatatcccaaagcgaagtatcttctcaggtaactagtttagcatgcaatgtcatgtacagttttcttgagcagtgatgcgggaatgtggagcgattcatcaggatttaaagttcaaattatagctcagattgcatttccaaccagtgataaacaatactagtacgtaatataatattcaggccattcggtaggttgttctatgacagatggcacagctaatccttgactagctactgcatggcagttagcatcaaggtcctcaatgctgctgagttgttaatgaggcaccataaactcatggccattatgagggggaaaatatccaatctaagaattgttttctaggggacaacgtacctgctgtgtcgatcatatcatccatcataacagccacttttcctctcacgtctccaataagattcatcacctgtaataaatgcacatgacaagatgaacatgcagcctgaaaattaagataaacatgtattcagcatagctgcagatggtttgtattcagctaaagctgtgtataaggggcttttttcaggatcaacctcctttggtcactacaaaagggtgtggaaaacttgggctcctccaaagtgtaaatttttcctttgtcttgcagctcataacaggtgttggactgtggacaggctagctaaaagaggaatttatcatccctctaaatgccctctgtgtgatcaggaagctgaaaccttggatcatctgttagtggcttgtgttttcaagggatttctggttcaagctcctgaatcaagttggtctgcaaatggttgcacctcaacctgattcgccttccttcatgagttggtgggaagaagtttctgggattgttaatgggctgtttaggaagggactcaactctctcattgctttgggagaatgggttatttggactcatcggaagaaatgtatttttgacggctagaccccaaatgtctctctagctcttcggccagctagggatgagagaatgatgtgggaaatggctggggctaagggcctctcctatctggctgcctctatccctgagggttagtctggaataggggagggggggttggtagattctttgtttagatggatcttctcaggttgctgagttttcgacctccgtaaggaagtctctgtaccgggtcaattttagaccttcttaccttcttaatataatggggaacagttctcctgcgcttttcgaaaaaaagacaagatgaacatgctcattgtaaataactaagatgagcaatgcaatagaacaggcatgcatcttgtggtgagatgggcacaccttcaaatgtattatacaattcatgcggatagaataggaagtaatatattcagggtaggaagaagtccttttgtgccccccaactcttctgtttgatatccctaacaaatcttcagtttgatctctgaaaaaaaaattgtttgcctaatgttgaccctcattttcaatattgtctagacagagcaacttaattaataaaactgcatcattttacacttagccccttcaaagcgggttttctggccccatttgggctttgtttgggtactctagtatttacctcaatacacatggattgagaacaacggttaggatgatgtggcccacagagcttatgcatctggaggacagtagtgactggtctgcattgatgctcaagcctccagagcaggcgcaccacctagtctactgtctcagcaccagggccgtcgatggccatgtgccagggtctcttattaagttcgctccggggcctcatatttctggagacggccctgctcagcgctcagttgtttgccctattcaaaggaacaacgagcagcctcgtgcttctcaactcaagatgaaacgcaagcttccttcttatgctggaacataagaagacatggaaacagaggaggtgccaaggcaagaagaaaacaagcgagggatggaagatagctgtctggctggccaccgactttctgcttggatcgaaatgcgaggggagaagagatgacatgggcacagggcaccatgctccttttctgctttgcacgtttctatggtcgccagcactatgatccctccctaccacagtgccgctaccaatcaagatctggaaacacgtcagatgggtggggaaaagagtaaggagtcacatatgggaccctgccacataatgtcctagattcctggccagcaaaaaaaagcagcaatttgccaccaaaccatccaaataccaaccaaaagggcttgagggtcaaaagcaagtgggtttgatagttgagatactgtggttacacaatattatagttcagggttaaaattagacaaacacagaagttgaagggctaaacatggacttatcccttcagagtaccatgtaaagattctcttctgtaaatccaaatcggacgttcataatattacagttattaaggagaaactaatatttaagctatgaagttgatatttttcttctatatacatccatttggctggctacactgtttaagcaaataacatagtacaagaatacttgcctcagcgacattatgtccttgccttcttttatctacaatagctagaggtgcatctgac

SEQ ID NO: 49333 - DNA, 1666 bp, Zea Mays
catacctttctcggccttttggctaagatcaagtgtaatatctgtttttatcagtttaatatctgatatgtgggctatgtgcctacttcgatattaaatttattttttgtaggagagggtccattgccggtggcttgcccttgggggctctcatgcgtcgtccagctattgcactctgctggccggacctggcgcaccccaaccaaaacaaaggttttaggtggtatacaaggcagcttagtatggatgaagacggcgacgtggctgatgagttcttggatgaaattatcccagaaagctcagtcaacaacgccaaaagcccagtcggaaggttccaagtgaaatataacacgaaacgaactgctctagcattgaggaagcatgtcattgctgtcgatggcgagatccgccatagcttggaacaccaagggcaactgcggtgggtgtgaccgagtctgttgagcccatatgaaagtgcaggttgggcagaggcaggcgcgcacatgggcgaagcgaatgacctaggttacccatctttgaagtggacctagaggtagttcattgctgatttatccatcgttctccgctcagtgtgttggtacgcctgatctcgaggttattcagacaccttgtaccactagtagtttgtcacgatatacctgaggatagcttccagcctccaggccacgaagggaaagcatgcccaataggagaatttctgggccagaatgggtcctgtaagcggtgcagtggagagtttttctttttctgttggcagtagtgaacgggtttattatatatatgggagatgcatcacaaggagtgttaaaccaaaccatggcgatgcttccaatacaaccgggcgcaatggttggaggagtttctagctccacagctaacttgaatattggagtgcactactgggaagctccaggttctgcagctgtctctgcaacgcatggcaaagcaccagctggttcagctcggggagaccaatgggatgaaagggaactcaagaagcaaaaacggaagcagtctaatagagaatcggcacgcagatcccggctgcgcaagcaggctgagtgtgaggagcttgggcaacgtgctgaaactctgaggtcggaaaactcgtctctcagggccgagcttgaacggatcagaaaggagtacgaacagctactttcgcagaacgcttcactcaaggaaaagctggggggcagcagtgacccgattcctgatatgaatgaacagaacgacggcaacggcagcgacaagaagcaatctgattccgatgcccagcctgggagcgagtcttgacccgtttagctcaggatccttgggaatgcacattgctatttattttctcgaacatggttgaacagaacataggagaaaaagaattgtttatgtaactcttaccccttgactgcctaatgtctctgacggcatgtatataatgtatgccctcactgctgaactagtactagtaattgaggaattgcagatattgacagcttgtatgccctctgacgttatgcgtgtaaacacgcaccttcggtagtcaagagcgacaattataatttagagagtggtcaaaggaaccaatattagctgtaaaagtataatgtatgctgaaatatttaatcgctctaccatgacatccata

SEQ ID NO: 49334 - DNA, 1578 bp, Zea Mays
cccggtccacgctacgccatcttcctccgctgacctctcatcgtcgacgaaggaagccttacgcctgttcaagacgtcaggtgttggtatttgggttgcaattgagtgattgggaaacctgattggacagaagcattgttggtcaaccaatgggaagcaatgaccctagcacaccctccaaggcttcaaaggcatcaaaacaagtacttgaaacagtggatcaacctccagctaccacatccagtggaacagtttcagtttaccctgaatggcccagctttcaggcataccaagcaattccaccacatgggttcttcccccctaccgttgctgcaaatccacaggcccattcatacatgtggggagctcagcccatggtaccaccttatgggactccaccaccaccttatgtgatgtatccacctggagcagtatatgcccatccctctacacctcctactatgcatccgtttagtcattaccctatgccaacaaatggacatgctgaaactcctggaaccgcgccaagtgctccagaaatgaatgggaaaagtgagcctggcagaacatctgctccatctgccaatgggattacctcgcacagtgagagtggaagtgagagtgagagtgaaggaagtgatgccaattatgaaaatgattcacattcaaaggacaatgatggaaaggaagatggcaattctcagaatagcatatcttattcagcatcacaaggagtgttaaaccaaaccatggcgatgcttccaatacaaccgggcgcaatggttggaggagtttctagctccacagctaacttgaatattggagtgcactactgggaagctccaggttctgcagctgtctctgcaacgcatggcaaagcaccagctggttcagctcggggagaccaatgggatgaaagggaactcaagaagcaaaaacggaagcagtctaatagagaatcggcacgcagatcccggctgcgcaagcaggctgagtgtgaggagcttgggcaacgtgctgaaactctgaggtcggaaaactcgtctctcagggccgagcttgaacggatcagaaaggagtacgaacagctactttcgcagaacgcttcactcaaggaaaagctggggggcagcagtgacccgattcctgatatgaatgaacagaacgacggcaacggcagcgacaagaagcaatctgattccgatgcccagcctgggagcgagtcttgacccgtttagctcaggatccttgggaatgcacattgctatttattttctcgaacatggttgaacagaacataggagaaaaagaattgtttatgtaactcttaccccttgactgcctaatgtctctgacggcatgtatataatgtatgccctcactgctgaactagtactagtaattgaggaattgcagatattgacagcttgtatgccctctgacgttatgcgtgtaaacacgcaccttcggtagtcaagagcgacaattataatttagagagtggtcaaaggaaccaatattagctgtaaaagtataatgtatgctgaaatatttaatcgctctaccatgacatccata

SEQ ID NO: 49335 - DNA, 1679 bp, Zea Mays
ccgcctccgcctccgcctcccccgccccgcccgcctgcgccctcgcccgccgctgcattttcggtggcctcgccgcgtgcggccgcgagaagtgggaggctgctgcggtcctcgcccgcgtctgcccgtcgtctccacgtgggggcgtgcccggtaccggcgcgacgagaagccttacgcctgttcaagacgtcaggtgttggtatttgggttgcaattgagtgattgggaaacctgattggacagaagcattgttggtcaaccaatgggaagcaatgaccctagcacaccctccaaggcttcaaaggcatcaaaacaagatcaacctccagctaccacatccagtggaacagtttcagtttaccctgaatggcccagctttcaggcataccaagcaattccaccacatgggttcttcccccctaccgttgctgcaaatccacaggcccattcatacatgtggggagctcagcccatggtaccaccttatgggactccaccaccaccttatgtgatgtatccacctggagcagtatatgcccatccctctacacctcctactatgcatccgtttagtcattaccctatgccaacaaatggacatgctgaaactcctggaaccgcgccaagtgctccagaaatgaatgggaaaagtgagcctggcagaacatctgctccatctgccaatgggattacctcgcacagtgagagtggaagtgagagtgagagtgaaggaagtgatgccaattatgaaaatgattcacattcaaaggacaatgatggaaaggaagatggcaattctcagaatagcatatcttattcagcatcacaaggagtgttaaaccaaaccatggcgatgcttccaatacaaccgggcgcaatggttggaggagtttctagctccacagctaacttgaatattggagtgcactactgggaagctccaggttctgcagctgtctctgcaacgcatggcaaagcaccagctggttcagctcggggagaccaatgggatgaaagggaactcaagaagcaaaaacggaagcagtctaatagagaatcggcacgcagatcccggctgcgcaagcaggctgagtgtgaggagcttgggcaacgtgctgaaactctgaggtcggaaaactcgtctctcagggccgagcttgaacggatcagaaaggagtacgaacagctactttcgcagaacgcttcactcaaggaaaagctggggggcagcagtgacccgattcctgatatgaatgaacagaacgacggcaacggcagcgacaagaagcaatctgattccgatgcccagcctgggagcgagtcttgacccgtttagctcaggatccttgggaatgcacattgctatttattttctcgaacatggttgaacagaacataggagaaaaagaattgtttatgtaactcttaccccttgactgcctaatgtctctgacggcatgtatataatgtatgccctcactgctgaactagtactagtaattgaggaattgcagatattgacagcttgtatgccctctgacgttatgcgtgtaaacacgcaccttcggtagtcaagagcgacaattataatttagagagtggtcaaaggaaccaatattagctgtaaaagtataatgtatgctgaaatatttaatcgctctaccatgacatccata

SEQ ID NO: 49336 - DNA, 1688 bp, Zea Mays
ccgcctccgcctcccccgccccgcccgcctgcgccctcgcccgccgctgcattttcggtggcctcgccgcgtgcggccgcgagaagtgggaggctgctgcggtcctcgcccgcgtctgcccgtcgtctccacgtgggggcgtgcccggtaccggcgcgacgagaagccttacgcctgttcaagacgtcaggtgttggtatttgggttgcaattgagtgattgggaaacctgattggacagaagcattgttggtcaaccaatgggaagcaatgaccctagcacaccctccaaggcttcaaaggcatcaaaacaagtacttgaaacagtggatcaacctccagctaccacatccagtggaacagtttcagtttaccctgaatggcccagctttcaggcataccaagcaattccaccacatgggttcttcccccctaccgttgctgcaaatccacaggcccattcatacatgtggggagctcagcccatggtaccaccttatgggactccaccaccaccttatgtgatgtatccacctggagcagtatatgcccatccctctacacctcctactatgcatccgtttagtcattaccctatgccaacaaatggacatgctgaaactcctggaaccgcgccaagtgctccagaaatgaatgggaaaagtgagcctggcagaacatctgctccatctgccaatgggattacctcgcacagtgagagtggaagtgagagtgagagtgaaggaagtgatgccaattatgaaaatgattcacattcaaaggacaatgatggaaaggaagatggcaattctcagaatagcatatcttattcagcatcacaaggagtgttaaaccaaaccatggcgatgcttccaatacaaccgggcgcaatggttggaggagtttctagctccacagctaacttgaatattggagtgcactactgggaagctccaggttctgcagctgtctctgcaacgcatggcaaagcaccagctggttcagctcggggagaccaatgggatgaaagggaactcaagaagcaaaaacggaagcagtctaatagagaatcggcacgcagatcccggctgcgcaagcaggctgagtgtgaggagcttgggcaacgtgctgaaactctgaggtcggaaaactcgtctctcagggccgagcttgaacggatcagaaaggagtacgaacagctactttcgcagaacgcttcactcaaggaaaagctggggggcagcagtgacccgattcctgatatgaatgaacagaacgacggcaacggcagcgacaagaagcaatctgattccgatgcccagcctgggagcgagtcttgacccgtttagctcaggatccttgggaatgcacattgctatttattttctcgaacatggttgaacagaacataggagaaaaagaattgtttatgtaactcttaccccttgactgcctaatgtctctgacggcatgtatataatgtatgccctcactgctgaactagtactagtaattgaggaattgcagatattgacagcttgtatgccctctgacgttatgcgtgtaaacacgcaccttcggtagtcaagagcgacaattataatttagagagtggtcaaaggaaccaatattagctgtaaaagtataatgtatgctgaaatatttaatcgctctaccatgacatccata

SEQ ID NO: 49337 - DNA, 720 bp, Zea Mays
aaagcattctacgtgtgcgtgttgtcttctgactttggtggcaagccagaccaaaccaagaatacacggttgtgatgcttggtctggatgcagctggtaaaacaacaatactgtacaggcttcacatgggagaggttctttcaacagtccctacagtcggttttaatgtcgagaaggttcagtataagaatgtggcattcactgtgtgggatgtgggtgggcaagaaaaactcaggtcactgtggaagatgtacctgagtaattctgatgcactgatctatgtcgttgattctctggacagagaaaggatcagagacgcgaggcaagagttccagaccattatcaaggaccctttgatggcaaacagcataatcttggtatttgcaaacaaacaggacctgagaggcacgatgagcacggacgaggtcagcgaagggctggggctgcacgacctcaggaacaggatctggcacatacaggggacctgcgcgctccgcggcgagggcctctacgacgggctcgactggcttgcgtccaccctgaagcagctgcaagaatcgggccacgcgacttcggtcgctggcccttccatctgatccagcgcaaggctcagctcggtcagagctttcggttgcatgtggatcggatgggatgcttgtttggtttgtggctaactgtgccccactttgcctaaggttagtcgttcgaattgagggcgtg

SEQ ID NO: 49338 - DNA, 811 bp, Zea Mays
caagaatacacggtacacaccactggttgtctgcttgcttctccccgtctctgttctccgccagaccaaacctgaccaaccccacccactggaccggcccgcgcccgcttggtccagcgccggctcttcgactccttcttctccaccagggagatgagggttgtgatgcttggtctggatgcagctggtaaaacaacaatactgtacaggcttcacatgggagaggttctttcaacagtccctacagtcggttttaatgtcgagaaggttcagtataagaatgtggcattcactgtgtgggatgtgggtgggcaagaaaaactcaggtcactgtggaagatgtacctgagtaattctgatgcactgatctatgtcgttgattctctggacagagaaaggatcagagacgcgaggcaagagttccagaccattatcaaggaccctttgatggcaaacagcataatcttggtatttgcaaacaaacaggacctgagaggcacgatgagcacggacgaggtcagcgaagggctggggctgcacgacctcaggaacaggatctggcacatacaggggacctgcgcgctccgcggcgagggcctctacgacgggctcgactggcttgcgtccaccctgaagcagctgcaagaatcgggccacgcgacttcggtcgctggcccttccatctgatccagcgcaaggctcagctcggtcagagctttcggttgcatgtggatcggatgggatgcttgtttggtttgtggctaactgtgccccactttgcctaaggttagtcgttcgaattgagggcgtg

SEQ ID NO: 49339 - DNA, 1435 bp, Zea Mays
caagaatacacggtacacaccactggttgtctgcttgcttctccccgtctctgttctccgccagaccaaacctgaccaaccccacccactggaccggcccgcgcccgcttggtccagcgccggccctgcctgcagccagccaccgttgtccgttccctcccgcgatccactcctctcgagctctaggggacggaaggaatccggcgggggtggggtgcgagcagggggagggagaagagcagccgcccgccccgcgagggggcaacagctgcccaagaacctgaccggaagagttgtgggagcggcggcggaaagatggggcaggccctgcgcaggctcttcgactccttcttctccaccagggagatgagggttgtgatgcttggtctggatgcagctggtaaaacaacaatactgtacaggcttcacatgggagaggttctttcaacagtccctacagtcggttttaatgtcgagaaggttcagtataagaatgtggcattcactgtgtgggatgtgggtgggcaagaaaaactcaggtcactgtggaagatgtacctgagtaattctgatgcactggtaataactattacttgcaagtgcagagacacatgagtagcttcccattatgtctctttggttcccttgtctttctcaactcttgatatggtgtttactttgtgcattgttcttcctcttccattgtactccctccattcttttttatttgtcgcattttaattcaaaaatgaactagaggacgacatatattcaagaacggagttagtagttaatatccacatcacagccctgcatttttttttttttgcatagggtagcttagtaagtgtcctgcataatagtaatcgaaggtcatttggtcttcttgctaagtttgtgtttcagctttgggtttgttgcagatctatgtcgttgattctctggacagagaaaggatcagagacgcgaggcaagagttccagaccattatcaaggaccctttgatggcaaacagcataatcttggtatttgcaaacaaacaggacctgagaggcacgatgagcacggacgaggtcagcgaagggctggggctgcacgacctcaggaacaggatctggcacatacaggggacctgcgcgctccgcggcgagggcctctacgacgggctcgactggcttgcgtccaccctgaagcagctgcaagaatcgggccacgcgacttcggtcgctggcccttccatctgatccagcgcaaggttatgtgcgattctgagcacgcaactggacccacttttctctttttcattagtagtatgtgaacaggctcagctcggtcagagctttcggttgcatgtggatcggatgggatgcttgtttggtttgtggctaactgtgccccactttgcctaaggttagtcgttcgaattgagggcgtg

SEQ ID NO: 49340 - DNA, 971 bp, Zea Mays
caagaatacacggtacacaccactggttgtctgcttgcttctccccgtctctgttctccgccagaccaaacctgaccaaccccacccactggaccggcccgcgcccgcttggtccagcgccggccctgcctgcagccagccaccgttgtccgttccctcccgcgatccactcctctcgagctctaggggacggaaggaatccggcgggggtggggtgcgagcagggggagggagaagagcagccgcccgccccgcgagggggcaacagctgcccaagaacctgaccggaagagttgtgggagcggcggcggaaagatggggcaggccctgcgcaggctcttcgactccttcttctccaccagggagatgagggttgtgatgcttggtctggatgcagctggtaaaacaacaatactgtacaggcttcacatgggagaggttctttcaacagtccctacagtcggttttaatgtcgagaaggttcagtataagaatgtggcattcactgtgtgggatgtgggtgggcaagaaaaactcaggtcactgtggaagatgtacctgagtaattctgatgcactgctttgggtttgttgcagatctatgtcgttgattctctggacagagaaaggatcagagacgcgaggcaagagttccagaccattatcaaggaccctttgatggcaaacagcataatcttggtatttgcaaacaaacaggacctgagaggcacgatgagcacggacgaggtcagcgaagggctggggctgcacgacctcaggaacaggatctggcacatacaggggacctgcgcgctccgcggcgagggcctctacgacgggctcgactggcttgcgtccaccctgaagcagctgcaagaatcgggccacgcgacttcggtcgctggcccttccatctgatccagcgcaagtgagctcagtgcctcagccaactgacagcaagcccacaagaat

SEQ ID NO: 49341 - DNA, 954 bp, Zea Mays
caagaatacacggtacacaccactggttgtctgcttgcttctccccgtctctgttctccgccagaccaaacctgaccaaccccacccactggaccggcccgcgcccgcttggtccagcgccggccctgcctgcagccagccaccgttgtccgttccctcccgcgatccactcctctcgagctctaggggacggaaggaatccggcgggggtggggtgcgagcagggggagggagaagagcagccgcccgccccgcgagggggcaacagctgcccaagaacctgaccggaagagttgtgggagcggcggcggaaagatggggcaggccctgcgcaggctcttcgactccttcttctccaccagggagatgagggttgtgatgcttggtctggatgcagctggtaaaacaacaatactgtacaggcttcacatgggagaggttctttcaacagtccctacagtcggttttaatgtcgagaaggttcagtataagaatgtggcattcactgtgtgggatgtgggtgggcaagaaaaactcaggtcactgtggaagatgtacctgagtaattctgatgcactgatctatgtcgttgattctctggacagagaaaggatcagagacgcgaggcaagagttccagaccattatcaaggaccctttgatggcaaacagcataatcttggtatttgcaaacaaacaggacctgagaggcacgatgagcacggacgaggtcagcgaagggctggggctgcacgacctcaggaacaggatctggcacatacaggggacctgcgcgctccgcggcgagggcctctacgacgggctcgactggcttgcgtccaccctgaagcagctgcaagaatcgggccacgcgacttcggtcgctggcccttccatctgatccagcgcaagtgagctcagtgcctcagccaactgacagcaagcccacaagaat

SEQ ID NO: 49342 - DNA, 664 bp, Zea Mays
cgaggatgttgttgacggggatgttccattgtcagagctggtaaaacaacaatactgtacaggcttcacatgggagaggttctttcaacagtccctacagtcggttttaatgtcgagaaggttcagtataagaatgtggcattcactgtgtgggatgtgggtgggcaagaaaaactcaggtcactgtggaagatgtacctgagtaattctgatgcactgatctatgtcgttgattctctggacagagaaaggatcagagacgcgaggcaagagttccagaccattatcaaggaccctttgatggcaaacagcataatcttggtatttgcaaacaaacaggacctgagaggcacgatgagcacggacgaggtcagcgaagggctggggctgcacgacctcaggaacaggatctggcacatacaggggacctgcgcgctccgcggcgagggcctctacgacgggctcgactggcttgcgtccaccctgaagcagctgcaagaatcgggccacgcgacttcggtcgctggcccttccatctgatccagcgcaaggctcagctcggtcagagctttcggttgcatgtggatcggatgggatgcttgtttggtttgtggctaactgtgccccactttgcctaaggttagtcgttcgaattgagggcgtg

SEQ ID NO: 49343 - DNA, 626 bp, Zea Mays
gttgacggggatgttccattgtcagaggttgtgatgcttggtctggatgcagctggtaaaacaacaatactgtacaggcttcacatgggagaggttctttcaacagtccctacagtcggttttaatgtcgagaaggttcagtataagaatgtggcattcactgtgtgggatgtgggtgggcaagaaaaactcaggtcactgtggaagatgtacctgagtaattctgatgcactgctttgggtttgttgcagatctatgtcgttgattctctggacagagaaaggatcagagacgcgaggcaagagttccagaccattatcaaggaccctttgatggcaaacagcataatcttggtatttgcaaacaaacaggacctgagaggcacgatgagcacggacgaggtcagcgaagggctggggctgcacgacctcaggaacaggatctggcacatacaggggacctgcgcgctccgcggcgagggcctctacgacgggctcgactggcttgcgtccaccctgaagcagctgcaagaatcgggccacgcgacttcggtcgctggcccttccatctgatccagcgcaagtgagctcagtgcctcagccaactgacagcaagcccacaagaat

SEQ ID NO: 49344 - DNA, 995 bp, Zea Mays
atgatgggatggaatggaacacagcggtgtaccaccataaccaccagtcaacggaatgtgtgcgggggtgcttttcattgcccttgctccctccagatgcggccggtgacccgcagcttgagctcctgcctgccgccgcccgagaagaagagcgccatgttcctgtggatgatgagcccgtcgaagctgtcccgcaccttccggtggctgtccctgacgctccgcggcgtgccctgccacgtcagcttccgcccgcccccgcccacctccaggctgtacccgaacccctgcgcctcgctctcctcgcccatgaaccgcaggaacgccatgtacaccggcgccatccccagcacgaacgcctcgaagtgcaggcagaagtgctgcccgaaacacttgaaaaccggtggttgaacgtgcagccctcgtgcaagtccaccttatggtcgttgatgagatgggacaccaggaacgggacgtcgcctgcgatcaggcactcggaacctgcgtacgggcagctgtacggcctgaacctgcagagctcctcgtgcttcagtttgctcttgtatgggtggatctcggtgcatcccgtgctctggtacttgcacggaagctggagttgctctgccaccttctcgagagctaggcacctgatgtttcccagttcctggcgacaggttgggcaatggttctctaccctgtgcttgcaactagagcagatcgtgtggccatttgggcactggagtataggtgggcgcatcgagttggtacacactgggcattcgagcaaatcattcaagccacacagcgacgacaatgcaacattggctagcgatgccgatgtagaccacggtttacttgcagagtctacgtcaagcatgatacccccaagtgattcagaaagcccatcgtcatctccacagtccgactcggggactacagtcacaatgctgcttcccggtgccattgtaaaaagctcctttcaggtccggaagtag

SEQ ID NO: 49345 - DNA, 1115 bp, Zea Mays
attttttagcaatatttagatagtttatttctaaatgggagtacgaccacataggaagaggtaagaacataagaaacaattcatcaataacgagtagttgagcatcacaatcagactaataggtgtttggtttatagagactaatttttagtctctaaattattaaatacagaaactgaaatagagttttagtttctgtattcgtcaatttagagaataaaatagaataaaatgttggactaaaaattagttcctaaaaaccaaatacaccctaacaataaataaccacaaattatatggaagttcttctctctctgagtctcttgatagaccttttttgtcactaaaaaacttcacatatcccaaaaaataaaggagagcttgcattttctgtaacagcatgggatttacaataactacagccttttctcacctagtcaccatacttcaatcaccttctccgatggatccgcctgtcaaagctaaccaacacaagtactccctccgtttctttttagttgtcccttgatagttcaattttgtattatccagcgacaattaaaacgaaacggagggagtaattgtattgcatcctgcatttgccagtaggcttcttctcgagcgaaatctacctttgaggcaaaacctccaaggtcatggaagcttgcagctcctcggcgtagaaagacacataaacctgatcaagccttggttgtccacaacctggagcagaagcctcgtgagtcctcatggtttgcagggtcaaaacaaaagcacagagaacccttgccgtttgcaaagatgtatgggaccatgtgaacaaccacatcctacatggtgaccccaattcatctcatgaagtcacgatgagctaacccatcgactagttctccctaacacttggaggctcaaaagctgaacccaccagattcgttcgcgtgaacctggttaaatacaaccatgagacatttacatgactgtgtgaacatgctgctctagttagtaataagtagacttttcccctgcactgcatatattaagattctgattaataactaggatataagtaacaacttctcaggaaaaaaatatactagctggaaagaaaattcaac

SEQ ID NO: 49346 - DNA, 462 bp, Zea Mays
tgaaattatctagtgccggtatgctccaatgggcaactatgagtcccaatgacccatcacccatagtaggataaattctaccgaaagaatctggtttgagggtacgttacatcacattgactcgcttggccagcgaccagggttccaaatgatgtcatcagtgtgctgttttgaattccacgattgggatcttgaagggcaaaaggacagatccagtgccgagaggttgcttcgaaccacgagctggtgattcagtaagacagctctcaccactgattctgatcttgaaggaatctccaaaaaggaatagattgagctccggcaaatcagcactgtgtaattcctccaaaggatttcaaattcagacattcatcgcttctaccatatactagtgttatatccatgtggttgtgaataatctcaaagaaacaatctgaattccttttgatagccatgtcaaag

SEQ ID NO: 49347 - DNA, 2982 bp, Zea Mays
gcggaaggttctggaaggttcctatcattgttcagaagcctcatcatcagagtggaagcccccggggtagtaatagtataaagtcggaaagccgctgtgcagtgctgttctccatcagatgcgaggtgtgcaccgttcgatcctatatcaacggctgtgatcgagcgctggcgtgtcaaaatggatccactcggatgcacctggaagtccagtccacttggatgcagaaaggtttaacctggcaggtggagatgttctgaagttctgcaagtgcaaggtataatggaagcagtgagctgaatgactggccggccaaaagcaagcaatgtttgcccgtccaagctagttaaacccactcggtgaagatcttcacgatgattttgaattacttaggatttaaactcatctaatcacatccaatccaggatcgagaccaaaccgaacagaccctaacttagtttatattcctcgacagcttttcagagcatgttctcctgggcggctgtcgatttaattaatattccaaccgctacaaagcaaagtaaaaaaaaacacacacatataatcactgaagcaggttcaaacgccaggcatggagggccaactagtgcggccaatcggctactttgtcttttcctcatagaaaaaagaatcttgatccacgagcatcatatattcctttcctggacacctaatcactgaagactcgcctttctcatacctataatatatatatgtaagaaaaaaaaacgaacccaatacccacttgggcatgggtacaagatcatcatgaaggtgatgttaattacatagtccatgggcacgtggatctgttcctcagtagcaacagcactgggttatttctataatgacgctgatccgacagctggaatcccaatcatatgagtcttagcttaaaccctaagcatgcgttcttgctgtaacttgccggccatcccggctctctctctctatctctacccctaattccctattccagcactgcttacccagaagaagaccccaagcaagcagccaagcacccgcagaagtagaccaattatcaacgggcctccagctcagccaaatctggatgcttacaatcgacgtgagcccgtggtagcagtaaaagcagtctgaatcaattaatctctctgcagttcaatccagctacgctatgcatggtacgaatggtctggttacaggggaccttttctggtataattaaagggttcagctgaaatttaccatgcattactagcaatgttttaaatgtccggctaaggctctcttagcggcgagtaagtttttagatcacctatatatgaagtctatatagccggctatatatagctgcgagctaaaccagcatttagcagttttagagagaaaaaaatgcatgacatatcttcatagatagagcataaactatagctcaaatgttcaatatctgaatttgatagttcaaacactagttcaaatgtctaataacaaatcaacgtgcatgcaaattcaacaacacgtgtaaagagcctgcctgtagtttatttttgtcctcaatgttccaaaggttcatcccattaaaaggctaacaagtttagcagcgctaaatctagctaatattgtgtttttagcgggccaaataaaggctattagcggctaatttcaattagcgttaaatgatgcatctcttagcttcaaacctccccaaaggctatatagccagctaaaacactgattgctagtactcattttgaagtttacatggaaatataagagatctaactgtagttctagatataaataaagcgtatattaaagataattggttgtatcgttgtatgtttgatgtcccaagtcctataaaggacaaattgtaacaaacgttgcaaacacaagggacacatctggtgcgtgctcgacagcaacgctgagcacatgcagcaacactgagagcacatgatcatctgtttgcaagcgcggtaactctcaaatgttttcgcaaacaagttcgagtcaatttagccttttgaaagtgtttttttataaatagttttgcatactctccgagtgcatcatagtccaattaggctcccctcttaatagtacagtcatttgtttccattttgttttttccgctttcttatttttcaagttgagcacttaattaccacttgtgaccatcaccatcatctttatgattaccatcctagctcaatattggacgtggatttaacttgcctcgcacgcaacattagagtagaccactaattctctcaattaccaaaaccaaacatagcgatttaagatacctacaattcaatttatcacaattgcaaaaaaaaaaaccatttcccttgtatttgaacacttacctttagagtgccttctaccccgctttgtttcaatgccatactctaaaaagacgaaaaaaactaacacactgaggcttgatgagatcatctgcaggtctattttcgatttcgtgcggagtttcgatatggaattcaaaaatctatatgaagagggtcttctttcttctatcgatatattggattgggtgcttatggggagccaagatatccttcgtgtctagcagggacggagccagaaaaaagtttaggagggactaaactaaattgctgcagtataaaagctcattctacattatattatatacattttagattatgggaggctgtagtgaggctccattggatccgaagtggtagggggctcgagccccgtccgtcccaccgctggatccgtccctagtctcccgaagcaataggctggaaatatcgtggtattgctaagtttaaggtatttagggtgtgcttaaatgcactaaatctaatagttacctgttaaaattttaacaggagacgtccaagcagtatagctaagggcatgtacagtggagagacaccaaaacggttctccaagcacaggagacaactaggagactctattgtacaatga

SEQ ID NO: 49348 - DNA, 890 bp, Zea Mays
aaaattcttttctatataacaaacgcggacgtaaagctgctcaaccacactgtccacgtcgatcctccatttcccagccattggatcggcaaccaacgacacaagagaattatgtgcgattgtttcttaacgtgaagtttctggacagcgtcggatatacagcgagaatagaagaatatacacatcttcttcctctcgcttccaaaggtgatgccttccacggagaggagatcgtgcgaccgtgacggcggcgacgcttgattttgcccatcttcccacgctcgaacgggacactcattctctcaatcggctcttcccgccgcgctacacgccaccaagagcctcccccaactcctccccgtcaaacggcgctgcgctgcaaggagcacaaccacccctcgtctccttcctcagacgatgtcgcgtttctcgcgcgggttattgcccacggaagcttaaatacttggtgttgaactgctaaagtatgatgtctcactgaaaaacagcgagatggcaatgagaagtgttcagaaagaggggtaatatttactcagagcagcgaaggaaggtcgctccaccaagctgccatgatattcctccacttaccagcgattccaattccaacgacatcaggttgaagaaaggaacttcacacatgaaaagagacgatcatgacgaccatgaagattaaacgttgttgttaagaaaagccatattttctgtattgcttccaagctgtttttatggcctttaaaccagtacttttggttgccatatatgtagctataactattgtaatataatctctgagcttctcatgctgatattcaacattactcctaccaatatatgtacagttccagttgacttgcttgcttccgttcttgcct

SEQ ID NO: 49349 - DNA, 709 bp, Zea Mays
ctctcgcttccaaaggtgatgccttccacggagaggagatcgtgcgaccgtgacggcggcgacgcttgattttgcccatcttcccacgctcgaacggcacgctagcaggacactcattctctcaatcggctcttcccgccgcgctacacgccaccaagagcctcccccaactcctccccgtcaaacggcgctgcgctgcaaggagcacaaccacccctcgtctccttcctcagacgatgtcgcgtttctcgcgcgggttattgcccacggaagcttaaatacttggtgttgaactgctaaagtatgatgtctcactgaaaaacagcgagatggcaatgagaagtgttcagaaagaggggtaatatttactcagagcagcgaaggaaggtcgctccaccaagctgccatgatattcctccacttaccagcgattccaattccaacgacatcaggttgaagaaaggaacttcacacatgaaaagagacgatcatgacgaccatgaagattaaacgttgttgttaagaaaagccatattttctgtattgcttccaagctgtttttatggcctttaaaccagtacttttggttgccatatatgtagctataactattgtaatataatctctgagcttctcatgctgatattcaacattactcctaccaatatatgtacagttccagttgacttgcttgcttccgttcttgcct

SEQ ID NO: 49350 - DNA, 1531 bp, Zea Mays
cttttattcaggcgatgtacactcttttttgcatcaattttctctgaaaaaaaagatgtgacactgtacatgtctaatgccttgtgaagcagattttcagaaaacattgggtcttgcgactctgtgtgtgtggtcaggcttctctaggcttaatcataaatgacaagtggatagtgttgtaaggaatacccacccccaactagatggccttcattgacactttctgttccactgaacctgaagattttctgatacaagtttccaatgcataaataaatacctgcctttttttctctccaggtggaccttcattctggtgacgatttacttcgggctcggcacggccctgtccatctacggctgcagcaggttcgccgaggagaacgtcgccgcggcggcggcggcggcggcggcagacatggaggacggcgcgggatacgtcgtcgcccgtggcctggggcctgctgctgctaagccggccttggatgaacgagacggtgccggagaggtcgctgggttctggggctacctgctccagatcatctaccaggcaaatgcaggcgcggtgatgctcacggactgcgtgttctggttcatcatcttcccgttcctcaccgagaaggactacagcctcaacttcctgttgatcgggatgcattcggtgaacgcagtcttcctgctgggcgaggccgccctgaatagcttgaggttcccgtggttccgggtcgcctacttcttcctctggaccgcgctctacgtcgtcttccagtggatcgtccacgcagctacgccgatgtggtggccttacccgttcctcgacctgacatcgaacctggcacctctgtggtacctcgcggtggcggcgctgcagctgccgtgctacgtggtgttctggctgctgatcaaggtgaagcaccacctgctggccaggtgcttcccggtctcgtacgtacgctagctaggggctagggcacaagcaggcaggcccgtcttctccgccgccaacggtgagagcaacgcaagctagctagagaataatatatggcgggtccgggctgtttataatttggtggtggtggtggtggactggtgatggggagtgaggggacgagcgtttcgtgtgcaggtgccctccccgatcaagcgaagaacagaggggagtggcgcgtggtggaagggaaggagatgcgtgcagtttttttacagggggtataaaaactataaaatagtttggtgtacattggaaggaagctaagcatggtggtagtctttatttgagaatttttttgtattttttttgccgtggtggagtggaagtgaacaggagagaggttcagggcagcagggaatggctgtgtatagctttgactgattggatgagattgaaatgaaatgaaatggagaagatactgttccttgacatcttatatttacccgtaccattccatccaaaatcaccgtgtgcgttaactttggctaagtgtctgtttggttgcctctacataggggtggtaatggatcgtgatctaaa

SEQ ID NO: 49351 - DNA, 814 bp, Zea Mays
ctcaaacctgtctgtcgcgtcactgtcagcgcccttgcgctctcaaagaggagcgagcgccgaagctggctggagctctcggggtctgaaacttttcttcccacaaatgtatagcgagggttcagatctcaaagcatataataatgcgaagacagctagtcacctgctcttgtactgcactgcactccaggcctcagtgcctgcatgggggagtcttcaccgggtgtccgggtcccctactccgtctcctgacctataaaacacatacaagaagagagcgtgactaaccagtaaccaacctccattgcaggcaggcacatcactagctagtacagaaaatggagcaggccggtgacgagacgccgggagagatcgggcgagaggctgctcgccgtgaagctgcgctccggagcggcggcggagacgccggagagcgcgtagacaaggctgtggtggacggcggagaagacgagcggtttcgcgtgcagcggaaatggaggcggttcttggcccatgtcgggcccggagctctcgtggccattggcttcctggatcctagcaacttggaaaccgacatgcaagctggggctgacttcaagtaccagcttctgtgggtgattttagtcgggatggtcttcgcgcttctgatccaaacactggccgccaaccttggagtgaagacaggcaagcatctcgctgagctctgcagggaagagtacccacgttccgtcaacatctgcctgtggatcatcgcggagctggcggtgatatccgacgacatccccgaagctacctttggtttcactttcaccta

SEQ ID NO: 49352 - DNA, 2299 bp, Zea Mays
cttcctccccgtcccatcgtgctgtagaagttgcccgctgccgtctcctgtcctgactcctccatgtctctcacttccctcacttctcggctttgacctcggctcgcaatgaactctctcctgcgtccgccgctgccgggcccgacgccgagcctgagcgcgagacgcatggtctcgccgccgccagcgccggtgcgggtcagctcggcggcgctggccggcagcgggcgcagatgccggctggggctggcagtggcggcgtcggcggctccgtcgtggatggaggaggccggggtggccgtgctggaggaaggcgggcggaggaacccgtctgtgtcggactcgtaccgccctgctgggctgccgcggcccaacgccacggtgctggaggcgcaggcgcgggtgtgcacgggccccgcacagacgcgcccgctcggggaggagcaggccatgcgcgtcctcgacactatcctccgctccgcaatgggagaactcaaagaggagccagtctctagtgcacagttaggtgcattctttgcaggcatgacaataagatccaactcgtttccagaggccacacagtggagcgagggtgaacggcgtgccatgagcatattttggccacgccttgtacaaattcttcctccggaggtgaagtttatagcagaccctgaagggacgatcatgggtgcaaatggtttaacagggcctcggtatgttggtcaaggaactggagagatgagactagtcggtgctctgagggaagtgcttgctggtggccatttaggctatgaggaggttcaatgtgtgctaaaggatattttaccaattggaccgagttcagatttgacagtgactagtgaagcattgctggcagcatttttgattggacaacggatgaatagagaaactgatcgtgagctcaaagcgtattgcctagcctttgatgatgaactaggtaactccagaaaaaactaggtcctcctctggttgctgacgtcaagtccttgacacactatggtgaaccatatgatggcaatacacggttttttagaagtactctatttgttgcagcggttcgagcctgctatagtgaatcatgcctcctccatggtgttcaatggatgccacccaaggttttcagggtggaataacagaaggacaaatgcttaaattcatgggcgcaaacatacacttatctccaacacaagccaagatactgttggaggatgagactgctggttttgcatatttgaatcttcaggaagcatgtccaccattatattcaattattgggctcagggagcatattaagaaacggccaccattggctacctctgagaaagttcaacaatttgtgagggcacgggggagagaatcaatggttgcaggattttatcacgaaggctatgaagatccattgcttatgctgatgagaaggagaactgttcatgctggactagttgtgaagggtgaggaaggtgcgctttccttgacaaccaaggaaagatcagcccatgcatcaaaaggactccctgttaaccactgttcagggtttcggacaccaagcggcataaatttctctgagactgatggtattcctagagaaagcttcagggtcattgtgaatgcccaggaacttggttttgaatccactgaaactccaagaactgatagatcaattctaaggaacttggagcttggtctggcagcactaggtggcgaaaaaggagcagcgtatgaccgaatcgttcttaacgcggctatggctgaccacttactaggctgcagcggagctgaggatatcgacgctgcacttgaccgagcgagggaagccattggtagcggtgaagctctgagaaggctcatgagttacataaagatctcgcacaaagtgtcctagtgttgacccgtgagtctgtgaccatgtactgactgtacaattttggcgtgagtcacgactggatatcttcttcgcgttgtctgagtgccttccccactcaatgttacaaagccaccatgaaaaagtatactcccttgccctcaaggacatgtccaaaaaaaacagttgaaaggaaacaatgccttgttggcaaggaatgtgtttttataagatttttgttttgcaccgagagacacgtacagattctcctcttgagatgtccgaatctggttattgtggctattgtgaatactctgcatagcctcatcgtcaatcgtcatccaggttgagaacttgtaaaccgtatttgattttgtttatgaatgtatgtgctcttctttatgttgtgtatcgtga

SEQ ID NO: 49353 - DNA, 2248 bp, Zea Mays
gtcccatcgtgctgtagaagttgcccgctgccgtctcctgtcctgactcctccatgtctctcacttccctcacttctcggctttgacctcggctcgcaatgaactctctcctgcgtccgccgctgccgggcccgacgccgagcctgagcgcgagacgcatggtctcgccgccgccagcgccggtgcgggtcagctcggcggcgctggccggcagcgggcgcagatgccggctggggctggcagtggcggcgtcggcggctccgtcgtggatggaggaggccggggtggccgtgctggaggaaggcgggcggaggaacccgtctgtgtcggactcgtaccgccctgctgggctgccgcggcccaacgccacggtgctggaggcgcaggcgcgggtgtgcacgggccccgcacagacgcgcccgctcggggaggagcaggccatgcgcgtcctcgacactatcctccgctccgcaatgggagaactcaaagaggagccagtctctagtgcacagttaggtgcattctttgcaggcatgacaataagatccaactcgtttccagaggccacacagtggagcgagggtgaacggcgtgccatgagcatattttggccacgccttgtacaaattcttcctccggaggtgaagtttatagcagaccctgaagggacgatcatgggtgcaaatggtttaacagggcctcggtatgttggtcaaggaactggagagatgagactagtcggtgctctgagggaagtgcttgctggtggccatttaggctatgaggaggttcaatgtgtgctaaaggatattttaccaattggaccgagttcagatttgacagtgactagtgaagcattgctggcagcatttttgattggacaacggatgaatagagaaactgatcgtgagctcaaagcgtattgcctagcctttgatgatgaactaggtcctcctctggttgctgacgtcaagtccttgacacactatggtgaaccatatgatggcaatacacggttttttagaagtactctatttgttgcagcggttcgagcctgctatagtgaatcatgcctcctccatggtgttcaatggatgccacccaagaaggacaaatgcttaaattcatgggcgcaaacatacacttatctccaacacaagccaagatactgttggaggatgagactgctggttttgcatatttgaatcttcaggaagcatgtccaccattatattcaattattgggctcagggagcatattaagaaacggccaccattggctacctctgagaaagttcaacaatttgtgagggcacgggggagagaatcaatggttgcaggattttatcacgaaggctatgaagatccattgcttatgctgatgagaaggagaactgttcatgctggactagttgtgaagggtgaggaaggtgcgctttccttgacaaccaaggaaagatcagcccatgcatcaaaaggactccctgttaaccactgttcagggtttcggacaccaagcggcataaatttctctgagactgatggtattcctagagaaagcttcagggtcattgtgaatgcccaggaacttggttttgaatccactgaaactccaagaactgatagatcaattctaaggaacttggagcttggtctggcagcactaggtggcgaaaaaggagcagcgtatgaccgaatcgttcttaacgcggctatggctgaccacttactaggctgcagcggagctgaggatatcgacgctgcacttgaccgagcgagggaagccattggtagcggtgaagctctgagaaggctcatgagttacataaagatctcgcacaaagtgtcctagtgttgacccgtgagtctgtgaccatgtactgactgtacaattttggcgtgagtcacgactggatatcttcttcgcgttgtctgagtgccttccccactcaatgttacaaagccaccatgaaaaagtatactcccttgccctcaaggacatgtccaaaaaaaacagttgaaaggaaacaatgccttgttggcaaggaatgtgtttttataagatttttgttttgcaccgagagacacgtacagattctcctcttgagatgtccgaatctggttattgtggctattgtgaatactctgcatagcctcatcgtcaatcgtcatccaggttgagaacttgtaaaccgtatttgattttgtttatgaatgtatgtgctcttctttatgttgtgtatcgtga

SEQ ID NO: 49354 - DNA, 2253 bp, Zea Mays
gaagttgcccgctgccgtctcctgtcctgactcctccatgtctctcacttccctcacttctcggctttgacctcggctcgcaatgaactctctcctgcgtccgccgctgccgggcccgacgccgagcctgagcgcgagacgcatggtctcgccgccgccagcgccggtgcgggtcagctcggcggcgctggccggcagcgggcgcagatgccggctggggctggcagtggcggcgtcggcggctccgtcgtggatggaggaggccggggtggccgtgctggaggaaggcgggcggaggaacccgtctgtgtcggactcgtaccgccctgctgggctgccgcggcccaacgccacggtgctggaggcgcaggcgcgggtgtgcacgggccccgcacagacgcgcccgctcggggaggagcaggccatgcgcgtcctcgacactatcctccgctccgcaatgggagaactcaaagaggagccagtctctagtgcacagttaggtgcattctttgcaggcatgacaataagatccaactcgtttccagaggccacacagtggagcgagggtgaacggcgtgccatgagcatattttggccacgccttgtacaaattcttcctccggaggtgaagtttatagcagaccctgaagggacgatcatgggtgcaaatggtttaacagggcctcggtatgttggtcaaggaactggagagatgagactagtcggtgctctgagggaagtgcttgctggtggccatttaggctatgaggaggttcaatgtgtgctaaaggatattttaccaattggaccgagttcagatttgacagtgactagtgaagcattgctggcagcatttttgattggacaacggatgaatagagaaactgatcgtgagctcaaagcgtattgcctagcctttgatgatgaactaggtcctcctctggttgctgacgtcaagtccttgacacactatggtgaaccatatgatggcaatacacggttttttagaagtactctatttgttgcagcggttcgagcctgctatagtgaatcatgcctcctccatggtgttcaatggatgccacccaaggttttcagggtggaataacagaaggacaaatgcttaaattcatgggcgcaaacatacacttatctccaacacaagccaagatactgttggaggatgagactgctggttttgcatatttgaatcttcaggaagcatgtccaccattatattcaattattgggctcagggagcatattaagaaacggccaccattggctacctctgagaaagttcaacaatttgtgagggcacgggggagagaatcaatggttgcaggattttatcacgaaggctatgaagatccattgcttatgctgatgagaaggagaactgttcatgctggactagttgtgaagggtgaggaaggtgcgctttccttgacaaccaaggaaagatcagcccatgcatcaaaaggactccctgttaaccactgttcagggtttcggacaccaagcggcataaatttctctgagactgatggtattcctagagaaagcttcagggtcattgtgaatgcccaggaacttggttttgaatccactgaaactccaagaactgatagatcaattctaaggaacttggagcttggtctggcagcactaggtggcgaaaaaggagcagcgtatgaccgaatcgttcttaacgcggctatggctgaccacttactaggctgcagcggagctgaggatatcgacgctgcacttgaccgagcgagggaagccattggtagcggtgaagctctgagaaggctcatgagttacataaagatctcgcacaaagtgtcctagtgttgacccgtgagtctgtgaccatgtactgactgtacaattttggcgtgagtcacgactggatatcttcttcgcgttgtctgagtgccttccccactcaatgttacaaagccaccatgaaaaagtatactcccttgccctcaaggacatgtccaaaaaaaacagttgaaaggaaacaatgccttgttggcaaggaatgtgtttttataagatttttgttttgcaccgagagacacgtacagattctcctcttgagatgtccgaatctggttattgtggctattgtgaatactctgcatagcctcatcgtcaatcgtcatccaggttgagaacttgtaaaccgtatttgattttgtttatgaatgtatgtgctcttctttatgttgtgtatcgtga

SEQ ID NO: 49355 - DNA, 2232 bp, Zea Mays
cctgtcctgactcctccatgtctctcacttccctcacttctcggctttgacctcggctcgcaatgaactctctcctgcgtccgccgctgccgggcccgacgccgagcctgagcgcgagacgcatggtctcgccgccgccagcgccggtgcgggtcagctcggcggcgctggccggcagcgggcgcagatgccggctggggctggcagtggcggcgtcggcggctccgtcgtggatggaggaggccggggtggccgtgctggaggaaggcgggcggaggaacccgtctgtgtcggactcgtaccgccctgctgggctgccgcggcccaacgccacggtgctggaggcgcaggcgcgggtgtgcacgggccccgcacagacgcgcccgctcggggaggagcaggccatgcgcgtcctcgacactatcctccgctccgcaatgggagaactcaaagaggagccagtctctagtgcacagttaggtgcattctttgcaggcatgacaataagatccaactcgtttccagaggccacacagtggagcgagggtgaacggcgtgccatgagcatattttggccacgccttgtacaaattcttcctccggaggtgaagtttatagcagaccctgaagggacgatcatgggtgcaaatggtttaacagggcctcggtatgttggtcaaggaactggagagatgagactagtcggtgctctgagggaagtgcttgctggtggccatttaggctatgaggaggttcaatgtgtgctaaaggatattttaccaattggaccgagttcagatttgacagtgactagtgaagcattgctggcagcatttttgattggacaacggatgaatagagaaactgatcgtgagctcaaagcgtattgcctagcctttgatgatgaactaggtaactccagaaaaaactaggtcctcctctggttgctgacgtcaagtccttgacacactatggtgaaccatatgatggcaatacacggttttttagaagtactctatttgttgcagcggttcgagcctgctatagtgaatcatgcctcctccatggtgttcaatggatgccacccaagaaggacaaatgcttaaattcatgggcgcaaacatacacttatctccaacacaagccaagatactgttggaggatgagactgctggttttgcatatttgaatcttcaggaagcatgtccaccattatattcaattattgggctcagggagcatattaagaaacggccaccattggctacctctgagaaagttcaacaatttgtgagggcacgggggagagaatcaatggttgcaggattttatcacgaaggctatgaagatccattgcttatgctgatgagaaggagaactgttcatgctggactagttgtgaagggtgaggaaggtgcgctttccttgacaaccaaggaaagatcagcccatgcatcaaaaggactccctgttaaccactgttcagggtttcggacaccaagcggcataaatttctctgagactgatggtattcctagagaaagcttcagggtcattgtgaatgcccaggaacttggttttgaatccactgaaactccaagaactgatagatcaattctaaggaacttggagcttggtctggcagcactaggtggcgaaaaaggagcagcgtatgaccgaatcgttcttaacgcggctatggctgaccacttactaggctgcagcggagctgaggatatcgacgctgcacttgaccgagcgagggaagccattggtagcggtgaagctctgagaaggctcatgagttacataaagatctcgcacaaagtgtcctagtgttgacccgtgagtctgtgaccatgtactgactgtacaattttggcgtgagtcacgactggatatcttcttcgcgttgtctgagtgccttccccactcaatgttacaaagccaccatgaaaaagtatactcccttgccctcaaggacatgtccaaaaaaaacagttgaaaggaaacaatgccttgttggcaaggaatgtgtttttataagatttttgttttgcaccgagagacacgtacagattctcctcttgagatgtccgaatctggttattgtggctattgtgaatactctgcatagcctcatcgtcaatcgtcatccaggttgagaacttgtaaaccgtatttgattttgtttatgaatgtatgtgctcttctttatgttgtgtatcgtga

SEQ ID NO: 49356 - DNA, 2245 bp, Zea Mays
cctgtcctgactcctccatgtctctcacttccctcacttctcggctttgacctcggctcgcaatgaactctctcctgcgtccgccgctgccgggcccgacgccgagcctgagcgcgagacgcatggtctcgccgccgccagcgccggtgcgggtcagctcggcggcgctggccggcagcgggcgcagatgccggctggggctggcagtggcggcgtcggcggctccgtcgtggatggaggaggccggggtggccgtgctggaggaaggcgggcggaggaacccgtctgtgtcggactcgtaccgccctgctgggctgccgcggcccaacgccacggtgctggaggcgcaggcgcgggtgtgcacgggccccgcacagacgcgcccgctcggggaggagcaggccatgcgcgtcctcgacactatcctccgctccgcaatgggagaactcaaagaggagccagtctctagtgcacagttaggtgcattctttgcaggcatgacaataagatccaactcgtttccagaggccacacagtggagcgagggtgaacggcgtgccatgagcatattttggccacgccttgtacaaattcttcctccggaggtgaagtttatagcagaccctgaagggacgatcatgggtgcaaatggtttaacagggcctcggtatgttggtcaaggaactggagagatgagactagtcggtgctctgagggaagtgcttgctggtggccatttaggctatgaggaggttcaatgtgtgctaaaggatattttaccaattggaccgagttcagatttgacagtgactagtgaagcattgctggcagcatttttgattggacaacggatgaatagagaaactgatcgtgagctcaaagcgtattgcctagcctttgatgatgaactaggtaactccagaaaaaactaggtcctcctctggttgctgacgtcaagtccttgacacactatggtgaaccatatgatggcaatacacggttttttagaagtactctatttgttgcagcggttcgagcctgctatagtgaatcatgcctcctccatggtgttcaatggatgccacccaagggtggaataacagaaggacaaatgcttaaattcatgggcgcaaacatacacttatctccaacacaagccaagatactgttggaggatgagactgctggttttgcatatttgaatcttcaggaagcatgtccaccattatattcaattattgggctcagggagcatattaagaaacggccaccattggctacctctgagaaagttcaacaatttgtgagggcacgggggagagaatcaatggttgcaggattttatcacgaaggctatgaagatccattgcttatgctgatgagaaggagaactgttcatgctggactagttgtgaagggtgaggaaggtgcgctttccttgacaaccaaggaaagatcagcccatgcatcaaaaggactccctgttaaccactgttcagggtttcggacaccaagcggcataaatttctctgagactgatggtattcctagagaaagcttcagggtcattgtgaatgcccaggaacttggttttgaatccactgaaactccaagaactgatagatcaattctaaggaacttggagcttggtctggcagcactaggtggcgaaaaaggagcagcgtatgaccgaatcgttcttaacgcggctatggctgaccacttactaggctgcagcggagctgaggatatcgacgctgcacttgaccgagcgagggaagccattggtagcggtgaagctctgagaaggctcatgagttacataaagatctcgcacaaagtgtcctagtgttgacccgtgagtctgtgaccatgtactgactgtacaattttggcgtgagtcacgactggatatcttcttcgcgttgtctgagtgccttccccactcaatgttacaaagccaccatgaaaaagtatactcccttgccctcaaggacatgtccaaaaaaaacagttgaaaggaaacaatgccttgttggcaaggaatgtgtttttataagatttttgttttgcaccgagagacacgtacagattctcctcttgagatgtccgaatctggttattgtggctattgtgaatactctgcatagcctcatcgtcaatcgtcatccaggttgagaacttgtaaaccgtatttgattttgtttatgaatgtatgtgctcttctttatgttgtgtatcgtga

SEQ ID NO: 49357 - DNA, 1169 bp, Zea Mays
cttttcttgttaaaactgcaagaaacatatattcaattattgggctcagggagcatattaagaaacggccaccattggctacctctgagaaagttcaacaatttgtgagggcacgggggagagaatcaatggttgcaggattttatcacgaaggctatgaagatccattgcttatgctgatgagaaggagaactgttcatgctggactagttgtgaagggtgaggaaggtgcgctttccttgacaaccaaggaaagatcagcccatgcatcaaaaggactccctgttaaccactgttcagggtttcggacaccaagcggcataaatttctctgagactgatggtattcctagagaaagcttcagggtcattgtgaatgcccaggaacttggttttgaatccactgaaactccaagaactgatagatcagtaagccttttctgccctggctccttggcagtatacattgatgtttgctagtgatcatgtatgatcaataatttgtcggcatgggatatagggacgcttactttatttcctaatctgaatcagattctaaggaacttggagcttggtctggcagcactaggtggcgaaaaaggagcagcgtatgaccgaatcgttcttaacgcggctatggctgaccacttactaggctgcagcggagctgaggatatcgacgctgcacttgaccgagcgagggaagccattggtagcggtgaagctctgagaaggctcatgagttacataaagatctcgcacaaagtgtcctagtgttgacccgtgagtctgtgaccatgtactgactgtacaattttggcgtgagtcacgactggatatcttcttcgcgttgtctgagtgccttccccactcaatgttacaaagccaccatgaaaaagtatactcccttgccctcaaggacatgtccaaaaaaaacagttgaaaggaaacaatgccttgttggcaaggaatgtgtttttataagatttttgttttgcaccgagagacacgtacagattctcctcttgagatgtccgaatctggttattgtggctattgtgaatactctgcatagcctcatcgtcaatcgtcatccaggttgagaacttgtaaaccgtatttgattttgtttatgaatgtatgtgctcttctttatgttgtgtatcgtga

SEQ ID NO: 49358 - DNA, 144 bp, Zea Mays
cttgattctacctcaaagtttcagggaaacttgaatttacacactagacatatttacaaacatcttcaacatactctcgagggggggggggggtgtttcatgtgcaacatcatagaattccaatgctatggttgtgaagaggac

SEQ ID NO: 49359 - DNA, 521 bp, Zea Mays
caccttttcagcggtgttgccatcctgtgcctgatgtccaggaaggtcaagattgaggttttccatagtgtcgttcacactttcttcctttgatgttgtaattaccaatggaacatcaatatcccttccagtgtcagtaaaggtcttgagacttccgttagacggtgctccatcagctccgctaacctacacgggaaaatgaaaattactttagtaatatataactcccaaaatatttaagaactgctgacatactgaccttgtcagtaatatcttcattgaacgttactgcttcagtggctgctgtactagtctctgtttcctcatttgaagcagtctcttcaatcttgtcaaatgaatttccttctgtttcaagttgcagaacatcatctgcagtaatttcttcttgacattgttctgtttggtttatatccgcgccagattcatcatttatttcttgcatagcttcagtatctacatcatttttctcagacattgaaagcttttcatcttcaacctga

SEQ ID NO: 49360 - DNA, 741 bp, Zea Mays
ctgatctccaggctctatggcttcaatgtctcttgtttcttctgttaaacccagttcttccacttcttggacatcaggagttgtttcacttcttggtacttggtctgcctctccaggaataggaaagctattgatatctgagaattcatcagttttgtcatcttcgctgtccttgatttcttgagatgtcagattctgcacttcctgtgtactaaaagatggttctgttactgctgtattttcttctgttggagtaagctcatcagaagcagagtcatgggtctctcctggatgttccgttgtgtcagcgctgacttcaactgattctagctcatgaacaggttcagtaccagcatgtggggcatttggtgttgaagtatcgtcttcagtgtgttcttttatatttgcatcactactatcatgagggactgcttcagtctccatggtttccgtgtccatcttttctgatgtatagtcacttgataccataccatcctctgtttcaattgttcctgtgtccttgttctcttctagatctgtctcatggaaagatgatgtatcagcagttgcatctgtttctggagctgctgcctcagcaagagcagtattacttttcacaatttcggtgtcctcagtttcttctgctaactgtgaattgtctgcttcggtgtcagaacttggttctgttgatgtgaactcctcagaagaaagagtgttagatgagacaatttcttgaaattt

SEQ ID NO: 49361 - DNA, 4639 bp, Zea Mays
acttctatcatctcaggcacctcttcctgcaatacctctgcatgtatcgcatcagcttgttgaccaagttgatctacttctatcatctcttctgtaggttctacaacacatgtgtcttcagaaaagctctctttgtggtcaggaaggataacaccatctactttaactagttcatctgtttttgcatttccatcggtagtatctggaatggcatcggagatgtccagattgatctcaatagaagtttgaattccagaaggtgcttcggttattacatcaacatcaggagtgttggccgtgcttgcaggttctgtgttctcagttgcattttctggtcctagatcatggtattgttgaccttcttttgtttgtccaatagcttcttgtgtgtcttcctgtactgtgttatttgtagcaattaagttatattgatcttctggaactgcatcctcaagagcaacactgctttgttgcactggtgcttcagtatcaactgcttcggcaacttcactttcttctacagtagcttctctttcttctaatgattcctggttctgtgcttgaatatttacaggtggctcccttgttgtcgtgtcatattctggtgttgtctcctcagatggtggcatgttgctctggttgcctgtttcttcagtcttttcattcactgggtcattggtttcttcagcataatcttgattcagcacttcaagagcatcagttgctggctcatcagcatgttcagatttaggcacctcttcatccaccacgtctgcatccattgcatcagctctctggctttgctgatcttctacattggccacctcttctgtaggttctgcggtagatgtatcttcaggaaaactctctttcttttcaggatggataacaccttctgttttaactagtttatctgtttctgtgtttccatcagtagtatcaggaatggcatcagagatgtccagattgatctccacaggagtttgaattccagaaggtgcttcggttgttacatcaacatcagcaatgttggccatgcttgcaggttgtgtgttctcagttgcattttctggtcctagatcatggaattgctgaccttcttttgtttgcccaatagcgtcctgcgtgtcttcctgcgctgtgttatttgtagcacctaagttatgttgatcttctggaactgcgtcctcaagagcaacactgctttgttgcactggtgcttcagtatcaactgcttcagcaacttcattttctgctacagtagcttctctttcttctaatgattcctggttctgtgcttgaatatttacaggtggatcccttgttgctgtgtcatactctggtactgtctcctcagatgttagcatgttgctctggttggctgtttcttcaatcttttcattcgctgggccactggtttcttcagcatattcttgattgagcacttcaagggtatcagttgctggctcatcggctttagatttaggcacctcttcttgcaccacgtctgcatccattgcatcagcttgctggctgtgctgatcttctacattggccacctcttctaaaggttctgtggtagatgtatcttctagaaaactctctttgttttcaggatggataacaccttctgctttaactagttcatctgttcctgtgtttccatcagtagtatctgcaatggcatcagagatgtccagattgatctccacaggagtttgaaatccagaaggtgcttcggttataacctcaacctcaggaatgtttgccgtgcttgcaggttgtgtgttctctattgcattttctggtcctagatcttggtatcgctgaccttcttttgtttgcccagtagcttccatcatgtcttcttgcactgtattatttgcaacacctaaattatgttggtcttctggaactgcctcctcaaaagcaacactgctttgttgcactggtgcttcagtatgaactgcttcagccacttctctttcttctacagtagcttctccttcatctactggttcctggttctgcgcttgaatatttacaggttgatcccttgttgccgcgtcatattttggtattgtctcctcagatgctggcatgttgctctggttggttgcttcttcagtctcttcattcactgggctattggtttcttcaatagattcttgattcagcacttcaagagcatcagctgttggctcatcagcatgttcagatttaggcacatcttcctgcaccacgtctgcatccattgcttcagcttgctggctctgtctatcttctactttgatcacctcttctgtaggttctgcggtagatgtatcttcttgaaagctctctttcttttcaggatgaatgatactgtgcgctttagctggttcagttgtttctgtgcttccatcagtagcatctggaatggcatcagagatgtcccggttgatctcaacaggagtttgaattccagaagatgctttggttataacatcaacatcaggaatgtttgccatgcttgcaggttgtgtgttctcagttgcattttctggtcctagatcctggtattgctgacctccttttgtttgcttagttgcttccagtgtgtcttgctgcactgtgtcatttgtcgcacctaagttatgttgatgttctggaactgactcctcaaaagaagcactgcttggttgaactgttgcttcagtatcaactgcttcatgaacttctctttcttctaatgattcctggttctgtgcttgaatagttacagatggctcccttgttgtcacatcattttctggtagtgtctcctcagatgcgggcatgttgctctggtgtgttgtttcttcagtattttcatatactgggccatctgtttcttcatcagattcttgattcagcgcttcaacagcatcggttgctggctcatcggtgtgctccgatgtaggcacctcttcctgcaccacgtctgcatcctttgcatcaacttgttggctctgttgatcttctagtgtgaccacctcttctgtaggtccagtagatgtatcttctgcaaagctctcttccgtatcaggacgagcgacagtgtttgctttagctggctcatctgtttctgtgtttccatcgttagtatctggaatggcatcagagatgtccagattgatctccacaggactttgaatttcagaaggtgctttggttataacctcaacatcaggaatgttttccgtgcttgcaggttgtgtgttctcagctgcattttctggtcctagatcttggtattgctgaccttcttgtgtttgtccagtggcttccattgtgtcttcttgcactgtgttatttgcaacacctaaattatggtgctcttctggaactgcctcatcaaaagcaacactgctttgttgcactggtgcttcagtatcaactgcttcagcaacttctctttcttctacagtagattctctttcatctactggttccttgttctgcacttgattatttgcaggtggctcccttgtcgcgtcatattctgccgttgtctcctcagatgctggtatgttgctctgttgggttgtttcttcagtcttttcattcattgggtcatcagtttcttcaacagattccagcacttcaagagcatcagttgctggctcatcagcacgttcagatttaggcacctcttccagcaccacttctgcatccattgcatcatcttgctggttctgctgatcttctactttgactacctctgctgtaggtttggtggtaaatgtattttctggaaagacttcattcttttcaggatgaacgaaagtgtgtgctttagctggttcatctgtttctgtgtttccatcagttgcatctggaatggcatcagagataaccagattgatctccatgggagtttgaattccagagggtgtttcagttataacctcaacatcaagaatatttgtcatgcttgcttgttgtgtgttttcagttgcattttctggtcctaggtcttggtattcctgacctccttttgattgcccactagcttccagcgtgtcttcctgctctgtgttatgtgtagcacctaaattacattgatgttctggaaccgactcctcaaaagcagcactgctttgttgcactgttgcttcagtatcaactgcttcagcaagttctatttcttctaatggttcctggttctgcacttgaatagttacaggtgcttgaattgctggctcatcaacagattcttgattcagcacttcaaaagcatcagttgctggctcatcagcatgttcagatttaggcacctcttcctgcaccatgtttgcatccatcacatctgcttgctggctctgttgagcttctactttgaccacctcttctgtaggttcctcagtggttgcgtcttctagaaatctctctttcttttcaggatgaacaacagagtgtgctttagatggctcatctgtttctgtgtttgcatcaatagtatctggaacagcatcagagttgttgagattcaggtccccaggagtttggactccagaagatgcttcagttacaacctcaacctggggaatgtttgtcatgcttgcaggttgtgtatcctcagttgccttttctggttctagatcctcatcttgctgac

SEQ ID NO: 49362 - DNA, 999 bp, Zea Mays
gtggatttcatgcaacattggacagtcataataatattattaatttgttacagctggctgacatagacaactgatattagtatattttaggcctcatattatctccctggttaatctgcggcagttctcccccgcgagggatgatttggttttccaagattggtgggctaatttggaggccaaggtcccttatgcgctgcgcaaagggattaactcccttgtgatgttggtggcatggtggctttggaagcagcggaataattgtgtgtttgagggggatgctcctagtggcaaccagattattcagaatatcaaagacgacgctcagaggtggtgtctcgcgggtgccaaagatctgggcaccatctggccttagtttaggagcagtttttggctgtttttttttatttttatttttatttttattttcttatatttttttgttgtttctctgtactctggtcttctttagaccattggtatttcttctatcttaatatatctaatgcgcagttctcctgcgcgttttagaaaaaaaaatattatccatagtagtcatgaaccaaagtaggaatagaaaaggaaatgttaacctatacaatcttgtattaactattccttgactttgttcaattactgccataaatatactcaaaaggacatccagtcatgagtgtactgcagcacagaaaaagtgcaagcagactgtcatgcatggcagtcggctaatcgccatttctcgttggcacctgacttactgataaatggctctagagtctagacttctagtactgcagcaagtggtcaaaaagaacatgctgactagtcaaatggcacactgccccggcagtacgcatgtgggcatcctaactggatgagtttgtgtctctccaaaaaccttgtttagttcttacatgaagggttgtaatattgaatgttcctattaagcgtgttagtactgaactatttgttttggcatgctttaagtagacttttgct

SEQ ID NO: 49363 - DNA, 2955 bp, Zea Mays
tccacatgttcgaccgccctggacaaaggaaaacaccaagttggccagcccaagggccacgctggatccacgtcacgcagtccaacttcttgcagccggaaaagaagtccagccgtccatcacctgctacggaattatcaaaacttgaggcagggaacgctaagctgtgcttgtgctgttattatcctaagcatatagctgcgccgaaaggagggatgttatggcgccattggaggatgacatgtctgctttgcaaatcctcgtttccagccgcccccggggtggcgctgtcaagcttgactcagcatggaaaggacgagagtaattcagaaaagaaaaggaggacatctccacttctaaaaaaggcagaggagaggtgcccagttatccgtagatgaaggcaacagctgcggtgaatacaagagctgatggctatcaccagcacctgcaccggccatgctaaagccatgttgtcattttatgccgccagagtcatagccacctacggatttcccgactaatttcgtcatcaggtaacatacatggggctgtcaatccgagcaatttctgccagccctctggaatatttgaggccggtgtgcgccggacccggacagacaaaaaaaaagaaggagaaataccaaagccataccatacgccacacaaacaaactagtctagtagtattgtttgagatgaggagagcatctttcttggaccaacattgccagctccatctggatgcttggacggacgcattttcctatccagcgtgtcacctcgtgctgatgaggcgcgtacgtacctcggaggccagagcgagaccacacgtgaaatacggctggatttggcagatcaggcaggaaccatctccttctcgttctgaaagaaaaaaagaaagaatgggagcgtgggggcctgttctcgtggttgagctgtccctgcgcatggggcgcgtacgtcatgcgggccccgccacgacagtaggtacacaagatcttcctcctccttcctttgttctccacttctcctcctctctacctgctaccagattaggtgaactagattaagagatgggagctatattataatgccaaatggcagagccagccagtcggtgggtaggtgccatgcagtgcaacggtgacatgctgccatatgcagtgcagcaggatcgagctggctcccatgtcggtctctctcacactctcaccccgcaacagcaacgaaggggttttgtcgctttggcttcaaatgacaggaaggaatcagaatccagtcatatcatcaaatacgagagttcctagcttcatttcagtgtgtgctgtgctggtgtggttgcccagtcggtggaagtgtccatgcatgtgtgatgtgtgcagggcagggctgcatgcaggtaagctaggctgctaggtctggataccttgtgatggacatggacaggatagtggtcatcgggcatcatgcgttcatgcatgtatagtataggtgtgtgtgtcgctgtcagcaaccacagtcacacatgtcttcccgtttagaagctggtacggtctacagtgtgtgtgtcagtgtgtgtgagcactactgatctgactgccaaaaagggaggacaaaaaatggtggtggcgcaagtgagatttgcgatgggccgtgctattagcagcatcgtgggcctggcactggcaagcccactagtaacggcccattttccatgcctcggaaaataatgattgcgcgcgtctttgtaagtgtgtccaattaatcttctctgctcttttctttcttgccttcatcatgcctgcctgcctgcctgcctccctccctccctccatgtctatatatttttttatatatgtatatattatacatgcgcgcacacacacacaaactagagtaagagtaaccccttgagctttgtcaaaagaaggcagagctcagaaagcctaaagcctcgcttatttagcctccagtagcacccctctttctttgtgtgctccaacaaagctctcactcactctcatacacacacgcaccctacactccatttccattgcctgcattcttggttgggcaagaacaagcaggcagagaggtgagaggaggaggagaagaagaagaagcagatgatcatggggctgccggaggtgaagcagaagaagaagaagcggctcgtgcatagcacgcgaggggaagatcgtcacgggcaccaccaccaagacggcagcgaggcctgggtgctgggcctgtccggcgccgggatcgccgccctgccgctgcaccagctcaagcccgtacgcgtcgaggtcaaggccggccgccgacggcacgcggcggccaccgaggacggcgaggaggaggaagagcccgtgacgccgaggggggaagggtggaggataccggcggaggcggtggcgtgcccgcccgctcccaagaagcccaggacggcggtgttcatcgtcagagacaacgccgccgccggcggccgccggtgcaactacgacggcggcgacgtggtcgacgagttcttccgcgtgccggcggatttggaggccgtcttcgtcgcccgcgcagccaaggccaactagctagctagctgcattgtgggcaccaaggggaggactgccagtgtgtgtgtatgtgatgcttgagctgctccaggcaggctggctcaagcagagtgtgatgcatcggctgctgctgctgctgagtgagtgtgatagagtgagtgcacttgtacaaattgtcttctagtgcatgttaatgcaattcctaattacgtgaaatggaattgcgttgaaatggaaaaactgtcattattgtttatcctttgtggactgtgatctttctttcttcttttttggtgcgggaggggtagagggggtggcatcattttgggcataatggatagacctttttttaataaaacataaaaatatatgtatttaatctaacc

SEQ ID NO: 49364 - DNA, 2976 bp, Zea Mays
cacatgttcgaccgccctggacaaaggaaaacaccaagttggccagcccaagggccacgctggatccacgtcacgcagtccaacttcttgcagccggaaaagaagtccagccgtccatcacctgctacggaattatcaaaacttgaggcagggaacgctaagctgtgcttgtgctgttattatcctaagcatatagctgcgccgaaaggagggatgttatggcgccattggaggatgacatgtctgctttgcaaatcctcgtttccagccgcccccggggtggcgctgtcaagcttgactcagcatggaaaggacgagagtaattcagaaaagaaaaggaggacatctccacttctaaaaaaggcagaggagaggtgcccagttatccgtagatgaaggcaacagctgcggtgaatacaagagctgatggctatcaccagcacctgcaccggccatgctaaagccatgttgtcattttatgccgccagagtcatagccacctacggatttcccgactaatttcgtcatcaggtaacatacatggggctgtcaatccgagcaatttctgccagccctctggaatatttgaggccggtgtgcgccggacccggacagacaaaaaaaaagaaggagaaataccaaagccataccatacgccacacaaacaaactagtctagtagtattgtttgagatgaggagagcatctttcttggaccaacattgccagctccatctggatgcttggacggacgcattttcctatccagcgtgtcacctcgtgctgatgaggcgcgtacgtacctcggaggccagagcgagaccacacgtgaaatacgaatgttcggtggatcatacataggctggatttggcagatcaggcaggaaccatctccttctcgttctgaaagaaaaaaagaaagaatgggagcgtgggggcctgttctcgtggttgagctgtccctgcgcatggggcgcgtacgtcatgcgggccccgccacgacagtaggtacacaagatcttcctcctccttcctttgttctccacttctcctcctctctacctgctaccagattaggtgaactagattaagagatgggagctatattataatgccaaatggcagagccagccagtcggtgggtaggtgccatgcagtgcaacggtgacatgctgccatatgcagtgcagcaggatcgagctggctcccatgtcggtctctctcacactctcaccccgcaacagcaacgaaggggttttgtcgctttggcttcaaatgacaggaaggaatcagaatccagtcatatcatcaaatacgagagttcctagcttcatttcagtgtgtgctgtgctggtgtggttgcccagtcggtggaagtgtccatgcatgtgtgatgtgtgcagggcagggctgcatgcaggtaagctaggctgctaggtctggataccttgtgatggacatggacaggatagtggtcatcgggcatcatgcgttcatgcatgtatagtataggtgtgtgtgtcgctgtcagcaaccacagtcacacatgtcttcccgtttagaagctggtacggtctacagtgtgtgtgtcagtgtgtgtgagcactactgatctgactgccaaaaagggaggacaaaaaatggtggtggcgcaagtgagatttgcgatgggccgtgctattagcagcatcgtgggcctggcactggcaagcccactagtaacggcccattttccatgcctcggaaaataatgattgcgcgcgtctttgtaagtgtgtccaattaatcttctctgctcttttctttcttgccttcatcatgcctgcctgcctgcctgcctccctccctccctccatgtctatatatttttttatatatgtatatattatacatgcgcgcacacacacacaaactagagtaagagtaaccccttgagctttgtcaaaagaaggcagagctcagaaagcctaaagcctcgcttatttagcctccagtagcacccctctttctttgtgtgctccaacaaagctctcactcactctcatacacacacgcaccctacactccatttccattgcctgcattcttggttgggcaagaacaagcaggcagagaggtgagaggaggaggagaagaagaagaagcagatgatcatggggctgccggaggtgaagcagaagaagaagaagcggctcgtgcatagcacgcgaggggaagatcgtcacgggcaccaccaccaagacggcagcgaggcctgggtgctgggcctgtccggcgccgggatcgccgccctgccgctgcaccagctcaagcccgtacgcgtcgaggtcaaggccggccgccgacggcacgcggcggccaccgaggacggcgaggaggaggaagagcccgtgacgccgaggggggaagggtggaggataccggcggaggcggtggcgtgcccgcccgctcccaagaagcccaggacggcggtgttcatcgtcagagacaacgccgccgccggcggccgccggtgcaactacgacggcggcgacgtggtcgacgagttcttccgcgtgccggcggatttggaggccgtcttcgtcgcccgcgcagccaaggccaactagctagctagctgcattgtgggcaccaaggggaggactgccagtgtgtgtgtatgtgatgcttgagctgctccaggcaggctggctcaagcagagtgtgatgcatcggctgctgctgctgctgagtgagtgtgatagagtgagtgcacttgtacaaattgtcttctagtgcatgttaatgcaattcctaattacgtgaaatggaattgcgttgaaatggaaaaactgtcattattgtttatcctttgtggactgtgatctttctttcttcttttttggtgcgggaggggtagagggggtggcatcattttgggcataatggatagacctttttttaataaaacataaaaatatatgtatttaatctaacc

SEQ ID NO: 49365 - DNA, 1853 bp, Zea Mays
cacatgttcgaccgccctggacaaaggaaaacaccaagttggccagcccaagggccacgctggatccacgtcacgcagtccaacttcttgcagccggaaaagaagtccagccgtccatcacctgctacggaattatcaaaacttgaggcagggaacgctaagctgtgcttgtgctgttattatcctaagcatatagctgcgccgaaaggagggatgttatggcgccattggaggatgacatgtctgctttgcaaatcctcgtttccagccgcccccggggtggcgctgtcaagcttgactcagcatggaaaggacgagagtaattcagaaaagaaaaggaggacatctccacttctaaaaaaggcagaggagaggtgcccagttatccgtagatgaaggcaacagctgcggtgaatacaagagctgatggctatcaccagcacctgcaccggccatgctaaagccatgttgtcattttatgccgccagagtcatagccacctacggatttcccgactaatttcgtcatcaggtaacatacatggggctgtcaatccgagcaatttctgccagccctctggaatatttgaggccggtgtgcgccggacccggacagacaaaaaaaaagaaggagaaataccaaagccataccatacgccacacaaacaaactagtctagtagtattgtttgagatgaggagagcatctttcttggaccaacattgccagctccatctggatgcttggacggacgcattttcctatccagcgtgtcacctcgtgctgatgaggcgcgtacgtacctcggaggccagagcgagaccacacgtgaaatacggctggatttggcagatcaggcaggaaccatctccttctcgttctgaaagaaaaaaagaaagaatgggagcgtgggggcctgttctcgtggttgagctgtccctgcgcatggggcgcgtacgtcatgcgggccccgccacgacagtaggcagagaggtgagaggaggaggagaagaagaagaagcagatgatcatggggctgccggaggtgaagcagaagaagaagaagcggctcgtgcatagcacgcgaggggaagatcgtcacgggcaccaccaccaagacggcagcgaggcctgggtgctgggcctgtccggcgccgggatcgccgccctgccgctgcaccagctcaagcccgtacgcgtcgaggtcaaggccggccgccgacggcacgcggcggccaccgaggacggcgaggaggaggaagagcccgtgacgccgaggggggaagggtggaggataccggcggaggcggtggcgtgcccgcccgctcccaagaagcccaggacggcggtgttcatcgtcagagacaacgccgccgccggcggccgccggtgcaactacgacggcggcgacgtggtcgacgagttcttccgcgtgccggcggatttggaggccgtcttcgtcgcccgcgcagccaaggccaactagctagctagctgcattgtgggcaccaaggggaggactgccagtgtgtgtgtatgtgatgcttgagctgctccaggcaggctggctcaagcagagtgtgatgcatcggctgctgctgctgctgagtgagtgtgatagagtgagtgcacttgtacaaattgtcttctagtgcatgttaatgcaattcctaattacgtgaaatggaattgcgttgaaatggaaaaactgtcattattgtttatcctttgtggactgtgatctttctttcttcttttttggtgcgggaggggtagagggggtggcatcattttgggcataatggatagacctttttttaataaaacataaaaatatatgtatttaatctaacc

SEQ ID NO: 49366 - DNA, 3227 bp, Zea Mays
attgacgtctggatcgacgcaaacagcgacgacgacgcttagcctcatctagctaaaaaataaaaactagttttctaaaattgggttgcttccaaaacagtaagactagatagagaagtagagatgtgaaggaattttgttagttttgaattttgatggatgtttttggcggcgtgtgtattattcaaaatatccccgtcctcccgttccgtccccaaaaccctagggcgccgccgcctctggagcaagctcagggcaaagaccaagatgaaatcgatcctggtttacaccacctgaacaccgcccctcatacttgtcgacggtctacctgatggcagcaggttccggcggtggaggttttctgggcgacgtcaacgacccatggctgaagccgcggctgctccgcgcggtggtcaccgggcgccttccgcagcctggcgccgccgccgagctctcgccgacggaggtcgcctccatcctcgaggtggtacgcactcacggcctactcacggaggatctcccgggccgcggcgcgctggtgaacccgaagctcgccgaggcgtggcgcgccgccgtggacgcctgggttgagcgtgtcgtggcgctggtggagagcgactcgacatacagttgttggttgggtacttgctttctcggtgtgactttccaagagtgcagaaatgatcgatttgcagaatcacactccatttggtttgagaagattctgagtaatttgcagcaatcgtctagctttcaacttgttattgttatttcctgtacttccatgtctgatttatttgtaagattggctaagttttcgaacttaaagaaagagggatcatcctttgctggaagggttgttgaaccagtgctgcggcttttaaatcaaaatggtctagtagctgacgaagcaattgatttgctgaggacagttattaaattgtacccatcctctgtaaaccggcactacaataaagttgaatctgctattgcagcaaagattatgagcaatgtaaaaccatctgagaaatttgcgagaaccttagcattgttaccttctgtccgagtgtccgaggacagttggtcactgatgattcggaggatactgattgtggtaaacaatcttttgaatgatgctttcattgggcttgaagaagaaaagaaaggccatgatattatgctgctgctagttccacctggaactgatcctctaccaacattgggagatgaagtaatgcctggaggcaatgtgcatatcatgaagaaatttcgtgtctttactgttcctaccatttcagctcttacgctttgctgcagcgtgatgctgactagttattatccagttcaggtcaatgttccaattcatgctttgatagctttgatgcgaagagtgctgttagttgatggatcattgcataacaagctgttcccttctacaacttcattgcatcaagagcttatttgttttgatcttccatcgttacattcaactttcttggatttgctgaatgcaactattaaaggcatgcgaagccaactcttacctcatggtgctagtatcatacggcttataacagagtacttcaaaatagcaaagctgcctactttgaggacaaaaacttatagcattttgcagctgttgctgacctccatgggtgttgggacgtctctgcacctgcttgaggcaacagtccgcaatgcagttgctgatctgaatgatgatggtgaaattaacatgactatgatcaacacaaattcatcgcaattgaccaatgaatcatcatcaaaagtttattcgaagaagaggaagcaagaaccacagatgcaaaactcaaccatctcaggttcagagaaagtagcaatcagcccaaggaaaagaaaaggttcttccataccaattacatcaaagggagtggcccctgaaagtacaggagatgttacactatcaactccacattctgtcaaaatagctgcgcttgaaacattggaagttcttctgaatgtgggaggttcattgcggatggatcgctggaggtcagaagtggacatgctcttaattaacgtggctagaagtgcttgcggcatgggagggagttatgagcaaaagccatccacatttggggagccaaacatatcggacttccaacttgcttcgcttaagggcctgctggcatcttttctttcttctcatgcccgtcctccttatttagccaacggaattgaactcttcagaaaagggaagctagagataggcactaaggttgcagagttttgttcacatgctttgcttgctttggatgtccttgtccaccctcgagccctttctctggaaagaacagttcctgcaagctctgggttcaactacactgcacagaaaaaaacagtttttggtgctggtacacaccagatctcaccatttggggaccagcctcaagcaatggaggtcgaagacatgtacgatgactggctaatatccaacaacaatgaaccaccagaggttccagtgaacggtagtgatgctgtggtaagtaaaggtgtgctggtggaggatggaaagcagctcaatcccatagcagaagatccaaaagtcgacccacccagaatcacagacgcagcacaagatgcaccagcatccaccaagactgatgtcaaggtggtcgatgcagctgcagccacagctgccaagccaaacacagcggagaatccttcgagttccaatgctgtcccctctccagtgcgcacaacagattctgattcacgtaagcatgcgtcatttcccgagcaggatagtcctcatgagaacaaaagcgcagccgtccatccaggtgaagcttctgcgactccaggtgttggttcaagccaccaccgccatgaagcacctgaggcccgttcagccagcttcacggaattgtttggttctgagtctggcatcgaatcagagtccgaagacttgatgccagatatcgtcgacggggaccctgactctgactaggtttgccgtcgtcatttgtgacatggcaatggaaattttgtgatgttcctgttttgttttgagcaaattgtacgacattgccggctgacagatgatgcagtatttgattgatagatatagatggagctaaattttgtgatgttcctgttttgttttaccaccaaaaatttgctcaatctgattggatttagaggcacgccggtgaatagaataaagtgcaaacaaagtatttcga

SEQ ID NO: 49367 - DNA, 2982 bp, Zea Mays
aaggaattttgttagttttgaattttgatggatgtttttggcggcgtgtgtattattcaaaatatccccgtcctcccgttccgtccccaaaaccctagggcgccgccgcctctggagcaagctcagggcaaagaccaagatgaaatcgatcctggtttacaccacctgaacaccgcccctcatacttgtcgacggtctacctgatggcagcaggttccggcggtggaggttttctgggcgacgtcaacgacccatggctgaagccgcggctgctccgcgcggtggtcaccgggcgccttccgcagcctggcgccgccgccgagctctcgccgacggaggtcgcctccatcctcgaggtggtacgcactcacggcctactcacggaggatctcccgggccgcggcgcgctggtgaacccgaagctcgccgaggcgtggcgcgccgccgtggacgcctgggttgagcgtgtcgtggcgctggtggagagcgactcgcaatcgtctagctttcaacttgttattgttatttcctgtacttccatgtctgatttatttgtaagattggctaagttttcgaacttaaagaaagagggatcatcctttgctggaagggttgttgaaccagtgctgcggcttttaaatcaaaatggtctagtagctgacgaagcaattgatttgctgaggacagttattaaattgtacccatcctctgtaaaccggcactacaataaagttgaatctgctattgcagcaaagattatgagcaatgtaaaaccatctgagaaatttgcgagaaccttagcattgttaccttctgtccgagtgtccgaggacagttggtcactgatgattcggaggatactgattgtggtaaacaatcttttgaatgatgctttcattgggcttgaagaagaaaagaaaggccatgatattatgctgctgctagttccacctggaactgatcctctaccaacattgggagatgaagtaatgcctggaggcaatgtgcatatcatgaagaaatttcgtgtctttactgttcctaccatttcagctcttacgctttgctgcagcgtgatgctgactagttattatccagttcaggtcaatgttccaattcatgctttgatagctttgatgcgaagagtgctgttagttgatggatcattgcataacaagctgttcccttctacaacttcattgcatcaagagcttatttgttttgatcttccatcgttacattcaactttcttggatttgctgaatgcaactattaaaggcatgcgaagccaactcttacctcatggtgctagtatcatacggcttataacagagtacttcaaaatagcaaagctgcctactttgaggacaaaaacttatagcattttgcagctgttgctgacctccatgggtgttgggacgtctctgcacctgcttgaggcaacagtccgcaatgcagttgctgatctgaatgatgatggtgaaattaacatgactatgatcaacacaaattcatcgcaattgaccaatgaatcatcatcaaaagtttattcgaagaagaggaagcaagaaccacagatgcaaaactcaaccatctcaggttcagagaaagtagcaatcagcccaaggaaaagaaaaggttcttccataccaattacatcaaagggagtggcccctgaaagtacaggagatgttacactatcaactccacattctgtcaaaatagctgcgcttgaaacattggaagttcttctgaatgtgggaggttcattgcggatggatcgctggaggtcagaagtggacatgctcttaattaacgtggctagaagtgcttgcggcatgggagggagttatgagcaaaagccatccacatttggggagccaaacatatcggacttccaacttgcttcgcttaagggcctgctggcatcttttctttcttctcatgcccgtcctccttatttagccaacggaattgaactcttcagaaaagggaagctagagataggcactaaggttgcagagttttgttcacatgctttgcttgctttggatgtccttgtccaccctcgagccctttctctggaaagaacagttcctgcaagctctgggttcaactacactgcacagaaaaaaacagtttttggtgctggtacacaccagatctcaccatttggggaccagcctcaagcaatggaggtcgaagacatgtacgatgactggctaatatccaacaacaatgaaccaccagaggttccagtgaacggtagtgatgctgtggtaagtaaaggtgtgctggtggaggatggaaagcagctcaatcccatagcagaagatccaaaagtcgacccacccagaatcacagacgcagcacaagatgcaccagcatccaccaagactgatgtcaaggtggtcgatgcagctgcagccacagctgccaagccaaacacagcggagaatccttcgagttccaatgctgtcccctctccagtgcgcacaacagattctgattcacgtaagcatgcgtcatttcccgagcaggatagtcctcatgagaacaaaagcgcagccgtccatccaggtgaagcttctgcgactccaggtgttggttcaagccaccaccgccatgaagcacctgaggcccgttcagccagcttcacggaattgtttggttctgagtctggcatcgaatcagagtccgaagacttgatgccagatatcgtcgacggggaccctgactctgactaggtttgccgtcgtcatttgtgacatggcaatggaaattttgtgatgttcctgttttgttttgagcaaattgtacgacattgccggctgacagatgatgcagtatttgattgatagatatagatggagctaaattttgtgatgttcctgttttgttttaccaccaaaaatttgctcaatctgattggatttagaggcacgccggtgaatagaataaagtgcaaacaaagtatttcga

SEQ ID NO: 49368 - DNA, 3011 bp, Zea Mays
gttagttttgaattttgatggatgtttttggcggcgtgtgtattattcaaaatatccccgtcctcccgttccgtccccaaaaccctagggcgccgccgcctctggagcaagctcagggcaaagaccaagatgaaatcgatcctggtttacaccacctgaacaccgcccctcatacttgtcgacggtctacctgatggcagcaggttccggcggtggaggttttctgggcgacgtcaacgacccatggctgaagccgcggctgctccgcgcggtggtcaccgggcgccttccgcagcctggcgccgccgccgagctctcgccgacggaggtcgcctccatcctcgaggtggtacgcactcacggcctactcacggaggatctcccgggccgcggcgcgctggtgaacccgaagctcgccgaggcgtggcgcgccgccgtggacgcctgggttgagcgtgtcgtggcgctggtggagagcgactcgcaatcgtctagctttcaacttgttattgttatttcctgtacttccatgtctgatttatttgtaagattggctaagttttcgaacttaaagaaagagggatcatcctttgctggaagggttgttgaaccagtgctgcggcttttaaatcaaaatggtctagtagctgacgaagcaattgatttgctgaggacagttattaaattgtacccatcctctgtaaaccggcactacaataaagttgaatctgctattgcagcaaagattatgagcaatgtaaaaccatctgagaattccccaagtcttacatatactgtttcaatgctccagaaatttgcgagaaccttagcattgttaccttctgtccgagtgtccgaggacagttggtcactgatgattcggaggatactgattgtggtaaacaatcttttgaatgatgctttcattgggcttgaagaagaaaagaaaggccatgatattatgctgctgctagttccacctggaactgatcctctaccaacattgggagatgaagtaatgcctggaggcaatgtgcatatcatgaagaaatttcgtgtctttactgttcctaccatttcagctcttacgctttgctgcagcgtgatgctgactagttattatccagttcaggtcaatgttccaattcatgctttgatagctttgatgcgaagagtgctgttagttgatggatcattgcataacaagctgttcccttctacaacttcattgcatcaagagcttatttgttttgatcttccatcgttacattcaactttcttggatttgctgaatgcaactattaaaggcatgcgaagccaactcttacctcatggtgctagtatcatacggcttataacagagtacttcaaaatagcaaagctgcctactttgaggacaaaaacttatagcattttgcagctgttgctgacctccatgggtgttgggacgtctctgcacctgcttgaggcaacagtccgcaatgcagttgctgatctgaatgatgatggtgaaattaacatgactatgatcaacacaaattcatcgcaattgaccaatgaatcatcatcaaaagtttattcgaagaagaggaagcaagaaccacagatgcaaaactcaaccatctcaggttcagagaaagtagcaatcagcccaaggaaaagaaaaggttcttccataccaattacatcaaagggagtggcccctgaaagtacaggagatgttacactatcaactccacattctgtcaaaatagctgcgcttgaaacattggaagttcttctgaatgtgggaggttcattgcggatggatcgctggaggtcagaagtggacatgctcttaattaacgtggctagaagtgcttgcggcatgggagggagttatgagcaaaagccatccacatttggggagccaaacatatcggacttccaacttgcttcgcttaagggcctgctggcatcttttctttcttctcatgcccgtcctccttatttagccaacggaattgaactcttcagaaaagggaagctagagataggcactaaggttgcagagttttgttcacatgctttgcttgctttggatgtccttgtccaccctcgagccctttctctggaaagaacagttcctgcaagctctgggttcaactacactgcacagaaaaaaacagtttttggtgctggtacacaccagatctcaccatttggggaccagcctcaagcaatggaggtcgaagacatgtacgatgactggctaatatccaacaacaatgaaccaccagaggttccagtgaacggtagtgatgctgtggtaagtaaaggtgtgctggtggaggatggaaagcagctcaatcccatagcagaagatccaaaagtcgacccacccagaatcacagacgcagcacaagatgcaccagcatccaccaagactgatgtcaaggtggtcgatgcagctgcagccacagctgccaagccaaacacagcggagaatccttcgagttccaatgctgtcccctctccagtgcgcacaacagattctgattcacgtaagcatgcgtcatttcccgagcaggatagtcctcatgagaacaaaagcgcagccgtccatccaggtgaagcttctgcgactccaggtgttggttcaagccaccaccgccatgaagcacctgaggcccgttcagccagcttcacggaattgtttggttctgagtctggcatcgaatcagagtccgaagacttgatgccagatatcgtcgacggggaccctgactctgactaggtttgccgtcgtcatttgtgacatggcaatggaaattttgtgatgttcctgttttgttttgagcaaattgtacgacattgccggctgacagatgatgcagtatttgattgatagatatagatggagctaaattttgtgatgttcctgttttgttttaccaccaaaaatttgctcaatctgattggatttagaggcacgccggtgaatagaataaagtgcaaacaaagtatttcga

SEQ ID NO: 49369 - DNA, 2992 bp, Zea Mays
gtgtattattcaaaatatccccgtcctcccgttccgtccccaaaaccctagggcgccgccgcctctggagcaagctcagggcaaagaccaagatgaaatcgatcctggtttacaccacctgaacaccgcccctcatacttgtcgacggtctacctgatggcagcaggttccggcggtggaggttttctgggcgacgtcaacgacccatggctgaagccgcggctgctccgcgcggtggtcaccgggcgccttccgcagcctggcgccgccgccgagctctcgccgacggaggtcgcctccatcctcgaggtggtacgcactcacggcctactcacggaggatctcccgggccgcggcgcgctggtgaacccgaagctcgccgaggcgtggcgcgccgccgtggacgcctgggttgagcgtgtcgtggcgctggtggagagcgactcgcaatcgtctagctttcaacttgttattgttatttcctgtacttccatgtctgatttatttgtaagattggctaagttttcgaacttaaagaaagagggatcatcctttgctggaagggttgttgaaccagtgctgcggcttttaaatcaaaatggtctagtagctgtatggtctactcttttcattcttatggcttatttgtttgagttcaaccactcaatggacgaagcaattgatttgctgaggacagttattaaattgtacccatcctctgtaaaccggcactacaataaagttgaatctgctattgcagcaaagattatgagcaatgtaaaaccatctgagaaatttgcgagaaccttagcattgttaccttctgtccgagtgtccgaggacagttggtcactgatgattcggaggatactgattgtggtaaacaatcttttgaatgatgctttcattgggcttgaagaagaaaagaaaggccatgatattatgctgctgctagttccacctggaactgatcctctaccaacattgggagatgaagtaatgcctggaggcaatgtgcatatcatgaagaaatttcgtgtctttactgttcctaccatttcagctcttacgctttgctgcagcgtgatgctgactagttattatccagttcaggtcaatgttccaattcatgctttgatagctttgatgcgaagagtgctgttagttgatggatcattgcataacaagctgttcccttctacaacttcattgcatcaagagcttatttgttttgatcttccatcgttacattcaactttcttggatttgctgaatgcaactattaaaggcatgcgaagccaactcttacctcatggtgctagtatcatacggcttataacagagtacttcaaaatagcaaagctgcctactttgaggacaaaaacttatagcattttgcagctgttgctgacctccatgggtgttgggacgtctctgcacctgcttgaggcaacagtccgcaatgcagttgctgatctgaatgatgatggtgaaattaacatgactatgatcaacacaaattcatcgcaattgaccaatgaatcatcatcaaaagtttattcgaagaagaggaagcaagaaccacagatgcaaaactcaaccatctcaggttcagagaaagtagcaatcagcccaaggaaaagaaaaggttcttccataccaattacatcaaagggagtggcccctgaaagtacaggagatgttacactatcaactccacattctgtcaaaatagctgcgcttgaaacattggaagttcttctgaatgtgggaggttcattgcggatggatcgctggaggtcagaagtggacatgctcttaattaacgtggctagaagtgcttgcggcatgggagggagttatgagcaaaagccatccacatttggggagccaaacatatcggacttccaacttgcttcgcttaagggcctgctggcatcttttctttcttctcatgcccgtcctccttatttagccaacggaattgaactcttcagaaaagggaagctagagataggcactaaggttgcagagttttgttcacatgctttgcttgctttggatgtccttgtccaccctcgagccctttctctggaaagaacagttcctgcaagctctgggttcaactacactgcacagaaaaaaacagtttttggtgctggtacacaccagatctcaccatttggggaccagcctcaagcaatggaggtcgaagacatgtacgatgactggctaatatccaacaacaatgaaccaccagaggttccagtgaacggtagtgatgctgtggtaagtaaaggtgtgctggtggaggatggaaagcagctcaatcccatagcagaagatccaaaagtcgacccacccagaatcacagacgcagcacaagatgcaccagcatccaccaagactgatgtcaaggtggtcgatgcagctgcagccacagctgccaagccaaacacagcggagaatccttcgagttccaatgctgtcccctctccagtgcgcacaacagattctgattcacgtaagcatgcgtcatttcccgagcaggatagtcctcatgagaacaaaagcgcagccgtccatccaggtgaagcttctgcgactccaggtgttggttcaagccaccaccgccatgaagcacctgaggcccgttcagccagcttcacggaattgtttggttctgagtctggcatcgaatcagagtccgaagacttgatgccagatatcgtcgacggggaccctgactctgactaggtttgccgtcgtcatttgtgacatggcaatggaaattttgtgatgttcctgttttgttttgagcaaattgtacgacattgccggctgacagatgatgcagtatttgattgatagatatagatggagctaaattttgtgatgttcctgttttgttttaccaccaaaaatttgctcaatctgattggatttagaggcacgccggtgaatagaataaagtgcaaacaaagtatttcga

SEQ ID NO: 49370 - DNA, 2951 bp, Zea Mays
gtattattcaaaatatccccgtcctcccgttccgtccccaaaaccctagggcgccgccgcctctggagcaagctcagggcaaagaccaagatgaaatcgatcctggtttacaccacctgaacaccgcccctcatacttgtcgacggtctacctgatggcagcaggttccggcggtggaggttttctgggcgacgtcaacgacccatggctgaagccgcggctgctccgcgcggtggtcaccgggcgccttccgcagcctggcgccgccgccgagctctcgccgacggaggtcgcctccatcctcgaggtggtacgcactcacggcctactcacggaggatctcccgggccgcggcgcgctggtgaacccgaagctcgccgaggcgtggcgcgccgccgtggacgcctgggttgagcgtgtcgtggcgctggtggagagcgactcgacatacagttgttggttgggtacttgctttctcggtgtgactttccaagagtgcagaaatgatcgatttgcagaatcacactccatttggtttgagaagattctgagtaatttgcagcaatcgtctagctttcaacttgttattgttatttcctgtacttccatgtctgatttatttgtaagattggctaagttttcgaacttaaagaaagagggatcatcctttgctggaagggttgttgaaccagtgctgcggcttttaaatcaaaatggtctagtagctgacgaagcaattgatttgctgaggacagttattaaattgtacccatcctctgtaaaccggcactacaataaagttgaatctgctattgcagcaaagattatgagcaatgtaaaaccatctgagaaatttgcgagaaccttagcattgttaccttctgtccgagtgtccgaggacagttggtcactgatgattcggaggatactgattgtggtaaacaatcttttgaatgatgctttcattgggcttgaagaagaaaagaaaggccatgatattatgctgctgctagttccacctggaactgatcctctaccaacattgggagatgaagtaatgcctggaggcaatgtgcatatcatgaagaaatttcgtgtctttactgttcctaccatttcagctcttacgctttgctgcagcgtgatgctgactagttattatccagttcaggttttgtcaaaatcagaacatttctgtatatcacctaatgctcataacttactagtgtaagctttgatgcgaagagtgctgttagttgatggatcattgcataacaagctgttcccttctacaacttcattgcatcaagagcttatttgttttgatcttccatcgttacattcaactttcttggatttgctgaatgcaactattaaaggcatgcgaagccaactcttacctcatggtgctagtatcatacggcttataacagagtacttcaaaatagcaaagctgcctactttgaggacaaaaacttatagcattttgcagctgttgctgacctccatgggtgttgggacgtctctgcacctgcttgaggcaacagtccgcaatgcagttgctgatctgaatgatgatggtgaaattaacatgactatgatcaacacaaattcatcgcaattgaccaatgaatcatcatcaaaagtttattcgaagaagaggaagcaagaaccacagatgcaaaactcaaccatctcaggttcagagaaagtagcaatcagcccaaggaaaagaaaaggttcttccataccaattacatcaaagggagtggcccctgaaagtacaggagatgttacactatcaactccacattctgtcaaaatagctgcgcttgaaacatttggggagccaaacatatcggacttccaacttgcttcgcttaagggcctgctggcatcttttctttcttctcatgcccgtcctccttatttagccaacggaattgaactcttcagaaaagggaagctagagataggcactaaggttgcagagttttgttcacatgctttgcttgctttggatgtccttgtccaccctcgagccctttctctggaaagaacagttcctgcaagctctgggttcaactacactgcacagaaaaaaacagtttttggtgctggtacacaccagatctcaccatttggggaccagcctcaagcaatggaggtcgaagacatgtacgatgactggctaatatccaacaacaatgaaccaccagaggttccagtgaacggtagtgatgctgtggtaagtaaaggtgtgctggtggaggatggaaagcagctcaatcccatagcagaagatccaaaagtcgacccacccagaatcacagacgcagcacaagatgcaccagcatccaccaagactgatgtcaaggtggtcgatgcagctgcagccacagctgccaagccaaacacagcggagaatccttcgagttccaatgctgtcccctctccagtgcgcacaacagattctgattcacgtaagcatgcgtcatttcccgagcaggatagtcctcatgagaacaaaagcgcagccgtccatccaggtgaagcttctgcgactccaggtgttggttcaagccaccaccgccatgaagcacctgaggcccgttcagccagcttcacggaattgtttggttctgagtctggcatcgaatcagagtccgaagacttgatgccagatatcgtcgacggggaccctgactctgactaggtttgccgtcgtcatttgtgacatggcaatggaaattttgtgatgttcctgttttgttttgagcaaattgtacgacattgccggctgacagatgatgcagtatttgattgatagatatagatggagctaaattttgtgatgttcctgttttgttttaccaccaaaaatttgctcaatctgattggatttagaggcacgccggtgaatagaataaagtgcaaacaaagtatttcga

SEQ ID NO: 49371 - DNA, 3042 bp, Zea Mays
gtattattcaaaatatccccgtcctcccgttccgtccccaaaaccctagggcgccgccgcctctggagcaagctcagggcaaagaccaagatgaaatcgatcctggtttacaccacctgaacaccgcccctcatacttgtcgacggtctacctgatggcagcaggttccggcggtggaggttttctgggcgacgtcaacgacccatggctgaagccgcggctgctccgcgcggtggtcaccgggcgccttccgcagcctggcgccgccgccgagctctcgccgacggaggtcgcctccatcctcgaggtggtacgcactcacggcctactcacggaggatctcccgggccgcggcgcgctggtgaacccgaagctcgccgaggcgtggcgcgccgccgtggacgcctgggttgagcgtgtcgtggcgctggtggagagcgactcgttgttggttgggtacttgctttctcggtgtgactttccaagagtgcagaaatgatcgatttgcagaatcacactccatttggtttgagaagattctgagtaatttgcagcaatcgtctagctttcaacttgttattgttatttcctgtacttccatgtctgatttatttgtaagattggctaagttttcgaacttaaagaaagagggatcatcctttgctggaagggttgttgaaccagtgctgcggcttttaaatcaaaatggtctagtagctgacgaagcaattgatttgctgaggacagttattaaattgtacccatcctctgtaaaccggcactacaataaagttgaatctgctattgcagcaaagattatgagcaatgtaaaaccatctgagaaatttgcgagaaccttagcattgttaccttctgtccgagtgtccgaggacagttggtcactgatgattcggaggatactgattgtggtaaacaatcttttgaatgatgctttcattgggcttgaagaagaaaagaaaggccatgatattatgctgctgctagttccacctggaactgatcctctaccaacattgggagatgaagtaatgcctggaggcaatgtgcatatcatgaagaaatttcgtgtctttactgttcctaccatttcagctcttacgctttgctgcagcgtgatgctgactagttattatccagttcaggtcaatgttccaattcatgctttgatagctttgatgcgaagagtgctgttagttgatggatcattgcataacaagctgttcccttctacaacttcattgcatcaagagcttatttgttttgatcttccatcgttacattcaactttcttggatttgctgaatgcaactattaaaggcatgcgaagccaactcttacctcatggtgctagtatcatacggcttataacagagtacttcaaaatagcaaagctgcctactttgaggacaaaaacttatagcattttgcagctgttgctgacctccatgggtgttgggacgtctctgcacctgcttgaggcaacagtccgcaatgcagttgctgatctgaatgatgatggtgaaattaacatgactatgatcaacacaaattcatcgcaattgaccaatgaatcatcatcaaaagtttattcgaagaagaggaagcaagaaccacagatgcaaaactcaaccatctcaggttcagagaaagtagcaatcagcccaaggaaaagaaaaggttcttccataccaattacatcaaagggagtggcccctgaaagtacaggagatgttacactatcaactccacattctgtcaaaatagctgcgcttgaaacattggaagttcttctgaatgtgggaggttcattgcggatggatcgctggaggtcagaagtggacatgctcttaattaacgtggctagaagtgcttgcggcatgggagggagttatgagcaaaagccatccacatttggggagccaaacatatcggacttccaacttgcttcgcttaagggcctgctggcatcttttctttcttctcatgcccgtcctccttatttagccaacggaattgaactcttcagaaaagggaagctagagataggcactaaggttgcagagttttgttcacatgctttgcttgctttggatgtccttgtccaccctcgagccctttctctggaaagaacagttcctgcaagctctgggttcaactacactgcacagaaaaaaacagtttttggtgctggtacacaccagatctcaccatttggggaccagcctcaagcaatggaggtcgaagacatgtacgatgactggctaatatccaacaacaatgaaccaccagaggttccagtgaacggtagtgatgctgtggtaagtaaaggtgtgctggtggaggatggaaagcagctcaatcccatagcagaagatccaaaagtcgacccacccagaatcacagacgcagcacaagatgcaccagcatccaccaagactgatgtcaaggtggtcgatgcagctgcagccacagctgccaagccaaacacagcggagaatccttcgagttccaatgctgtcccctctccagtgcgcacaacagattctgattcacgtaagcatgcgtcatttcccgagcaggatagtcctcatgagaacaaaagcgcagccgtccatccaggtgaagcttctgcgactccaggtgttggttcaagccaccaccgccatgaagcacctgaggcccgttcagccagcttcacggaattgtttggttctgagtctggcatcgaatcagagtccgaagacttgatgccagatatcgtcgacggggaccctgactctgactaggtttgccgtcgtcatttgtgacatggcaatggaaattttgtgatgttcctgttttgttttgagcaaattgtacgacattgccggctgacagatgatgcagtatttgattgatagatatagatggagctaaattttgtgatgttcctgttttgttttaccaccaaaaatttgctcaatctgattggatttagaggcacgccggtgaatagaataaagtgcaaacaaagtatttcga

SEQ ID NO: 49372 - DNA, 3089 bp, Zea Mays
gtattattcaaaatatccccgtcctcccgttccgtccccaaaaccctagggcgccgccgcctctggagcaagctcagggcaaagaccaagatgaaatcgatcctggtttacaccacctgaacaccgcccctcatacttgtcgacggtctacctgatggcagcaggttccggcggtggaggttttctgggcgacgtcaacgacccatggctgaagccgcggctgctccgcgcggtggtcaccgggcgccttccgcagcctggcgccgccgccgagctctcgccgacggaggtcgcctccatcctcgaggtggtacgcactcacggcctactcacggaggatctcccgggccgcggcgcgctggtgaacccgaagctcgccgaggcgtggcgcgccgccgtggacgcctgggttgagcgtgtcgtggcgctggtggagagcgactcgacatacagttgttggttgggtacttgctttctcggtgtgactttccaagagtgcagaaatgatcgatttgcagaatcacactccatttggtttgagaagattctgagtaatttgcagcaatcgtctagctttcaacttgttattgttatttcctgtacttccatgtctgatttatttgtaagattggctaagttttcgaacttaaagaaagagggatcatcctttgctggaagggttgttgaaccagtgctgcggcttttaaatcaaaatggtctagtagctgacgaagcaattgatttgctgaggacagttattaaattgtacccatcctctgtaaaccggcactacaataaagttgaatctgctattgcagcaaagattatgagcaatgtaaaaccatctgagaattccccaagtcttacatatactgtttcaatgctccagaaatttgcgagaaccttagcattgttaccttctgtccgagtgtccgaggacagttggtcactgatgattcggaggatactgattgtggtaaacaatcttttgaatgatgctttcattgggcttgaagaagaaaagaaaggccatgatattatgctgctgctagttccacctggaactgatcctctaccaacattgggagatgaagtaatgcctggaggcaatgtgcatatcatgaagaaatttcgtgtctttactgttcctaccatttcagctcttacgctttgctgcagcgtgatgctgactagttattatccagttcaggtcaatgttccaattcatgctttgatagctttgatgcgaagagtgctgttagttgatggatcattgcataacaagctgttcccttctacaacttcattgcatcaagagcttatttgttttgatcttccatcgttacattcaactttcttggatttgctgaatgcaactattaaaggcatgcgaagccaactcttacctcatggtgctagtatcatacggcttataacagagtacttcaaaatagcaaagctgcctactttgaggacaaaaacttatagcattttgcagctgttgctgacctccatgggtgttgggacgtctctgcacctgcttgaggcaacagtccgcaatgcagttgctgatctgaatgatgatggtgaaattaacatgactatgatcaacacaaattcatcgcaattgaccaatgaatcatcatcaaaagtttattcgaagaagaggaagcaagaaccacagatgcaaaactcaaccatctcaggttcagagaaagtagcaatcagcccaaggaaaagaaaaggttcttccataccaattacatcaaagggagtggcccctgaaagtacaggagatgttacactatcaactccacattctgtcaaaatagctgcgcttgaaacattggaagttcttctgaatgtgggaggttcattgcggatggatcgctggaggtcagaagtggacatgctcttaattaacgtggctagaagtgcttgcggcatgggagggagttatgagcaaaagccatccacatttggggagccaaacatatcggacttccaacttgcttcgcttaagggcctgctggcatcttttctttcttctcatgcccgtcctccttatttagccaacggaattgaactcttcagaaaagggaagctagagataggcactaaggttgcagagttttgttcacatgctttgcttgctttggatgtccttgtccaccctcgagccctttctctggaaagaacagttcctgcaagctctgggttcaactacactgcacagaaaaaaacagtttttggtgctggtacacaccagatctcaccatttggggaccagcctcaagcaatggaggtcgaagacatgtacgatgactggctaatatccaacaacaatgaaccaccagaggttccagtgaacggtagtgatgctgtggtaagtaaaggtgtgctggtggaggatggaaagcagctcaatcccatagcagaagatccaaaagtcgacccacccagaatcacagacgcagcacaagatgcaccagcatccaccaagactgatgtcaaggtggtcgatgcagctgcagccacagctgccaagccaaacacagcggagaatccttcgagttccaatgctgtcccctctccagtgcgcacaacagattctgattcacgtaagcatgcgtcatttcccgagcaggatagtcctcatgagaacaaaagcgcagccgtccatccaggtgaagcttctgcgactccaggtgttggttcaagccaccaccgccatgaagcacctgaggcccgttcagccagcttcacggaattgtttggttctgagtctggcatcgaatcagagtccgaagacttgatgccagatatcgtcgacggggaccctgactctgactaggtttgccgtcgtcatttgtgacatggcaatggaaattttgtgatgttcctgttttgttttgagcaaattgtacgacattgccggctgacagatgatgcagtatttgattgatagatatagatggagctaaattttgtgatgttcctgttttgttttaccaccaaaaatttgctcaatctgattggatttagaggcacgccggtgaatagaataaagtgcaaacaaagtatttcga

SEQ ID NO: 49373 - DNA, 2989 bp, Zea Mays
gtattattcaaaatatccccgtcctcccgttccgtccccaaaaccctagggcgccgccgcctctggagcaagctcagggcaaagaccaagatgaaatcgatcctggtttacaccacctgaacaccgcccctcatacttgtcgacggtctacctgatggcagcaggttccggcggtggaggttttctgggcgacgtcaacgacccatggctgaagccgcggctgctccgcgcggtggtcaccgggcgccttccgcagcctggcgccgccgccgagctctcgccgacggaggtcgcctccatcctcgaggtggtacgcactcacggcctactcacggaggatctcccgggccgcggcgcgctggtgaacccgaagctcgccgaggcgtggcgcgccgccgtggacgcctgggttgagcgtgtcgtggcgctggtggagagcgactcgacatacagttgttggttgggtacttgctttctcggtgtgactttccaagagtgcagaaatgatcgatttgcagaatcacactccatttggtttgagaagattctgagtaatttgcagcaatcgtctagctttcaacttgttattgttatttcctgtacttccatgtctgatttatttgtaaggacgaagcaattgatttgctgaggacagttattaaattgtacccatcctctgtaaaccggcactacaataaagttgaatctgctattgcagcaaagattatgagcaatgtaaaaccatctgagaattccccaagtcttacatatactgtttcaatgctccagaaatttgcgagaaccttagcattgttaccttctgtccgagtgtccgaggacagttggtcactgatgattcggaggatactgattgtggtaaacaatcttttgaatgatgctttcattgggcttgaagaagaaaagaaaggccatgatattatgctgctgctagttccacctggaactgatcctctaccaacattgggagatgaagtaatgcctggaggcaatgtgcatatcatgaagaaatttcgtgtctttactgttcctaccatttcagctcttacgctttgctgcagcgtgatgctgactagttattatccagttcaggtcaatgttccaattcatgctttgatagctttgatgcgaagagtgctgttagttgatggatcattgcataacaagctgttcccttctacaacttcattgcatcaagagcttatttgttttgatcttccatcgttacattcaactttcttggatttgctgaatgcaactattaaaggcatgcgaagccaactcttacctcatggtgctagtatcatacggcttataacagagtacttcaaaatagcaaagctgcctactttgaggacaaaaacttatagcattttgcagctgttgctgacctccatgggtgttgggacgtctctgcacctgcttgaggcaacagtccgcaatgcagttgctgatctgaatgatgatggtgaaattaacatgactatgatcaacacaaattcatcgcaattgaccaatgaatcatcatcaaaagtttattcgaagaagaggaagcaagaaccacagatgcaaaactcaaccatctcaggttcagagaaagtagcaatcagcccaaggaaaagaaaaggttcttccataccaattacatcaaagggagtggcccctgaaagtacaggagatgttacactatcaactccacattctgtcaaaatagctgcgcttgaaacattggaagttcttctgaatgtgggaggttcattgcggatggatcgctggaggtcagaagtggacatgctcttaattaacgtggctagaagtgcttgcggcatgggagggagttatgagcaaaagccatccacatttggggagccaaacatatcggacttccaacttgcttcgcttaagggcctgctggcatcttttctttcttctcatgcccgtcctccttatttagccaacggaattgaactcttcagaaaagggaagctagagataggcactaaggttgcagagttttgttcacatgctttgcttgctttggatgtccttgtccaccctcgagccctttctctggaaagaacagttcctgcaagctctgggttcaactacactgcacagaaaaaaacagtttttggtgctggtacacaccagatctcaccatttggggaccagcctcaagcaatggaggtcgaagacatgtacgatgactggctaatatccaacaacaatgaaccaccagaggttccagtgaacggtagtgatgctgtggtaagtaaaggtgtgctggtggaggatggaaagcagctcaatcccatagcagaagatccaaaagtcgacccacccagaatcacagacgcagcacaagatgcaccagcatccaccaagactgatgtcaaggtggtcgatgcagctgcagccacagctgccaagccaaacacagcggagaatccttcgagttccaatgctgtcccctctccagtgcgcacaacagattctgattcacgtaagcatgcgtcatttcccgagcaggatagtcctcatgagaacaaaagcgcagccgtccatccaggtgaagcttctgcgactccaggtgttggttcaagccaccaccgccatgaagcacctgaggcccgttcagccagcttcacggaattgtttggttctgagtctggcatcgaatcagagtccgaagacttgatgccagatatcgtcgacggggaccctgactctgactaggtttgccgtcgtcatttgtgacatggcaatggaaattttgtgatgttcctgttttgttttgagcaaattgtacgacattgccggctgacagatgatgcagtatttgattgatagatatagatggagctaaattttgtgatgttcctgttttgttttaccaccaaaaatttgctcaatctgattggatttagaggcacgccggtgaatagaataaagtgcaaacaaagtatttcga

SEQ ID NO: 49374 - DNA, 2952 bp, Zea Mays
aaaatatccccgtcctcccgttccgtccccaaaaccctagggcgccgccgcctctggagcaagctcagggcaaagaccaagatgaaatcgatcctggtttacaccacctgaacaccgcccctcatacttgtcgacggtctacctgatggcagcaggttccggcggtggaggttttctgggcgacgtcaacgacccatggctgaagccgcggctgctccgcgcggtggtcaccgggcgccttccgcagcctggcgccgccgccgagctctcgccgacggaggtcgcctccatcctcgaggtggtacgcactcacggcctactcacggaggatctcccgggccgcggcgcgctggtgaacccgaagctcgccgaggcgtggcgcgccgccgtggacgcctgggttgagcgtgtcgtggcgctggtggagagcgactcgcaatcgtctagctttcaacttgttattgttatttcctgtacttccatgtctgatttatttgtaagattggctaagttttcgaacttaaagaaagagggatcatcctttgctggaagggttgttgaaccagtgctgcggcttttaaatcaaaatggacgaagcaattgatttgctgaggacagttattaaattgtacccatcctctgtaaaccggcactacaataaagttgaatctgctattgcagcaaagattatgagcaatgtaaaaccatctgagaattccccaagtcttacatatactgtttcaatgctccagaaatttgcgagaaccttagcattgttaccttctgtccgagtgtccgaggacagttggtcactgatgattcggaggatactgattgtggtaaacaatcttttgaatgatgctttcattgggcttgaagaagaaaagaaaggccatgatattatgctgctgctagttccacctggaactgatcctctaccaacattgggagatgaagtaatgcctggaggcaatgtgcatatcatgaagaaatttcgtgtctttactgttcctaccatttcagctcttacgctttgctgcagcgtgatgctgactagttattatccagttcaggtcaatgttccaattcatgctttgatagctttgatgcgaagagtgctgttagttgatggatcattgcataacaagctgttcccttctacaacttcattgcatcaagagcttatttgttttgatcttccatcgttacattcaactttcttggatttgctgaatgcaactattaaaggcatgcgaagccaactcttacctcatggtgctagtatcatacggcttataacagagtacttcaaaatagcaaagctgcctactttgaggacaaaaacttatagcattttgcagctgttgctgacctccatgggtgttgggacgtctctgcacctgcttgaggcaacagtccgcaatgcagttgctgatctgaatgatgatggtgaaattaacatgactatgatcaacacaaattcatcgcaattgaccaatgaatcatcatcaaaagtttattcgaagaagaggaagcaagaaccacagatgcaaaactcaaccatctcaggttcagagaaagtagcaatcagcccaaggaaaagaaaaggttcttccataccaattacatcaaagggagtggcccctgaaagtacaggagatgttacactatcaactccacattctgtcaaaatagctgcgcttgaaacattggaagttcttctgaatgtgggaggttcattgcggatggatcgctggaggtcagaagtggacatgctcttaattaacgtggctagaagtgcttgcggcatgggagggagttatgagcaaaagccatccacatttggggagccaaacatatcggacttccaacttgcttcgcttaagggcctgctggcatcttttctttcttctcatgcccgtcctccttatttagccaacggaattgaactcttcagaaaagggaagctagagataggcactaaggttgcagagttttgttcacatgctttgcttgctttggatgtccttgtccaccctcgagccctttctctggaaagaacagttcctgcaagctctgggttcaactacactgcacagaaaaaaacagtttttggtgctggtacacaccagatctcaccatttggggaccagcctcaagcaatggaggtcgaagacatgtacgatgactggctaatatccaacaacaatgaaccaccagaggttccagtgaacggtagtgatgctgtggtaagtaaaggtgtgctggtggaggatggaaagcagctcaatcccatagcagaagatccaaaagtcgacccacccagaatcacagacgcagcacaagatgcaccagcatccaccaagactgatgtcaaggtggtcgatgcagctgcagccacagctgccaagccaaacacagcggagaatccttcgagttccaatgctgtcccctctccagtgcgcacaacagattctgattcacgtaagcatgcgtcatttcccgagcaggatagtcctcatgagaacaaaagcgcagccgtccatccaggtgaagcttctgcgactccaggtgttggttcaagccaccaccgccatgaagcacctgaggcccgttcagccagcttcacggaattgtttggttctgagtctggcatcgaatcagagtccgaagacttgatgccagatatcgtcgacggggaccctgactctgactaggtttgccgtcgtcatttgtgacatggcaatggaaattttgtgatgttcctgttttgttttgagcaaattgtacgacattgccggctgacagatgatgcagtatttgattgatagatatagatggagctaaattttgtgatgttcctgttttgttttaccaccaaaaatttgctcaatctgattggatttagaggcacgccggtgaatagaataaagtgcaaacaaagtatttcga

SEQ ID NO: 49375 - DNA, 3102 bp, Zea Mays
cccgtcctcccgttccgtccccaaaaccctagggcgccgccgcctctggagcaagctcagggcaaagaccaagatgaaatcgatcctggtttacaccacctgaacaccgcccctcatacttgtcgacggtctacctgatggcagcaggttccggcggtggaggttttctgggcgacgtcaacgacccatggctgaagccgcggctgctccgcgcggtggtcaccgggcgccttccgcagcctggcgccgccgccgagctctcgccgacggaggtcgcctccatcctcgaggtggtacgcactcacggcctactcacggaggatctcccgggccgcggcgcgctggtgaacccgaagctcgccgaggcgtggcgcgccgccgtggacgcctgggttgagcgtgtcgtggcgctggtggagagcgactcgacatacagttgttggttgggtacttgctttctcggtgtgactttccaagagtgcagaaatgatcgatttgcagaatcacactccatttggtttgagaagattctgagtaatttgcagcaatcgtctagctttcaacttgttattgttatttcctgtacttccatgtctgatttatttgtaagattggctaagttttcgaacttaaagaaagagggatcatcctttgctggaagggttgttgaaccagtgctgcggcttttaaatcaaaatggtctagtagctgacgaagcaattgatttgctgaggacagttattaaattgtacccatcctctgtaaaccggcactacaataaagttgaatctgctattgcagcaaagattatgagcaatgtaaaaccatctgagaattccccaagtcttacatatactgtttcaatgctccagaaatttgcgagaaccttagcattgttaccttctgtccgagtgtccgaggacagttggtcactgatgattcggaggatactgattgtggtaaacaatcttttgaatgatgctttcattgggcttgaagaagaaaagaaaggccatgatattatgctgctgctagttccacctggaactgatcctctaccaacattgggagatgaagtaatgcctggaggcaatgtgcatatcatgaagaaatttcgtgtctttactgttcctaccatttcagctcttacgctttgctgcagcgtgatgctgactagttattatccagttcaggttttgtcaaaatcagaacatttctgtatatcacctaatgctcataacttactagtgtaagctttgatgcgaagagtgctgttagttgatggatcattgcataacaagctgttcccttctacaacttcattgcatcaagagcttatttgttttgatcttccatcgttacattcaactttcttggatttgctgaatgcaactattaaaggcatgcgaagccaactcttacctcatggtgctagtatcatacggcttataacagagtacttcaaaatagcaaagctgcctactttgaggacaaaaacttatagcattttgcagctgttgctgacctccatgggtgttgggacgtctctgcacctgcttgaggcaacagtccgcaatgcagttgctgatctgaatgatgatggtgaaattaacatgactatgatcaacacaaattcatcgcaattgaccaatgaatcatcatcaaaagtttattcgaagaagaggaagcaagaaccacagatgcaaaactcaaccatctcaggttcagagaaagtagcaatcagcccaaggaaaagaaaaggttcttccataccaattacatcaaagggagtggcccctgaaagtacaggagatgttacactatcaactccacattctgtcaaaatagctgcgcttgaaacattggaagttcttctgaatggaggttcattgcggatggatcgctggaggtcagaagtggacatgctcttaattaacgtggctagaagtgcttgcggcatgggagggagttatgagcaaaagccatccacatttggggagccaaacatatcggacttccaacttgcttcgcttaagggcctgctggcatcttttctttcttctcatgcccgtcctccttatttagccaacggaattgaactcttcagaaaagggaagctagagataggcactaaggttgcagagttttgttcacatgctttgcttgctttggatgtccttgtccaccctcgagccctttctctggaaagaacagttcctgcaagctctgggttcaactacactgcacagaaaaaaacagtttttggtgctggtacacaccagatctcaccatttggggaccagcctcaagcaatggaggtcgaagacatgtacgatgactggctaatatccaacaacaatgaaccaccagaggttccagtgaacggtagtgatgctgtggtaagtaaaggtgtgctggtggaggatggaaagcagctcaatcccatagcagaagatccaaaagtcgacccacccagaatcacagacgcagcacaagatgcaccagcatccaccaagactgatgtcaaggtggtcgatgcagctgcagccacagctgccaagccaaacacagcggagaatccttcgagttccaatgctgtcccctctccagtgcgcacaacagattctgattcacgtaagcatgcgtcatttcccgagcaggatagtcctcatgagaacaaaagcgcagccgtccatccaggtgaagcttctgcgactccaggtgttggttcaagccaccaccgccatgaagcacctgaggcccgttcagccagcttcacggaattgtttggttctgagtctggcatcgaatcagagtccgaagacttgatgccagatatcgtcgacggggaccctgactctgactaggtttgccgtcgtcatttgtgacatggcaatggaaattttgtgatgttcctgttttgttttgagcaaattgtacgacattgccggctgacagatgatgcagtatttgattgatagatatagatggagctaaattttgtgatgttcctgttttgttttaccaccaaaaatttgctcaatctgattggatttagaggcacgccggtgaatagaataaagtgcaaacaaagtatttcga

SEQ ID NO: 49376 - DNA, 3078 bp, Zea Mays
agggcgccgccgcctctggagcaagctcagggcaaagaccaagatgaaatcgatcctggtttacaccacctgaacaccgcccctcatacttgtcgacggtctacctgatggcagcaggttccggcggtggaggttttctgggcgacgtcaacgacccatggctgaagccgcggctgctccgcgcggtggtcaccgggcgccttccgcagcctggcgccgccgccgagctctcgccgacggaggtcgcctccatcctcgaggtggtacgcactcacggcctactcacggaggatctcccgggccgcggcgcgctggtgaacccgaagctcgccgaggcgtggcgcgccgccgtggacgcctgggttgagcgtgtcgtggcgctggtggagagcgactcgacatacagttgttggttgggtacttgctttctcggtgtgactttccaagagtgcagaaatgatcgatttgcagaatcacactccatttggtttgagaagattctgagtaatttgcagcaatcgtctagctttcaacttgttattgttatttcctgtacttccatgtctgatttatttgtaaggactgttccaaatttcaagttgcatgtttgcatttgaccaataatttatatgtgtttctgagttgtgatgtgaagattggctaagttttcgaacttaaagaaagagggatcatcctttgctggaagggttgttgaaccagtgctgcggcttttaaatcaaaatggtctagtagctgacgaagcaattgatttgctgaggacagttattaaattgtacccatcctctgtaaaccggcactacaataaagttgaatctgctattgcagcaaagattatgagcaatgtaaaaccatctgagaaatttgcgagaaccttagcattgttaccttctgtccgagtgtccgaggacagttggtcactgatgattcggaggatactgattgtggtaaacaatcttttgaatgatgctttcattgggcttgaagaagaaaagaaaggccatgatattatgctgctgctagttccacctggaactgatcctctaccaacattgggagatgaagtaatgcctggaggcaatgtgcatatcatgaagaaatttcgtgtctttactgttcctaccatttcagctcttacgctttgctgcagcgtgatgctgactagttattatccagttcaggtcaatgttccaattcatgctttgatagctttgatgcgaagagtgctgttagttgatggatcattgcataacaagctgttcccttctacaacttcattgcatcaagagcttatttgttttgatcttccatcgttacattcaactttcttggatttgctgaatgcaactattaaaggcatgcgaagccaactcttacctcatggtgctagtatcatacggcttataacagagtacttcaaaatagcaaagctgcctactttgaggacaaaaacttatagcattttgcagctgttgctgacctccatgggtgttgggacgtctctgcacctgcttgaggcaacagtccgcaatgcagttgctgatctgaatgatgatggtgaaattaacatgactatgatcaacacaaattcatcgcaattgaccaatgaatcatcatcaaaagtttattcgaagaagaggaagcaagaaccacagatgcaaaactcaaccatctcaggttcagagaaagtagcaatcagcccaaggaaaagaaaaggttcttccataccaattacatcaaagggagtggcccctgaaagtacaggagatgttacactatcaactccacattctgtcaaaatagctgcgcttgaaacattggaagttcttctgaatgtgggaggttcattgcggatggatcgctggaggtcagaagtggacatgctcttaattaacgtggctagaagtgcttgcggcatgggagggagttatgagcaaaagccatccacatttggggagccaaacatatcggacttccaacttgcttcgcttaagggcctgctggcatcttttctttcttctcatgcccgtcctccttatttagccaacggaattgaactcttcagaaaagggaagctagagataggcactaaggttgcagagttttgttcacatgctttgcttgctttggatgtccttgtccaccctcgagccctttctctggaaagaacagttcctgcaagctctgggttcaactacactgcacagaaaaaaacagtttttggtgctggtacacaccagatctcaccatttggggaccagcctcaagcaatggaggtcgaagacatgtacgatgactggctaatatccaacaacaatgaaccaccagaggttccagtgaacggtagtgatgctgtggtaagtaaaggtgtgctggtggaggatggaaagcagctcaatcccatagcagaagatccaaaagtcgacccacccagaatcacagacgcagcacaagatgcaccagcatccaccaagactgatgtcaaggtggtcgatgcagctgcagccacagctgccaagccaaacacagcggagaatccttcgagttccaatgctgtcccctctccagtgcgcacaacagattctgattcacgtaagcatgcgtcatttcccgagcaggatagtcctcatgagaacaaaagcgcagccgtccatccaggtgaagcttctgcgactccaggtgttggttcaagccaccaccgccatgaagcacctgaggcccgttcagccagcttcacggaattgtttggttctgagtctggcatcgaatcagagtccgaagacttgatgccagatatcgtcgacggggaccctgactctgactaggtttgccgtcgtcatttgtgacatggcaatggaaattttgtgatgttcctgttttgttttgagcaaattgtacgacattgccggctgacagatgatgcagtatttgattgatagatatagatggagctaaattttgtgatgttcctgttttgttttaccaccaaaaatttgctcaatctgattggatttagaggcacgccggtgaatagaataaagtgcaaacaaagtatttcga

SEQ ID NO: 49377 - DNA, 2888 bp, Zea Mays
gcctctggagcaagctcagggcaaagaccaagatgaaatcgatcctggtttacaccacctgaacaccgcccctcatacttgtcgacggtctacctgatggcagcaggttccggcggtggaggttttctgggcgacgtcaacgacccatggctgaagccgcggctgctccgcgcggtggtcaccgggcgccttccgcagcctggcgccgccgccgagctctcgccgacggaggtcgcctccatcctcgaggtggtacgcactcacggcctactcacggaggatctcccgggccgcggcgcgctggtgaacccgaagctcgccgaggcgtggcgcgccgccgtggacgcctgggttgagcgtgtcgtggcgctggtggagagcgactcgacatacagttgttggttgggtacttgctttctcggtgtgactttccaagagtgcagaaatgatcgatttgcagaatcacactccatttggtttgagaagattctgagtaatttgcagcaatcgtctagctttcaacttgttattgttatttcctgtacttccatgtctgatttatttgtaagattggctaagttttcgaacttaaagaaagagggatcatcctttgctggaagggttgttgaaccagtgctgcggcttttaaatcaaaatggtctagtagctgacgaagcaattgatttgctgaggacagttattaaattgtacccatcctctgtaaaccggcactacaataaagttgaatctgctattgcagcaaagattatgagcaatgtaaaaccatctgagaaatttgcgagaaccttagcattgttaccttctgtccgagtgtccgaggacagttggtcactgatgattcggaggatactgattgtggtaaacaatcttttgaatgatgctttcattgggcttgaagaagaaaagaaaggccatgatattatgctgctgctagttccacctggaactgatcctctaccaacattgggagatgaagtaatgcctggaggtcaatgttccaattcatgctttgatagctttgatgcgaagagtgctgttagttgatggatcattgcataacaagctgttcccttctacaacttcattgcatcaagagcttatttgttttgatcttccatcgttacattcaactttcttggatttgctgaatgcaactattaaaggcatgcgaagccaactcttacctcatggtgctagtatcatacggcttataacagagtacttcaaaatagcaaagctgcctactttgaggacaaaaacttatagcattttgcagctgttgctgacctccatgggtgttgggacgtctctgcacctgcttgaggcaacagtccgcaatgcagttgctgatctgaatgatgatggtgaaattaacatgactatgatcaacacaaattcatcgcaattgaccaatgaatcatcatcaaaagtttattcgaagaagaggaagcaagaaccacagatgcaaaactcaaccatctcaggttcagagaaagtagcaatcagcccaaggaaaagaaaaggttcttccataccaattacatcaaagggagtggcccctgaaagtacaggagatgttacactatcaactccacattctgtcaaaatagctgcgcttgaaacattggaagttcttctgaatgtgggaggttcattgcggatggatcgctggaggtcagaagtggacatgctcttaattaacgtggctagaagtgcttgcggcatgggagggagttatgagcaaaagccatccacatttggggagccaaacatatcggacttccaacttgcttcgcttaagggcctgctggcatcttttctttcttctcatgcccgtcctccttatttagccaacggaattgaactcttcagaaaagggaagctagagataggcactaaggttgcagagttttgttcacatgctttgcttgctttggatgtccttgtccaccctcgagccctttctctggaaagaacagttcctgcaagctctgggttcaactacactgcacagaaaaaaacagtttttggtgctggtacacaccagatctcaccatttggggaccagcctcaagcaatggaggtcgaagacatgtacgatgactggctaatatccaacaacaatgaaccaccagaggttccagtgaacggtagtgatgctgtggtaagtaaaggtgtgctggtggaggatggaaagcagctcaatcccatagcagaagatccaaaagtcgacccacccagaatcacagacgcagcacaagatgcaccagcatccaccaagactgatgtcaaggtggtcgatgcagctgcagccacagctgccaagccaaacacagcggagaatccttcgagttccaatgctgtcccctctccagtgcgcacaacagattctgattcacgtaagcatgcgtcatttcccgagcaggatagtcctcatgagaacaaaagcgcagccgtccatccaggtgaagcttctgcgactccaggtgttggttcaagccaccaccgccatgaagcacctgaggcccgttcagccagcttcacggaattgtttggttctgagtctggcatcgaatcagagtccgaagacttgatgccagatatcgtcgacggggaccctgactctgactaggtttgccgtcgtcatttgtgacatggcaatggaaattttgtgatgttcctgttttgttttgagcaaattgtacgacattgccggctgacagatgatgcagtatttgattgatagatatagatggagctaaattttgtgatgttcctgttttgttttaccaccaaaaatttgctcaatctgattggatttagaggcacgccggtgaatagaataaagtgcaaacaaagtatttcga

SEQ ID NO: 49378 - DNA, 2992 bp, Zea Mays
gcaagctcagggcaaagaccaagatgaaatcgatcctggtttacaccacctgaacaccgcccctcatacttgtcgacggtctacctgatggcagcaggttccggcggtggaggttttctgggcgacgtcaacgacccatggctgaagccgcggctgctccgcgcggtggtcaccgggcgccttccgcagcctggcgccgccgccgagctctcgccgacggaggtcgcctccatcctcgaggtggtacgcactcacggcctactcacggaggatctcccgggccgcggcgcgctggtgaacccgaagctcgccgaggcgtggcgcgccgccgtggacgcctgggttgagcgtgtcgtggcgctggtggagagcgactcgacatacagttgttggttgggtacttgctttctcggtgtgactttccaagagtgcagaaatgatcgatttgcagaatcacactccatttggtttgagaagattctgagtaatttgcagcaatcgtctagctttcaacttgttattgttatttcctgtacttccatgtctgatttatttgtaagtaagaagaataattgtgaattgaacttccaatcttcaggactgttccaaatttcaagttgcatgtttgcatttgaccaataatttatatgtgtttctgagttgtgatgtgaagattggctaagttttcgaacttaaagaaagagggatcatcctttgctggaagggttgttgaaccagtgctgcggcttttaaatcaaaatggtctagtagctgacgaagcaattgatttgctgaggacagttattaaattgtacccatcctctgtaaaccggcactacaataaagttgaatctgctattgcagcaaagattatgagcaatgtaaaaccatctgagaaatttgcgagaaccttagcattgttaccttctgtccgagtgtccgaggacagttggtcactgatgattcggaggatactgattgtggtaaacaatcttttgaatgatgctttcattgggcttgaagaagaaaagaaaggccatgatattatgctgctgctagttccacctggaactgatcctctaccaacattgggagatgaagtaatgcctggaggtcaatgttccaattcatgctttgatagctttgatgcgaagagtgctgttagttgatggatcattgcataacaagctgttcccttctacaacttcattgcatcaagagcttatttgttttgatcttccatcgttacattcaactttcttggatttgctgaatgcaactattaaaggcatgcgaagccaactcttacctcatggtgctagtatcatacggcttataacagagtacttcaaaatagcaaagctgcctactttgaggacaaaaacttatagcattttgcagctgttgctgacctccatgggtgttgggacgtctctgcacctgcttgaggcaacagtccgcaatgcagttgctgatctgaatgatgatggtgaaattaacatgactatgatcaacacaaattcatcgcaattgaccaatgaatcatcatcaaaagtttattcgaagaagaggaagcaagaaccacagatgcaaaactcaaccatctcaggttcagagaaagtagcaatcagcccaaggaaaagaaaaggttcttccataccaattacatcaaagggagtggcccctgaaagtacaggagatgttacactatcaactccacattctgtcaaaatagctgcgcttgaaacattggaagttcttctgaatgtgggaggttcattgcggatggatcgctggaggtcagaagtggacatgctcttaattaacgtggctagaagtgcttgcggcatgggagggagttatgagcaaaagccatccacatttggggagccaaacatatcggacttccaacttgcttcgcttaagggcctgctggcatcttttctttcttctcatgcccgtcctccttatttagccaacggaattgaactcttcagaaaagggaagctagagataggcactaaggttgcagagttttgttcacatgctttgcttgctttggatgtccttgtccaccctcgagccctttctctggaaagaacagttcctgcaagctctgggttcaactacactgcacagaaaaaaacagtttttggtgctggtacacaccagatctcaccatttggggaccagcctcaagcaatggaggtcgaagacatgtacgatgactggctaatatccaacaacaatgaaccaccagaggttccagtgaacggtagtgatgctgtggtaagtaaaggtgtgctggtggaggatggaaagcagctcaatcccatagcagaagatccaaaagtcgacccacccagaatcacagacgcagcacaagatgcaccagcatccaccaagactgatgtcaaggtggtcgatgcagctgcagccacagctgccaagccaaacacagcggagaatccttcgagttccaatgctgtcccctctccagtgcgcacaacagattctgattcacgtaagcatgcgtcatttcccgagcaggatagtcctcatgagaacaaaagcgcagccgtccatccaggtgaagcttctgcgactccaggtgttggttcaagccaccaccgccatgaagcacctgaggcccgttcagccagcttcacggaattgtttggttctgagtctggcatcgaatcagagtccgaagacttgatgccagatatcgtcgacggggaccctgactctgactaggtttgccgtcgtcatttgtgacatggcaatggaaattttgtgatgttcctgttttgttttgagcaaattgtacgacattgccggctgacagatgatgcagtatttgattgatagatatagatggagctaaattttgtgatgttcctgttttgttttaccaccaaaaatttgctcaatctgattggatttagaggcacgccggtgaatagaataaagtgcaaacaaagtatttcga

SEQ ID NO: 49379 - DNA, 2893 bp, Zea Mays
gtcgacggtctacctgatggcagcaggttccggcggtggaggttttctgggcgacgtcaacgacccatggctgaagccgcggctgctccgcgcggtggtcaccgggcgccttccgcagcctggcgccgccgccgagctctcgccgacggaggtcgcctccatcctcgaggtggtacgcactcacggcctactcacggaggatctcccgggccgcggcgcgctggtgaacccgaagctcgccgaggcgtggcgcgccgccgtggacgcctgggttgagcgtgtcgtggcgctggtggagagcgactcgcaatcgtctagctttcaacttgttattgttatttcctgtacttccatgtctgatttatttgtaagattggctaagttttcgaacttaaagaaagagggatcatcctttgctggaagggttgttgaaccagtgctgcggcttttaaatcaaaatggtctagtagctgacgaagcaattgatttgctgaggacagttattaaattgtacccatcctctgtaaaccggcactacaataaagttgaatctgctattgcagcaaagattatgagcaatgtaaaaccatctgagaaatttgcgagaaccttagcattgttaccttctgtccgagtgtccgaggacagttggtcactgatgattcggaggatactgattgtggtaaacaatcttttgaatgatgctttcattgggcttgaagaagaaaagaaaggccatgatattatgctgctgctagttccacctggaactgatcctctaccaacattgggagatgaagtaatgcctggaggcaatgtgcatatcatgaagaaatttcgtgtctttactgttcctaccatttcagctcttacgctttgctgcagcgtgatgctgactagttattatccagttcaggtcaatgttccaattcatgctttgatagctttgatgcgaagagtgctgttagttgatggatcattgcataacaagctgttcccttctacaacttcattgcatcaagagcttatttgttttgatcttccatcgttacattcaactttcttggatttgctgaatgcaactattaaaggcatgcgaagccaactcttacctcatggtgctagtatcatacggcttataacagagtacttcaaaatagcaaagctgcctactttgaggacaaaaacttatagcattttgcagctgttgctgacctccatgggtgttgggacgtctctgcacctgcttgaggcaacagtccgcaatgcagttgctgatctgaatgatgatggtgaaattaacatgactatgatcaacacaaattcatcgcaattgaccaatgaatcatcatcaaaagtttattcgaagaagaggaagcaagaaccacagatgcaaaactcaaccatctcaggttcagagaaagtagcaatcagcccaaggaaaagaaaaggttcttccataccaattacatcaaagggagtggcccctgaaagtacaggagatgttacactatcaactccacattctgtcaaaatagctgcgcttgaaacattggaagttcttctgaatgtggaacaaattgcgtattgaatttgttatgcaaccagcatatatactgttatttaattataaatagatttttatgtcattatcaacttatcacggagcagggaggttcattgcggatggatcgctggaggtcagaagtggacatgctcttaattaacgtggctagaagtgcttgcggcatgggagggagttatgagcaaaagccatccacatttggggagccaaacatatcggacttccaacttgcttcgcttaagggcctgctggcatcttttctttcttctcatgcccgtcctccttatttagccaacggaattgaactcttcagaaaagggaagctagagataggcactaaggttgcagagttttgttcacatgctttgcttgctttggatgtccttgtccaccctcgagccctttctctggaaagaacagttcctgcaagctctgggttcaactacactgcacagaaaaaaacagtttttggtgctggtacacaccagatctcaccatttggggaccagcctcaagcaatggaggtcgaagacatgtacgatgactggctaatatccaacaacaatgaaccaccagaggttccagtgaacggtagtgatgctgtggtaagtaaaggtgtgctggtggaggatggaaagcagctcaatcccatagcagaagatccaaaagtcgacccacccagaatcacagacgcagcacaagatgcaccagcatccaccaagactgatgtcaaggtggtcgatgcagctgcagccacagctgccaagccaaacacagcggagaatccttcgagttccaatgctgtcccctctccagtgcgcacaacagattctgattcacgtaagcatgcgtcatttcccgagcaggatagtcctcatgagaacaaaagcgcagccgtccatccaggtgaagcttctgcgactccaggtgttggttcaagccaccaccgccatgaagcacctgaggcccgttcagccagcttcacggaattgtttggttctgagtctggcatcgaatcagagtccgaagacttgatgccagatatcgtcgacggggaccctgactctgactaggtttgccgtcgtcatttgtgacatggcaatggaaattttgtgatgttcctgttttgttttgagcaaattgtacgacattgccggctgacagatgatgcagtatttgattgatagatatagatggagctaaattttgtgatgttcctgttttgttttaccaccaaaaatttgctcaatctgattggatttagaggcacgccggtgaatagaataaagtgcaaacaaagtatttcga

SEQ ID NO: 49380 - DNA, 2919 bp, Zea Mays
gtcgacggtctacctgatggcagcaggttccggcggtggaggttttctgggcgacgtcaacgacccatggctgaagccgcggctgctccgcgcggtggtcaccgggcgccttccgcagcctggcgccgccgccgagctctcgccgacggaggtcgcctccatcctcgaggtggtacgcactcacggcctactcacggaggatctcccgggccgcggcgcgctggtgaacccgaagctcgccgaggcgtggcgcgccgccgtggacgcctgggttgagcgtgtcgtggcgctggtggagagcgactcgcaatcgtctagctttcaacttgttattgttatttcctgtacttccatgtctgatttatttgtaagattggctaagttttcgaacttaaagaaagagggatcatcctttgctggaagggttgttgaaccagtgctgcggcttttaaatcaaaatggtctagtagctgtatggtctactcttttcattcttatggcttatttgtttgagttcaaccactcaatggacgaagcaattgatttgctgaggacagttattaaattgtacccatcctctgtaaaccggcactacaataaagttgaatctgctattgcagcaaagattatgagcaatgtaaaaccatctgagaattccccaagtcttacatatactgtttcaatgctccagaaatttgcgagaaccttagcattgttaccttctgtccgagtgtccgaggacagttggtcactgatgattcggaggatactgattgtggtaaacaatcttttgaatgatgctttcattgggcttgaagaagaaaagaaaggccatgatattatgctgctgctagttccacctggaactgatcctctaccaacattgggagatgaagtaatgcctggaggcaatgtgcatatcatgaagaaatttcgtgtctttactgttcctaccatttcagctcttacgctttgctgcagcgtgatgctgactagttattatccagttcaggttttgtcaaaatcagaacatttctgtatatcacctaatgctcataacttactagtctttgatgcgaagagtgctgttagttgatggatcattgcataacaagctgttcccttctacaacttcattgcatcaagagcttatttgttttgatcttccatcgttacattcaactttcttggatttgctgaatgcaactattaaaggcatgcgaagccaactcttacctcatggtgctagtatcatacggcttataacagagtacttcaaaatagcaaagctgcctactttgaggacaaaaacttatagcattttgcagctgttgctgacctccatgggtgttgggacgtctctgcacctgcttgaggcaacagtccgcaatgcagttgctgatctgaatgatgatggtgaaattaacatgactatgatcaacacaaattcatcgcaattgaccaatgaatcatcatcaaaagtttattcgaagaagaggaagcaagaaccacagatgcaaaactcaaccatctcaggttcagagaaagtagcaatcagcccaaggaaaagaaaaggttcttccataccaattacatcaaagggagtggcccctgaaagtacaggagatgttacactatcaactccacattctgtcaaaatagctgcgcttgaaacattggaagttcttctgaatgtgggaggttcattgcggatggatcgctggaggtcagaagtggacatgctcttaattaacgtggctagaagtgcttgcggcatgggagggagttatgagcaaaagccatccacatttggggagccaaacatatcggacttccaacttgcttcgcttaagggcctgctggcatcttttctttcttctcatgcccgtcctccttatttagccaacggaattgaactcttcagaaaagggaagctagagataggcactaaggttgcagagttttgttcacatgctttgcttgctttggatgtccttgtccaccctcgagccctttctctggaaagaacagttcctgcaagctctgggttcaactacactgcacagaaaaaaacagtttttggtgctggtacacaccagatctcaccatttggggaccagcctcaagcaatggaggtcgaagacatgtacgatgactggctaatatccaacaacaatgaaccaccagaggttccagtgaacggtagtgatgctgtggtaagtaaaggtgtgctggtggaggatggaaagcagctcaatcccatagcagaagatccaaaagtcgacccacccagaatcacagacgcagcacaagatgcaccagcatccaccaagactgatgtcaaggtggtcgatgcagctgcagccacagctgccaagccaaacacagcggagaatccttcgagttccaatgctgtcccctctccagtgcgcacaacagattctgattcacgtaagcatgcgtcatttcccgagcaggatagtcctcatgagaacaaaagcgcagccgtccatccaggtgaagcttctgcgactccaggtgttggttcaagccaccaccgccatgaagcacctgaggcccgttcagccagcttcacggaattgtttggttctgagtctggcatcgaatcagagtccgaagacttgatgccagatatcgtcgacggggaccctgactctgactaggtttgccgtcgtcatttgtgacatggcaatggaaattttgtgatgttcctgttttgttttgagcaaattgtacgacattgccggctgacagatgatgcagtatttgattgatagatatagatggagctaaattttgtgatgttcctgttttgttttaccaccaaaaatttgctcaatctgattggatttagaggcacgccggtgaatagaataaagtgcaaacaaagtatttcga

SEQ ID NO: 49381 - DNA, 3008 bp, Zea Mays
gtcgacggtctacctgatggcagcaggttccggcggtggaggttttctgggcgacgtcaacgacccatggctgaagccgcggctgctccgcgcggtggtcaccgggcgccttccgcagcctggcgccgccgccgagctctcgccgacggaggtcgcctccatcctcgaggtggtacgcactcacggcctactcacggaggatctcccgggccgcggcgcgctggtgaacccgaagctcgccgaggcgtggcgcgccgccgtggacgcctgggttgagcgtgtcgtggcgctggtggagagcgactcgacatacagttgttggttgggtacttgctttctcggtgtgactttccaagagtgcagaaatgatcgatttgcagaatcacactccatttggtttgagaagattctgagtaatttgcagcaatcgtctagctttcaacttgttattgttatttcctgtacttccatgtctgatttatttgtaagattggctaagttttcgaacttaaagaaagagggatcatcctttgctggaagggttgttgaaccagtgctgcggcttttaaatcaaaatggtctagtagctgtatggtctactcttttcattcttatggcttatttgtttgagttcaaccactcaatggacgaagcaattgatttgctgaggacagttattaaattgtacccatcctctgtaaaccggcactacaataaagttgaatctgctattgcagcaaagattatgagcaatgtaaaaccatctgagaattccccaagtcttacatatactgtttcaatgctccagaaatttgcgagaaccttagcattgttaccttctgtccgagtgtccgaggacagttggtcactgatgattcggaggatactgattgtgttctaccatttcaggttaatttttacccattctactgttacagaaaagaaaggccatgatattatgctgctgctagttccacctggaactgatcctctaccaacattgggagatgaagtaatgcctggaggcaatgtgcatatcatgaagaaatttcgtgtctttactgttcctaccatttcagctcttacgctttgctgcagcgtgatgctgactagttattatccagttcaggtcaatgttccaattcatgctttgatagctttgatgcgaagagtgctgttagttgatggatcattgcataacaagctgttcccttctacaacttcattgcatcaagagcttatttgttttgatcttccatcgttacattcaactttcttggatttgctgaatgcaactattaaaggcatgcgaagccaactcttacctcatggtgctagtatcatacggcttataacagagtacttcaaaatagcaaagctgcctactttgaggacaaaaacttatagcattttgcagctgttgctgacctccatgggtgttgggacgtctctgcacctgcttgaggcaacagtccgcaatgcagttgctgatctgaatgatgatggtgaaattaacatgactatgatcaacacaaattcatcgcaattgaccaatgaatcatcatcaaaagtttattcgaagaagaggaagcaagaaccacagatgcaaaactcaaccatctcaggttcagagaaagtagcaatcagcccaaggaaaagaaaaggttcttccataccaattacatcaaagggagtggcccctgaaagtacaggagatgttacactatcaactccacattctgtcaaaatagctgcgcttgaaacattggaagttcttctgaatgtgggaggttcattgcggatggatcgctggaggtcagaagtggacatgctcttaattaacgtggctagaagtgcttgcggcatgggagggagttatgagcaaaagccatccacatttggggagccaaacatatcggacttccaacttgcttcgcttaagggcctgctggcatcttttctttcttctcatgcccgtcctccttatttagccaacggaattgaactcttcagaaaagggaagctagagataggcactaaggttgcagagttttgttcacatgctttgcttgctttggatgtccttgtccaccctcgagccctttctctggaaagaacagttcctgcaagctctgggttcaactacactgcacagaaaaaaacagtttttggtgctggtacacaccagatctcaccatttggggaccagcctcaagcaatggaggtcgaagacatgtacgatgactggctaatatccaacaacaatgaaccaccagaggttccagtgaacggtagtgatgctgtggtaagtaaaggtgtgctggtggaggatggaaagcagctcaatcccatagcagaagatccaaaagtcgacccacccagaatcacagacgcagcacaagatgcaccagcatccaccaagactgatgtcaaggtggtcgatgcagctgcagccacagctgccaagccaaacacagcggagaatccttcgagttccaatgctgtcccctctccagtgcgcacaacagattctgattcacgtaagcatgcgtcatttcccgagcaggatagtcctcatgagaacaaaagcgcagccgtccatccaggtgaagcttctgcgactccaggtgttggttcaagccaccaccgccatgaagcacctgaggcccgttcagccagcttcacggaattgtttggttctgagtctggcatcgaatcagagtccgaagacttgatgccagatatcgtcgacggggaccctgactctgactaggtttgccgtcgtcatttgtgacatggcaatggaaattttgtgatgttcctgttttgttttgagcaaattgtacgacattgccggctgacagatgatgcagtatttgattgatagatatagatggagctaaattttgtgatgttcctgttttgttttaccaccaaaaatttgctcaatctgattggatttagaggcacgccggtgaatagaataaagtgcaaacaaagtatttcga

SEQ ID NO: 49382 - DNA, 2729 bp, Zea Mays
aatttgaggacacccttgataatgactccaaccacagtttactgaatagacatacagttgttggttgggtacttgctttctcggtgtgactttccaagagtgcagaaatgatcgatttgcagaatcacactccatttggtttgagaagattctgagtaatttgcagcaatcgtctagctttcaacttgttattgttatttcctgtacttccatgtctgatttatttgtaaggactgttccaaatttcaagttgcatgtttgcatttgaccaataatttatatgtgtttctgagttgtgatgtgaagattggctaagttttcgaacttaaagaaagagggatcatcctttgctggaagggttgttgaaccagtgctgcggcttttaaatcaaaatggtctagtagctgacgaagcaattgatttgctgaggacagttattaaattgtacccatcctctgtaaaccggcactacaataaagttgaatctgctattgcagcaaagattatgagcaatgtaaaaccatctgagaaatttgcgagaaccttagcattgttaccttctgtccgagtgtccgaggacagttggtcactgatgattcggaggatactgattgtggtaaacaatcttttgaatgatgctttcattgggcttgaagaagaaaagaaaggccatgatattatgctgctgctagttccacctggaactgatcctctaccaacattgggagatgaagtaatgcctggaggcaatgtgcatatcatgaagaaatttcgtgtctttactgttcctaccatttcagctcttacgctttgctgcagcgtgatgctgactagttattatccagttcaggtcaatgttccaattcatgctttgatagctttgatgcgaagagtgctgttagttgatggatcattgcataacaagctgttcccttctacaacttcattgcatcaagagcttatttgttttgatcttccatcgttacattcaactttcttggatttgctgaatgcaactattaaaggcatgcgaagccaactcttacctcatggtgctagtatcatacggcttataacagagtacttcaaaatagcaaagctgcctactttgaggacaaaaacttatagcattttgcagctgttgctgacctccatgggtgttgggacgtctctgcacctgcttgaggcaacagtccgcaatgcagttgctgatctgaatgatgatggtgaaattaacatgactatgatcaacacaaattcatcgcaattgaccaatgaatcatcatcaaaagtttattcgaagaagaggaagcaagaaccacagatgcaaaactcaaccatctcaggttcagagaaagtagcaatcagcccaaggaaaagaaaaggttcttccataccaattacatcaaagggagtggcccctgaaagtacaggagatgttacactatcaactccacattctgtcaaaatagctgcgcttgaaacattggaagttcttctgaatgtgggaggttcattgcggatggatcgctggaggtcagaagtggacatgctcttaattaacgtggctagaagtgcttgcggcatgggagggagttatgagcaaaagccatccacatttggggagccaaacatatcggacttccaacttgcttcgcttaagggcctgctggcatcttttctttcttctcatgcccgtcctccttatttagccaacggaattgaactcttcagaaaagggaagctagagataggcactaaggttgcagagttttgttcacatgctttgcttgctttggatgtccttgtccaccctcgagccctttctctggaaagaacagttcctgcaagctctgggttcaactacactgcacagaaaaaaacagtttttggtgctggtacacaccagatctcaccatttggggaccagcctcaagcaatggaggtcgaagacatgtacgatgactggctaatatccaacaacaatgaaccaccagaggttccagtgaacggtagtgatgctgtggtaagtaaaggtgtgctggtggaggatggaaagcagctcaatcccatagcagaagatccaaaagtcgacccacccagaatcacagacgcagcacaagatgcaccagcatccaccaagactgatgtcaaggtggtcgatgcagctgcagccacagctgccaagccaaacacagcggagaatccttcgagttccaatgctgtcccctctccagtgcgcacaacagattctgattcacgtaagcatgcgtcatttcccgagcaggatagtcctcatgagaacaaaagcgcagccgtccatccaggtgaagcttctgcgactccaggtgttggttcaagccaccaccgccatgaagcacctgaggcccgttcagccagcttcacggaattgtttggttctgagtctggcatcgaatcagagtccgaagacttgatgccagatatcgtcgacggggaccctgactctgactaggtttgccgtcgtcatttgtgacatggcaatggaaattttgtgatgttcctgttttgttttgagcaaattgtacgacattgccggctgacagatgatgcagtatttgattgatagatatagatggagctaaattttgtgatgttcctgttttgttttaccaccaaaaatttgctcaatctgattggatttagaggcacgccggtgaatagaataaagtgcaaacaaagtatttcga

SEQ ID NO: 49383 - DNA, 2734 bp, Zea Mays
cgagagaaaaaaatgccatttcaatttctgagcaatcccattattaattaaagatgtattaacatatttcaaatgcttgctaggatataccatgaaactgatactgtgtctttgggagcaatcgtctagctttcaacttgttattgttatttcctgtacttccatgtctgatttatttgtaagattggctaagttttcgaacttaaagaaagagggatcatcctttgctggaagggttgttgaaccagtgctgcggcttttaaatcaaaatggtctagtagctgtatggtctactcttttcattcttatggcttatttgtttgagttcaaccactcaatggtaatatgtgtaaattatatctatttctgcaggacgaagcaattgatttgctgaggacagttattaaattgtacccatcctctgtaaaccggcactacaataaagttgaatctgctattgcagcaaagattatgagcaatgtaaaaccatctgagaattccccaagtcttacatatactgtttcaatgctccagaaatttgcgagaaccttagcattgttaccttctgtccgagtgtccgaggacagttggtcactgatgattcggaggatactgattgtggtaaacaatcttttgaatgatgctttcattgggcttgaagaagaaaagaaaggccatgatattatgctgctgctagttccacctggaactgatcctctaccaacattgggagatgaagtaatgcctggaggcaatgtgcatatcatgaagaaatttcgtgtctttactgttcctaccatttcagctcttacgctttgctgcagcgtgatgctgactagttattatccagttcaggtcaatgttccaattcatgctttgatagctttgatgcgaagagtgctgttagttgatggatcattgcataacaagctgttcccttctacaacttcattgcatcaagagcttatttgttttgatcttccatcgttacattcaactttcttggatttgctgaatgcaactattaaaggcatgcgaagccaactcttacctcatggtgctagtatcatacggcttataacagagtacttcaaaatagcaaagctgcctactttgaggacaaaaacttatagcattttgcagctgttgctgacctccatgggtgttgggacgtctctgcacctgcttgaggcaacagtccgcaatgcagttgctgatctgaatgatgatggtgaaattaacatgactatgatcaacacaaattcatcgcaattgaccaatgaatcatcatcaaaagtttattcgaagaagaggaagcaagaaccacagatgcaaaactcaaccatctcaggttcagagaaagtagcaatcagcccaaggaaaagaaaaggttcttccataccaattacatcaaagggagtggcccctgaaagtacaggagatgttacactatcaactccacattctgtcaaaatagctgcgcttgaaacattggaagttcttctgaatgtgggaggttcattgcggatggatcgctggaggtcagaagtggacatgctcttaattaacgtggctagaagtgcttgcggcatgggagggagttatgagcaaaagccatccacatttggggagccaaacatatcggacttccaacttgcttcgcttaagggcctgctggcatcttttctttcttctcatgcccgtcctccttatttagccaacggaattgaactcttcagaaaagggaagctagagataggcactaaggttgcagagttttgttcacatgctttgcttgctttggatgtccttgtccaccctcgagccctttctctggaaagaacagttcctgcaagctctgggttcaactacactgcacagaaaaaaacagtttttggtgctggtacacaccagatctcaccatttggggaccagcctcaagcaatggaggtcgaagacatgtacgatgactggctaatatccaacaacaatgaaccaccagaggttccagtgaacggtagtgatgctgtggtaagtaaaggtgtgctggtggaggatggaaagcagctcaatcccatagcagaagatccaaaagtcgacccacccagaatcacagacgcagcacaagatgcaccagcatccaccaagactgatgtcaaggtggtcgatgcagctgcagccacagctgccaagccaaacacagcggagaatccttcgagttccaatgctgtcccctctccagtgcgcacaacagattctgattcacgtaagcatgcgtcatttcccgagcaggatagtcctcatgagaacaaaagcgcagccgtccatccaggtgaagcttctgcgactccaggtgttggttcaagccaccaccgccatgaagcacctgaggcccgttcagccagcttcacggaattgtttggttctgagtctggcatcgaatcagagtccgaagacttgatgccagatatcgtcgacggggaccctgactctgactaggtttgccgtcgtcatttgtgacatggcaatggaaattttgtgatgttcctgttttgttttgagcaaattgtacgacattgccggctgacagatgatgcagtatttgattgatagatatagatggagctaaattttgtgatgttcctgttttgttttaccaccaaaaatttgctcaatctgattggatttagaggcacgccggtgaatagaataaagtgcaaacaaagtatttcga

SEQ ID NO: 49384 - DNA, 2520 bp, Zea Mays
ataccatgaaactgatactgtgtctttgggagcaatcgtctagctttcaacttgttattgttatttcctgtacttccatgtctgatttatttgtaagattggctaagttttcgaacttaaagaaagagggatcatcctttgctggaagggttgttgaaccagtgctgcggcttttaaatcaaaatggtctagtagctgacgaagcaattgatttgctgaggacagttattaaattgtacccatcctctgtaaaccggcactacaataaagttgaatctgctattgcagcaaagattatgagcaatgtaaaaccatctgagaaatttgcgagaaccttagcattgttaccttctgtccgagtgtccgaggacagttggtcactgatgattcggaggatactgattgtggtaaacaatcttttgaatgatgctttcattgggcttgaagaagaaaagaaaggccatgatattatgctgctgctagttccacctggaactgatcctctaccaacattgggagatgaagtaatgcctggaggcaatgtgcatatcatgaagaaatttcgtgtctttactgttcctaccatttcagctcttacgctttgctgcagcgtgatgctgactagttattatccagttcaggtcaatgttccaattcatgctttgatagctttgatgcgaagagtgctgttagttgatggatcattgcataacaagctgttcccttctacaacttcattgcatcaagagcttatttgttttgatcttccatcgttacattcaactttcttggatttgctgaatgcaactattaaaggcatgcgaagccaactcttacctcatggtgctagtatcatacggcttataacagagtacttcaaaatagcaaagctgcctactttgaggacaaaaacttatagcattttgcagctgttgctgacctccatgggtgttgggacgtctctgcacctgcttgaggcaacagtccgcaatgcagttgctgatctgaatgatgatggtgaaattaacatgactatgatcaacacaaattcatcgcaattgaccaatgaatcatcatcaaaagtttattcgaagaagaggaagcaagaaccacagatgcaaaactcaaccatctcaggttcagagaaagtagcaatcagcccaaggaaaagaaaaggttcttccataccaattacatcaaagggagtggcccctgaaagtacaggagatgttacactatcaactccacattctgtcaaaatagctgcgcttgaaacattggaagttcttctgaatgtgggaggttcattgcggatggatcgctggaggtcagaagtggacatgctcttaattaacgtggctagaagtgcttgcggcatgggagggagttatgagcaaaagccatccacatttggggagccaaacatatcggacttccaacttgcttcgcttaagggcctgctggcatcttttctttcttctcatgcccgtcctccttatttagccaacggaattgaactcttcagaaaagggaagctagagataggcactaaggttgcagagttttgttcacatgctttgcttgctttggatgtccttgtccaccctcgagccctttctctggaaagaacagttcctgcaagctctgggttcaactacactgcacagaaaaaaacagtttttggtgctggtacacaccagatctcaccatttggggaccagcctcaagcaatggaggtcgaagacatgtacgatgactggctaatatccaacaacaatgaaccaccagaggttccagtgaacggtagtgatgctgtggtaagtaaaggtgtgctggtggaggatggaaagcagctcaatcccatagcagaagatccaaaagtcgacccacccagaatcacagacgcagcacaagatgcaccagcatccaccaagactgatgtcaaggtggtcgatgcagctgcagccacagctgccaagccaaacacagcggagaatccttcgagttccaatgctgtcccctctccagtgcgcacaacagattctgattcacgtaagcatgcgtcatttcccgagcaggatagtcctcatgagaacaaaagcgcagccgtccatccaggtgaagcttctgcgactccaggtgttggttcaagccaccaccgccatgaagcacctgaggcccgttcagccagcttcacggaattgtttggttctgagtctggcatcgaatcagagtccgaagacttgatgccagatatcgtcgacggggaccctgactctgactaggtttgccgtcgtcatttgtgacatggcaatggaaattttgtgatgttcctgttttgttttgagcaaattgtacgacattgccggctgacagatgatgcagtatttgattgatagatatagatggagctaaattttgtgatgttcctgttttgttttaccaccaaaaatttgctcaatctgattggatttagaggcacgccggtgaatagaataaagtgcaaacaaagtatttcga

SEQ ID NO: 49385 - DNA, 2506 bp, Zea Mays
atttgaccaataatttatatgtgtttctgagttgtgatgtgaagattggctaagttttcgaacttaaagaaagagggatcatcctttgctggaagggttgttgaaccagtgctgcggcttttaaatcaaaatggtctagtagctgacgaagcaattgatttgctgaggacagttattaaattgtacccatcctctgtaaaccggcactacaataaagttgaatctgctattgcagcaaagattatgagcaatgtaaaaccatctgagaattccccaagtcttacatatactgtttcaatgctccagaaatttgcgagaaccttagcattgttaccttctgtccgagtgtccgaggacagttggtcactgatgattcggaggatactgattgtggtaaacaatcttttgaatgatgctttcattgggcttgaagaagaaaagaaaggccatgatattatgctgctgctagttccacctggaactgatcctctaccaacattgggagatgaagtaatgcctggaggcaatgtgcatatcatgaagaaatttcgtgtctttactgttcctaccatttcagctcttacgctttgctgcagcgtgatgctgactagttattatccagttcaggtcaatgttccaattcatgctttgatagctttgatgcgaagagtgctgttagttgatggatcattgcataacaagctgttcccttctacaacttcattgcatcaagagcttatttgttttgatcttccatcgttacattcaactttcttggatttgctgaatgcaactattaaaggcatgcgaagccaactcttacctcatggtgctagtatcatacggcttataacagagtacttcaaaatagcaaagctgcctactttgaggacaaaaacttatagcattttgcagctgttgctgacctccatgggtgttgggacgtctctgcacctgcttgaggcaacagtccgcaatgcagttgctgatctgaatgatgatggtgaaattaacatgactatgatcaacacaaattcatcgcaattgaccaatgaatcatcatcaaaagtttattcgaagaagaggaagcaagaaccacagatgcaaaactcaaccatctcaggttcagagaaagtagcaatcagcccaaggaaaagaaaaggttcttccataccaattacatcaaagggagtggcccctgaaagtacaggagatgttacactatcaactccacattctgtcaaaatagctgcgcttgaaacattggaagttcttctgaatgtgggaggttcattgcggatggatcgctggaggtcagaagtggacatgctcttaattaacgtggctagaagtgcttgcggcatgggagggagttatgagcaaaagccatccacatttggggagccaaacatatcggacttccaacttgcttcgcttaagggcctgctggcatcttttctttcttctcatgcccgtcctccttatttagccaacggaattgaactcttcagaaaagggaagctagagataggcactaaggttgcagagttttgttcacatgctttgcttgctttggatgtccttgtccaccctcgagccctttctctggaaagaacagttcctgcaagctctgggttcaactacactgcacagaaaaaaacagtttttggtgctggtacacaccagatctcaccatttggggaccagcctcaagcaatggaggtcgaagacatgtacgatgactggctaatatccaacaacaatgaaccaccagaggttccagtgaacggtagtgatgctgtggtaagtaaaggtgtgctggtggaggatggaaagcagctcaatcccatagcagaagatccaaaagtcgacccacccagaatcacagacgcagcacaagatgcaccagcatccaccaagactgatgtcaaggtggtcgatgcagctgcagccacagctgccaagccaaacacagcggagaatccttcgagttccaatgctgtcccctctccagtgcgcacaacagattctgattcacgtaagcatgcgtcatttcccgagcaggatagtcctcatgagaacaaaagcgcagccgtccatccaggtgaagcttctgcgactccaggtgttggttcaagccaccaccgccatgaagcacctgaggcccgttcagccagcttcacggaattgtttggttctgagtctggcatcgaatcagagtccgaagacttgatgccagatatcgtcgacggggaccctgactctgactaggtttgccgtcgtcatttgtgacatggcaatggaaattttgtgatgttcctgttttgttttgagcaaattgtacgacattgccggctgacagatgatgcagtatttgattgatagatatagatggagctaaattttgtgatgttcctgttttgttttaccaccaaaaatttgctcaatctgattggatttagaggcacgccggtgaatagaataaagtgcaaacaaagtatttcga

SEQ ID NO: 49386 - DNA, 2495 bp, Zea Mays
atttatatgtgtttctgagttgtgatgtgaagattggctaagttttcgaacttaaagaaagagggatcatcctttgctggaagggttgttgaaccagtgctgcggcttttaaatcaaaatggtctagtagctgacgaagcaattgatttgctgaggacagttattaaattgtacccatcctctgtaaaccggcactacaataaagtacatcttatttttatttcctaatcatttcctattctgggttgaatctgctattgcagcaaagattatgagcaatgtaaaaccatctgagaaatttgcgagaaccttagcattgttaccttctgtccgagtgtccgaggacagttggtcactgatgattcggaggatactgattgtggtaaacaatcttttgaatgatgctttcattgggcttgaagaagaaaagaaaggccatgatattatgctgctgctagttccacctggaactgatcctctaccaacattgggagatgaagtaatgcctggaggcaatgtgcatatcatgaagaaatttcgtgtctttactgttcctaccatttcagctcttacgctttgctgcagcgtgatgctgactagttattatccagttcaggtcaatgttccaattcatgctttgatagctttgatgcgaagagtgctgttagttgatggatcattgcataacaagctgttcccttctacaacttcattgcatcaagagcttatttgttttgatcttccatcgttacattcaactttcttggatttgctgaatgcaactattaaaggcatgcgaagccaactcttacctcatggtgctagtatcatacggcttataacagagtacttcaaaatagcaaagctgcctactttgaggacaaaaacttatagcattttgcagctgttgctgacctccatgggtgttgggacgtctctgcacctgcttgaggcaacagtccgcaatgcagttgctgatctgaatgatgatggtgaaattaacatgactatgatcaacacaaattcatcgcaattgaccaatgaatcatcatcaaaagtttattcgaagaagaggaagcaagaaccacagatgcaaaactcaaccatctcaggttcagagaaagtagcaatcagcccaaggaaaagaaaaggttcttccataccaattacatcaaagggagtggcccctgaaagtacaggagatgttacactatcaactccacattctgtcaaaatagctgcgcttgaaacattggaagttcttctgaatgtgggaggttcattgcggatggatcgctggaggtcagaagtggacatgctcttaattaacgtggctagaagtgcttgcggcatgggagggagttatgagcaaaagccatccacatttggggagccaaacatatcggacttccaacttgcttcgcttaagggcctgctggcatcttttctttcttctcatgcccgtcctccttatttagccaacggaattgaactcttcagaaaagggaagctagagataggcactaaggttgcagagttttgttcacatgctttgcttgctttggatgtccttgtccaccctcgagccctttctctggaaagaacagttcctgcaagctctgggttcaactacactgcacagaaaaaaacagtttttggtgctggtacacaccagatctcaccatttggggaccagcctcaagcaatggaggtcgaagacatgtacgatgactggctaatatccaacaacaatgaaccaccagaggttccagtgaacggtagtgatgctgtggtaagtaaaggtgtgctggtggaggatggaaagcagctcaatcccatagcagaagatccaaaagtcgacccacccagaatcacagacgcagcacaagatgcaccagcatccaccaagactgatgtcaaggtggtcgatgcagctgcagccacagctgccaagccaaacacagcggagaatccttcgagttccaatgctgtcccctctccagtgcgcacaacagattctgattcacgtaagcatgcgtcatttcccgagcaggatagtcctcatgagaacaaaagcgcagccgtccatccaggtgaagcttctgcgactccaggtgttggttcaagccaccaccgccatgaagcacctgaggcccgttcagccagcttcacggaattgtttggttctgagtctggcatcgaatcagagtccgaagacttgatgccagatatcgtcgacggggaccctgactctgactaggtttgccgtcgtcatttgtgacatggcaatggaaattttgtgatgttcctgttttgttttgagcaaattgtacgacattgccggctgacagatgatgcagtatttgattgatagatatagatggagctaaattttgtgatgttcctgttttgttttaccaccaaaaatttgctcaatctgattggatttagaggcacgccggtgaatagaataaagtgcaaacaaagtatttcga

SEQ ID NO: 49387 - DNA, 2345 bp, Zea Mays
ctacgcatgaagtttctattccaagaatctcccaagttcccaaatatacgatgcagatttttcattagtcaactaatcgcttgtgtctatagaagttgaatctgctattgcagcaaagattatgagcaatgtaaaaccatctgagaaatttgcgagaaccttagcattgttaccttctgtccgagtgtccgaggacagttggtcactgatgattcggaggatactgattgtggtaaacaatcttttgaatgatgctttcattgggcttgaagaagaaaagaaaggccatgatattatgctgctgctagttccacctggaactgatcctctaccaacattgggagatgaagtaatgcctggaggcaatgtgcatatcatgaagaaatttcgtgtctttactgttcctaccatttcagctcttacgctttgctgcagcgtgatgctgactagttattatccagttcaggtcaatgttccaattcatgctttgatagctttgatgcgaagagtgctgttagttgatggatcattgcataacaagctgttcccttctacaacttcattgcatcaagagcttatttgttttgatcttccatcgttacattcaactttcttggatttgctgaatgcaactattaaaggcatgcgaagccaactcttacctcatggtgctagtatcatacggcttataacagagtacttcaaaatagcaaagctgcctactttgaggacaaaaacttatagcattttgcagctgttgctgacctccatgggtgttgggacgtctctgcacctgcttgaggcaacagtccgcaatgcagttgctgatctgaatgatgatggtgaaattaacatgactatgatcaacacaaattcatcgcaattgaccaatgaatcatcatcaaaagtttattcgaagaagaggaagcaagaaccacagatgcaaaactcaaccatctcaggttcagagaaagtagcaatcagcccaaggaaaagaaaaggttcttccataccaattacatcaaagggagtggcccctgaaagtacaggagatgttacactatcaactccacattctgtcaaaatagctgcgcttgaaacattggaagttcttctgaatgtgggaggttcattgcggatggatcgctggaggtcagaagtggacatgctcttaattaacgtggctagaagtgcttgcggcatgggagggagttatgagcaaaagccatccacatttggggagccaaacatatcggacttccaacttgcttcgcttaagggcctgctggcatcttttctttcttctcatgcccgtcctccttatttagccaacggaattgaactcttcagaaaagggaagctagagataggcactaaggttgcagagttttgttcacatgctttgcttgctttggatgtccttgtccaccctcgagccctttctctggaaagaacagttcctgcaagctctgggttcaactacactgcacagaaaaaaacagtttttggtgctggtacacaccagatctcaccatttggggaccagcctcaagcaatggaggtcgaagacatgtacgatgactggctaatatccaacaacaatgaaccaccagaggttccagtgaacggtagtgatgctgtggtaagtaaaggtgtgctggtggaggatggaaagcagctcaatcccatagcagaagatccaaaagtcgacccacccagaatcacagacgcagcacaagatgcaccagcatccaccaagactgatgtcaaggtggtcgatgcagctgcagccacagctgccaagccaaacacagcggagaatccttcgagttccaatgctgtcccctctccagtgcgcacaacagattctgattcacgtaagcatgcgtcatttcccgagcaggatagtcctcatgagaacaaaagcgcagccgtccatccaggtgaagcttctgcgactccaggtgttggttcaagccaccaccgccatgaagcacctgaggcccgttcagccagcttcacggaattgtttggttctgagtctggcatcgaatcagagtccgaagacttgatgccagatatcgtcgacggggaccctgactctgactaggtttgccgtcgtcatttgtgacatggcaatggaaattttgtgatgttcctgttttgttttgagcaaattgtacgacattgccggctgacagatgatgcagtatttgattgatagatatagatggagctaaattttgtgatgttcctgttttgttttaccaccaaaaatttgctcaatctgattggatttagaggcacgccggtgaatagaataaagtgcaaacaaagtatttcga

SEQ ID NO: 49388 - DNA, 1619 bp, Zea Mays
gagcagggaacaagagtacaagacgagcaacaggacaatccaaccaaccctttccattcccaatcttcccgtctccaagtctccggtctcgaatccctcccttccagaacaagacacctgacgccgccgcccccccgccggccgcacccgtccataccataccataccatacctccggccgctcgtctcctatctcgtcaccttcgcccggcgctcagatctccgccgcgcctctgcctgatccccccacccccattggagggagacacatcccgcgtgggcgcacgaggacctggtttttttatcaaatgcttgacaaaatgcttgcttggtgatgtctggctatgatttgggtcctgtttatcatgcagttggcttctcatggcactcaaacagaagagacgatgcagtttgtgccccattgtgatcatgcagaagtgtcagattcacagtcaacaagttcacaactaaacctgatagagagatcaacagagcatctagcctcatgtgaaatcaacccagtgagcgttgatgatgacaacgacaatgaacatatcgatgccaatgaagaaactcaccttgttattcaggacgttcctcaatgccggatttgccttgatagtgaaggtgatgacttgattgcgccctgccgttgcaagggaacgcagaagtatgtccataggtcctgtcttgataactggagatcaacaaaggtagttgctttcatgggtatggtgatttacagattttatggagatgaactgcgcgaaatgtttggttatgaagagcacccatatgctttctatgccatggcgatactggctattgttttggttggtttgctgtatgggttcttcattgctataatatgtggacagaggataactgaacggcattaccatgttcttgcaaagcaagagttaaccaaggagtatattgtagaagatcttgaaggagctgaccatgtgccagaccttgatcctagccatgttatagagttgaagatattaggactatattaaacatagctgcatattacatcagataaacattgttgatgaatggggaacagcataccggaaacaaatctcaggttgatgttgcaagaaatacgtacgtcattccacttcacctggagacagtgcaaaatgggcctttgtgtgactgtcgcccataaattcttgtgaagcaaaacacacttgctcattcgaagaacaccatttgaagattctttggttccaatgtaggcctgatagctctcaaacaagataataacattcatcgccgcacatctcaacgaatgaagattatcgtgaaagaagcgctaggatgatggtctcaatggacatttttgtaaagtagtagcatattatattcttttctcccttgcttcagatacacaacaaacatgcaacagccaagatgctaatgccccgtttgttgtacataccctgtaaaacattactgccaaactcgcagtactttgtccttttgattattttcatcgaatcgatgaactaaataatgtaacctggagctggagccgctcaaaagtctacacgcgcttcagaaaacgggattgatgtgaggcttgtgctggatcgcttcactttgctgcc

SEQ ID NO: 49389 - DNA, 1622 bp, Zea Mays
caggacaatccaaccaaccctttccattcccaatcttcccgtctccaagtctccggtctcgaatccctcccttccagaacaagacacctgacgccgccgcccccccgccggccgcacccgtccataccataccataccatacctccggccgctcgtctcctatctcgtcaccttcgcccggcgctcagatctccgccgcgcctctgcctgatccccccacccccattggagggagacacatcccgcgtgggcgcacgagttggcttctcatggcactcaaacagaagagacgatgcagtttgtgccccattgtgatcatgcagaagtgtcagattcacagtcaacaagttcacaactaaacctgatagagagatcaacagagcatctagcctcatgtgaaatcaacccagtgagcgttgatgatgacaacgacaatgaacatatcgatgccaatgaagaaactcaccttgttattcaggacgttcctcaatgccggatttgccttgatagtgaaggtgatgacttgattgcgccctgccgttgcaagggaacgcagaagtatgtccataggtcctgtcttgataactggagatcaacaaaggaaggttttgcattttcacattgcactgaatgtcgagctgcattctttcttcgtgcaaatgttcctccagatcgatggtggttaagattgaagtttcaacttctggttgttagggatcacacactaatcttctttattgtgcaactgattttatggagatgaactgcgcgaaatgtttggttatgaagagcacccatatgctttctatgccatggcgatactggctattgttttggttggtttgctgtatgggttcttcattgctataatatgtggacagaggataactgaacggcattaccatgttcttgcaaagcaagagttaaccaaggagtatattgtagaagatcttgaaggagctgaccatgtgccagaccttgatcctagccatgttatagagttgaagatattaggactatattaaacatagctgcatattacatcagataaacattgttgatgaatggggaacagcataccggaaacaaatctcaggttgatgttgcaagaaatacgtacgtcattccacttcacctggagacagtgcaaaatgggcctttgtgtgactgtcgcccataaattcttgtgaagcaaaacacacttgctcattcgaagaacaccatttgaagattctttggttccaatgtaggcctgatagctctcaaacaagataataacattcatcgccgcacatctcaacgaatgaagattatcgtgaaagaagcgctaggatgatggtctcaatggacatttttgtaaagtagtagcatattatattcttttctcccttgcttcagatacacaacaaacatgcaacagccaagatgctaatgccccgtttgttgtacataccctgtaaaacattactgccaaactcgcagtactttgtccttttgattattttcatcgaatcgatgaactaaataatgtaacctggagctggagccgctcaaaagtctacacgcgcttcagaaaacgggattgatgtgaggcttgtgctggatcgcttcactttgctgcc

SEQ ID NO: 49390 - DNA, 1654 bp, Zea Mays
caggacaatccaaccaaccctttccattcccaatcttcccgtctccaagtctccggtctcgaatccctcccttccagaacaagacacctgacgccgccgcccccccgccggccgcacccgtccataccataccataccatacctccggccgctcgtctcctatctcgtcaccttcgcccggcgctcagatctccgccgcgcctctgcctgatccccccacccccattggagggagacacatcccgcgtgggcgcacgagttggcttctcatggcactcaaacagaagagacgatgcagtttgtgccccattgtgatcatgcagaagtgtcagattcacagtcaacaagttcacaactaaacctgatagagagatcaacagagcatctagcctcatgtgaaatcaacccagtgagcgttgatgatgacaacgacaatgaacatatcgatgccaatgaagaaactcaccttgttattcaggacgttcctcaatgccggatttgccttgatagtgaaggtgatgacttgattgcgccctgccgttgcaagggaacgcagaagtatgtccataggtcctgtcttgataactggagatcaacaaaggaaggttttgcattttcacattgcactgaatgtcgagctgcattctttcttcgtgcaaatgttcctccagatcgatggtggttaagattgaagtttcaacttctggttgttagggatcacacactaatcttctttattgtgcaactggtagttgctttcatgggtatggtgatttacagattttatggagatgaactgcgcgaaatgtttggttatgaagagcacccatatgctttctatgccatggcgatactggctattgttttggttggtttgctgtatgggttcttcattgctataatatgtggacagaggataactgaacggcattaccatgttcttgcaaagcaagagttaaccaaggagtatattgtagaagatcttgaaggagctgaccatgtgccagaccttgatcctagccatgttatagagttgaagatattaggactatattaaacatagctgcatattacatcagataaacattgttgatgaatggggaacagcataccggaaacaaatctcaggttgatgttgcaagaaatacgtacgtcattccacttcacctggagacagtgcaaaatgggcctttgtgtgactgtcgcccataaattcttgtgaagcaaaacacacttgctcattcgaagaacaccatttgaagattctttggttccaatgtaggcctgatagctctcaaacaagataataacattcatcgccgcacatctcaacgaatgaagattatcgtgaaagaagcgctaggatgatggtctcaatggacatttttgtaaagtagtagcatattatattcttttctcccttgcttcagatacacaacaaacatgcaacagccaagatgctaatgccccgtttgttgtacataccctgtaaaacattactgccaaactcgcagtactttgtccttttgattattttcatcgaatcgatgaactaaataatgtaacctggagctggagccgctcaaaagtctacacgcgcttcagaaaacgggattgatgtgaggcttgtgctggatcgcttcactttgctgcc

SEQ ID NO: 49391 - DNA, 1624 bp, Zea Mays
caggacaatccaaccaaccctttccattcccaatcttcccgtctccaagtctccggtctcgaatccctcccttccagaacaagacacctgacgccgccgcccccccgccggccgcacccgtccataccataccataccatacctccggccgctcgtctcctatctcgtcaccttcgcccggcgctcagatctccgccgcgcctctgcctgatccccccacccccattggagggagacacatcccgcgtgggcgcacgaggacctggtttttttatcaaatgcttgacaaaatgcttgcttggtgatgtctggctatgatttgggtcctgtttatcatgcagttggcttctcatggcactcaaacagaagagacgatgcagtttgtgccccattgtgatcatgcagaagtgtcagattcacagtcaacaagttcacaactaaacctgatagagagatcaacagagcatctagcctcatgtgaaatcaacccagtgagcgttgatgatgacaacgacaatgaacatatcgatgccaatgaagaaactcaccttgttattcaggacgttcctcaatgccggatttgccttgatagtgaaggtgatgacttgattgcgccctgccgttgcaagggaacgcagaagtatgtccataggtcctgtcttgataactggagatcaacaaaggaaggttttgcattttcacattgcactgaatgtcgagctgcattctttcttcgtgcaaatgttcctccagatcgatggtggttaagattgaagtttcaacttctggttgttagggatcacacactaatcttctttattgtgcaactggtagttgctttcatgggtatggtgatttacagattttatggagatgaactgcgcgaaatgtttggttatgaagagcacccatatgctttctatgccatggcgatactggctattgttttggttggtttgctgtatgggttcttcattgctataatatgtggacagaggataactgaacggcattaccatgttcttgcaaagcaagagttaaccaaggagtatattgtagaagatcttgaaggagctgaccatgtgccagaccttgatcctagccatgttatagagttgaagatattaggactatattaaacatagctgcatattacatcagataaacattgttgatgaatggggaacagcataccggaaacaaatctcaggttgatgttgcaagaaatacgcctgatagctctcaaacaagataataacattcatcgccgcacatctcaacgaatgaagattatcgtgaaagaagcgctaggatgatggtctcaatggacatttttgtaaagtagtagcatattatattcttttctcccttgcttcagatacacaacaaacatgcaacagccaagatgctaatgccccgtttgttgtacataccctgtaaaacattactgccaaactcgcagtactttgtccttttgattattttcatcgaatcgatgaactaaataatgtaacctggagctggagccgctcaaaagtctacacgcgcttcagaaaacgggattgattaccttgggacctgggatgtgctgctgaaatcaggagcactcctgcctcgatgcttg

SEQ ID NO: 49392 - DNA, 1670 bp, Zea Mays
caggacaatccaaccaaccctttccattcccaatcttcccgtctccaagtctccggtctcgaatccctcccttccagaacaagacacctgacgccgccgcccccccgccggccgcacccgtccataccataccataccatacctccggccgctcgtctcctatctcgtcaccttcgcccggcgctcagatctccgccgcgcctctgcctgatccccccacccccattggagggagacacatcccgcgtgggcgcacgaggacctggtttttttatcaaatgcttgacaaaatgcttgcttggtgatgtctggctatgatttgggtcctgtttatcatgcagttggcttctcatggcactcaaacagaagagacgatgcagtttgtgccccattgtgatcatgcagaagtgtcagattcacagtcaacaagttcacaactaaacctgatagagagatcaacagagcatctagcctcatgtgaaatcaacccagtgagcgttgatgatgacaacgacaatgaacatatcgatgccaatgaagaaactcaccttgttattcaggacgttcctcaatgccggatttgccttgatagtgaaggtgatgacttgattgcgccctgccgttgcaagggaacgcagaagtatgtccataggtcctgtcttgataactggagatcaacaaaggaaggttttgcattttcacattgcactgaatgtcgagctgcattctttcttcgtgcaaatgttcctccagatcgatggtggttaagattgaagtttcaacttctggttgttagggatcacacactaatcttctttattgtgcaactggtagttgctttcatgggtatggtgatttacagattttatggagatgaactgcgcgaaatgtttggttatgaagagcacccatatgctttctatgccatggcgatactggctattgttttggttggtttgctgtatgggttcttcattgctataatatgtggacagaggataactgaacggcattaccatgttcttgcaaagcaagagttaaccaaggagtatattgtagaagatcttgaaggagctgaccatgtgccagaccttgatcctagccatgttatagagttgaagatattaggactatattaaacatagctgcatattacatcagataaacattgttgatgaatggggaacagcataccggaaacaaatctcaggttgatgttgcaagaaatacgcctgatagctctcaaacaagataataacattcatcgccgcacatctcaacgaatgaagattatcgtgaaagaagcgctaggatgatggtctcaatggacatttttgtaaagtagtagcatattatattcttttctcccttgcttcagatacacaacaaacatgcaacagccaagatgctaatgccccgtttgttgtacataccctgtaaaacattactgccaaactcgcagtactttgtccttttgattattttcatcgaatcgatgaactaaataatgtaacctggagctggagccgctcaaaagtctacacgcgcttcagaaaacgggattgatgtgaggcttgtgctggatcgcttcactttgctgccatcataatttgtaccttgggacctgggatgtgctgctgaaatcaggagcactcctgcctcgatgcttg

SEQ ID NO: 49393 - DNA, 2052 bp, Zea Mays
caggacaatccaaccaaccctttccattcccaatcttcccgtctccaagtctccggtctcgaatccctcccttccagaacaagacacctgacgccgccgcccccccgccggccgcacccgtccataccataccataccatacctccggccgctcgtctcctatctcgtcaccttcgcccggcgctcagatctccgccgcgcctctgcctgatccccccacccccattggagggagacacatcccgcgtgggcgcacgaggacctggtttttttatcaaatgcttgacaaaatgcttgcttggtgatgtctggctatgatttgggtcctgtttatcatgcagttggcttctcatggcactcaaacagaagagacgatgcagtttgtgccccattgtgatcatgcagaagtgtcagattcacagtcaacaagttcacaactaaacctgatagagagatcaacagagcatctagcctcatgtgaaatcaacccagtgagcgttgatgatgacaacgacaatgaacatatcgatgccaatgaagaaactcaccttgttattcaggacgttcctcaatgccggatttgccttgatagtgaaggtgatgacttgattgcgccctgccgttgcaagggaacgcagaagtatgtccataggtcctgtcttgataactggagatcaacaaaggaaggttttgcattttcacattgcactgaatgtcgagctgcattctttcttcgtgcaaatgttcctccagatcgatggtggttaagattgaagtttcaacttctggttgttagggatcacacactaatcttctttattgtgcaactgattttatggagatgaactgcgcgaaatgtttggttatgaagagcacccatatgctttctatgccatggcgatactggctattgttttggttggtttgctgtatgggttcttcattgctataatatgtggacagaggataactgaacggcattaccatgttcttgcaaagcaagagttaaccaaggagtatattgtagaagatcttgaaggagctgaccatgtgccagaccttgatcctagccatgttatagagttgaagatattaggactatattaaacatagctgcatattacatcagataaacattgttgatgaatggggaacagcataccggaaacaaatctcaggttgatgttgcaagaaatacgtacgtcattccacttcacctggagacagtgcaaaatgggcctttgtgtgactgtcgcccataaattcttgtgaagcaaaacacacttgctcattcgaagaacaccatttgaagattctttggttccaatgtaggcctgatagctctcaaacaagataataacattcatcgccgcacatctcaacgaatgaagattatcgtgaaagaagcgctaggatgatggtctcaatggacatttttgtaaagtagtagcatattatattcttttctcccttgcttcagatacacaacaaacatgcaacagccaagatgctaatgccccgtttgttgtacataccctgtaaaacattactgccaaactcgcagtactttgtccttttgattattttcatcgaatcgatgaactaaataatgtaacctggagctggagccgctcaaaagtctacacgcgcttcagaaaacgggattgattaccttgggacctgggatgtgctgctgaaatcaggagcactcctgcctcgatgcttgcattattaatagagaacacggcaggcacctggaggtggtggccatcaacaacaatcccgtggaaccatgtcatcgcaaatgctatcgaggtcctagatttccaattgaaagtgaagctgattcttgacggcttgttaagaagaatattccaggcagagctaacctccagtgcctgccaagcgtgtgaatcgccatcacgtggatctgcttccgcatgaactttctccagaaaacgccatgatgtcaccacggcacgaccactgtaagttatgtccttctaacttcatttatagcgctgtcaatcagccatgacccatgaatccatg

SEQ ID NO: 49394 - DNA, 688 bp, Zea Mays
agagctcgacggtcacctccatggggacgtggatggatggcgaagataaacattgttgatgaatggggaacagcataccggaaacaaatctcaggttgatgttgcaagaaatacgtacgtcattccacttcacctggagacagtgcaaaatgggcctttgtgtgactgtcgcccataaattcttgtgaagcaaaacacacttgctcattcgaagaacaccatttgaagattctttggttccaatgtaggcctgatagctctcaaacaagataataacattcatcgccgcacatctcaacgaatgaagattatcgtgaaagaagcgctaggatgatggtctcaatggacatttttgtaaagtagtagcatattatattcttttctcccttgcttcagatacacaacaaacatgcaacagccaagatgctaatgccccgtttgttgtacataccctgtaaaacattactgccaaactcgcagtactttgtccttttgattattttcatcgaatcgatgaactaaataatgtaacctggagctggagccgctcaaaagtctacacgcgcttcagaaaacgggattgatgtgaggcttgtgctggatcgcttcactttgctgccatcataatttgtaccttgggacctgggatgtgctgctgaaatcaggagcactcctgcctcgatgcttg

SEQ ID NO: 49395 - DNA, 614 bp, Zea Mays
ggacatgtacatctcttgcagaaaatatatgaagagttgataaacattgttgatgaatggggaacagcataccggaaacaaatctcaggttgatgttgcaagaaatacgtacgtcattccacttcacctggagacagtgcaaaatgggcctttgtgtgactgtcgcccataaattcttgtgaagcaaaacacacttgctcattcgaagaacaccatttgaagattctttggttccaatgtaggcctgatagctctcaaacaagataataacattcatcgccgcacatctcaacgaatgaagattatcgtgaaagaagcgctaggatgatggtctcaatggacatttttgtaaagtagtagcatattatattcttttctcccttgcttcagatacacaacaaacatgcaacagccaagatgctaatgccccgtttgttgtacataccctgtaaaacattactgccaaactcgcagtactttgtccttttgattattttcatcgaatcgatgaactaaataatgtaacctggagctggagccgctcaaaagtctacacgcgcttcagaaaacgggattgatgtgaggcttgtgctggatcgcttcactttgctgcc

SEQ ID NO: 49396 - DNA, 242 bp, Zea Mays
acaggaatggtggcctgtggtcaccaaaggggcatcaaatatggctagtggtctcatgatctctttgcaatcccttggatgtacgattgcttgtttcgagctagaaacagtaacatatgtagcaactccacacagtgcaaaacaaaaaagaaaacagatgagcaactaatggaaggattttgttaagagaagctgattacgaagggcagggtctttatctgttcggctacaatttagaattc

SEQ ID NO: 49397 - DNA, 206 bp, Zea Mays
ccagaaccaagacatgtgttttttcatgaaccccatataaacagccacagtggcaataacaaatggtctggaatgtggcaaaccttagaaatgttctcttcagactcacaattcgctatcaaataactgaatgtctcagaatctggttttactccagcaatctgcatttgagacatgaccatttgtgctccattgtagtttttctg

SEQ ID NO: 49398 - DNA, 997 bp, Zea Mays
cgggcgcgggcgtggagaccgaccaccacggcaccacctcctcctccggttgcctccggcctcgccatccctctgtcctcgacttccctccgtcctcccggtctccagcctcccggaccggaagctccacgtggcgcgacagctcgtctctgtcgtctatggcggcggcagaggtgtactcgccgatcgcggcggcggcggcgcagcagcagcgggagaaggcgacgtcgcagatctggcgggcggtggtggggtggtggggtggatcgacgaaacgccgctcccgccgggacgtccgcgcctacaacaccgtgctacacgcgctctcccgcgcgggccagtcaaacttcctcagcacaaaatttatgatctctaacatgcagtcgccttataatggggctgtagtccctcatgctggccggacaaatcggagattcgactccaggaatgtctccctaagggaggtctcccgtaaagtgccaactggtctgcaattaggggatgcaagcaacttggggatgagcgacgaggagctcatggagcagtgcgatatgggcacgttcaaggcgtccggccccggcggccagcaccgcaacaagcgcgagtccgccgtccggctgaaacaccttcccaccggcatcatcgcccagaaaaggaactatagtgcttcagttaggaggccgataaacctggaagactacactccacctgttgagattcttcagatattacccctgaagtccagcgttagaggaaaagatgttggcccccaaatcggtccaaataactcaaaattttctccagaaatgcaagcattattagacctattgtttgctgttgaaggttctgtatcagatgcagcaaagattttaggcctaagcactggtgctttgtcaagattgattctgtcagatgattctctccgaacagccgcgaatgaactgcgagcttcgaagaggagcgagctgaatagcgtgctataagttcctaccgggct

SEQ ID NO: 49399 - DNA, 754 bp, Zea Mays
aggctgtacaaaaatctgtctgttctccctttatttgtacaaaccaggctctctagagcatattgcagaagctggtaatgatcaaatgtgttggcggattgtgtcgacggccaaggcactgtcaaatctcctcctcgttcgcatgagaaatttcaaacggataacaaattttcaccaataagccactaaaaactgagaactcgaaggacagacaggcacggtgtaaataactaaatagcactggacgatctgagacagaattagaacaccgtcctaatatacacatggacacacactacaaaatttgttttgagccatacagctcagtccaaaacaaagatggctggcaccaggtggtgcccaaaaccagctttctctccatcactgtccatccgtgcctacagaaccggaacagcctggtccatggagacaatagcgtgtcattttcagtgcaagctgggtgcatctgatgcgcacgagtgaacttaattcacagaccccgtccacattagacacctttgtctcaaagtatcatcagtccagcaaagaccagccgtcggtctctgccaaataccaaatgaaaacggcaactcctacgcggttcatcttctctcgaccttctctgcaaaataccaaataaaaaaggcggcaactcctacggttcatctcctctcggccttttctgtcccttcgttccaaaaagaactacagcgctaacttgcctccaagcatccgtatccgacgtgtaaacagg

SEQ ID NO: 49400 - DNA, 1108 bp, Zea Mays
aaacaaaaaaatatggaaactaagttcaatacaatttactaactacaaagtaattagatggtagtgcaacaagttgctaatacttactgaaacgagtattattagaaagtgctgcgcccagtttgataagttgctccaaaagaatgacaccttcgtccaccattgcaatctaggttctgggtagagtgcttgtgctttaactaaaactcacacccagacccgattacaaactcatatttcacatttttccttttccttttttattaaaaaaaagaaccattatggcagtcagtgagtcagtttataccacctgagcgaccagtacaccacttcatgtgtacccgagtaaagtacacacatgaggacatatcttgtgtgctttccttatgacacactgccctcgactaacccccaacaaaggtacatagtcaggtaatgttagggtctgatagccgtaacgaaaaacatgttcaaagcatctacagaaggaaaaagaagtaagggctagtttggaaacccaattttcccaagggaaattagttcatttttccttggaaaaattgaaatcccttgggaaaatagtgttaccaaactagtccttaagtagttaatgtatccgtgaaaataaagtgaaaaggtcagttaggggccatgctggaaaataataggcaagtacaggattggttctacccaatgaatgtgaaagccgttgcagcaaaggtagggattattatatattaaaaattattatatatatatagtaaacttcctccttcggttgctcctgtcatttaaggacccactaatatataatataccaaacatatagcttaaggatgaatggtcataattcgttatcgttagtgataaataacagtttgtcccctgaattggtgatttcagataaggcaagtgatctacattctcttaccaatcatacttcacacacacacacacaaaagaaaatcgccccctttgtgtaggatgcatataaaacctcatatggatattgggtgatgcgacgaaggcatcaggcaagtaagtagccatgcattacattgcacatgtcattacctgccactcgttcttggcatgagactggcggagg

SEQ ID NO: 49401 - DNA, 208 bp, Zea Mays
atggtaacaacatcggatctgctccgtagaccactcgaagactcaggcttggaatcagaaacttacggcacgagcctctgcgggtcgcgcgggaacagggaggtcttcctgatgttgttcagggcacagaacagcatcaccaccctctccaaacccaccccgaaaccgccgtgtggcggcacgccatagctacagtggacagggaaac

SEQ ID NO: 49402 - DNA, 2934 bp, Zea Mays
gacgcatccataaagatatcccgcaccgaatttcccccaatttccggaggaggacgctgccggctgccccaccccgtcccctaccttcgtagttcctccctctttttctctctctctccttcatcagcttcgccctccacctccatcctcttctttactttaaagttactcccactagccccagcccccgcgccgtcccatcacccccaatcccagccttctcctcctcgacgacaccacacgcccccaaaaaatcccccttcgcctcggattcccacgcggccctcgagtcgccggcgcccgccgacgccacagcgaggtggttccgttcaaggcttgggaggcggaagtagggagcgggaggatccgttcgcgtccagcgcccgttgacgcgcccatgtcgggccacctcgatcgcttcgcgcggccatgttttgaagggcgctcaagtcatgatgaatgcagagaccataagtcagactttgaagtctctgaagacgaaaagaagaccagaatgggctctttgaagaaaaaagcaatagatgcatcaactaagattaggcattcattaaagaagaacaggaggaagagtggtagccgggtcctttctgtgtctattgaggatgtgcgtgatctagaggagctgcaagctgttgaagcatttagacaagcactactcttggatgagctgttgcctgcaagacacgatgactatcatatgatgctgagatttctaaaagcaaggaaatttgatatcgacaaagcaaagcaaatgtggatggatatgcttcattggcggagggagtatggcactgatacgattttggaggacttcgaatacactgagttggacgctgttttgcaatattatcctcatggttatcatggagttgacaaagaggggagacccgtttatattgaaaggcttggaaagcttgctctgttgctgcaaaaaggcacattgattccagcacaacaattctggatgtccagggcgtgggtttgaaaaatttcagcaaaactgcacgtgaattaattcagcgactgcagaaaattgacaatgataactacccagagactctataccaaatgtttattgtcaatgctggtccgggtttccggctactatggaacactgtgaagtcctttcttgatcccaaaactaccgccaagatacatgttcttgggaacaaataccaaagtaagctgcttgaaataattgacgccagtgaattgccggaattccttggtggcacttgtacctgtcctgaatacggaggctgccttaaggctgaaaagggaccatggaaggacccaaacatacttaagatagtccaaagtggtgaggttcattgtgctcgtcaaattgtaactatttccaatggtgaagaaaaaattattacttatgccaaaccgaagcaccattcaatgcgagggagtgacacatcaactgctgagtctggctcagaagctgacgatgctatctcccccaaagctctcagaagttacatacaacatcctaagttgaccccagttcgtgaagaggtcaaaattgtcagggctacgagcttttctactcgtctccctgaatatgatgtacctgttgttgacaaggctgtggatgctacatggagaagagagcagccacgaaagataccattcatgccccaagactcttctgtgaaaactatgtccaggccatctgattcctcctgggataagatcgttgcaactctgatggcttgtcttatggctattgtaatgttggttcgatcagtcaaagatcttgtcacaaggagattgccatataaaggcgggtcagaagaaatccactctacgctgtacccagaccccatccagaaagaggaattccgtcctccttctccgatccctggatttgctgaagccgacctgttcgccgtggtcttgcaaaggctgggagagcttgaagagaaggttcagatgcttcaagaaaagccttccgaaatgccttgcgagaaagaagagttgcttaacgccgctgtgcgtcgtgtcgatgcattggaagccgaactaattgtaacaaagaaggctttgcacgaggctcttatcaggcaagaggaactgcttgcgtacatcgaccgcaaagagattgccaaggctcagagaaagaagaaagcaatgctttgctactaggacaaggagggagatacttctgcttcctcagaggagatgccaaagatggcgcctgagatgtaaccagcgatccccttcattttcctgacacttgtgaatcttctacaagtttccgttgtaaatcgagaatattctgacatgaataaagtgttttttggcatcatgagctttgctgcctccggtcttgcaatctggttgttcgttgcagcataattggttggttggttgggtggccttagccgagccgataatatggccagctgttgactctaagcaggggcatggctcgtgctggaagagcgttggtgtgatggagaggtaaatctcgatcgcatgtttcttggctgggtttgcttcttagctcctgtaccaacagctaataagtgtttagttggttttatctggatggtgacggctaataactaatgtctatttaaaacttacagataattttagctgctaactattaggggtgtttgatgttttagtcactttgacccggtttgtttaccctctagattatgggcatgtttggtttgtggctaaatgtgccacactttgcctaaggttagtcgttcgaattgaataactaaccttaggcacaaaagttagacaaagtgtggcaattgaggtaaccaaccaaacatgccttatataatccagcttaaataagtttaaaggtaaataaagaattcagattattagatggattatgtaatctagatacatagattatgataatccataaacagctcaata

SEQ ID NO: 49403 - DNA, 2291 bp, Zea Mays
ccggctgccccaccccgtcccctaccttcgtagttcctccctctttttctctctctctccttcatcagcttcgccctccacctccatcctcttctttactttaaagttactcccactagccccagcccccgcgccgtcccatcacccccaatcccagccttctcctcctcgacgacaccacacgcccccaaaaaatcccccttcgcctcggattcccacgcggccctcgagtcgccggcgcccgccgacgccacagcgaggttttgaagggcgctcaagtcatgatgaatgcagagaccataagtcagactttgaagtctctgaagacgaaaagaagaccagaatgggctctttgaagaaaaaagcaatagatgcatcaactaagattaggcattcattaaagaagaacaggaggaagagtggtagccgggtcctttctgtgtctattgaggatgtgcgtgatctagaggagctgcaagctgttgaagcatttagacaagcactactcttggatgagctgttgcctgcaagacacgatgactatcatatgatgctgagatttctaaaagcaaggaaatttgatatcgacaaagcaaagcaaatgtggatggatatgcttcattggcggagggagtatggcactgatacgattttggaggacttcgaatacactgagttggacgctgttttgcaatattatcctcatggttatcatggagttgacaaagaggggagacccgtttatattgaaaggcttggaaaggttgaccctagcaaacttatgaatgtcacaacgatggatcgatatgtgcgataccatgtgaaggagtttgagaggagcttcttgattaaatttccagcttgctctgttgctgcaaaaaggcacattgattccagcacaacaattctggatgtccagggcgtgcaaaactgcacgtgaattaattcagcgactgcagaaaattgacaatgataactacccagagactctataccaaatgtttattgtcaatgctggtccgggtttccggctactatggaacactgtgaagtcctttcttgatcccaaaactaccgccaagatacatgttcttgggaacaaataccaaagtaagctgcttgaaataattgacgccagtgaattgccggaattccttggtggcacttgtacctgtcctgaatacggaggctgccttaaggctgaaaagggaccatggaaggacccaaacatacttaagatagtccaaagtggtgaggttcattgtgctcgtcaaattgtaactatttccaatggtgaagaaaaaattattacttatgccaaaccgaagcaccattcaatgcgagggagtgacacatcaactgctgagtctggctcagaagctgacgatgctatctcccccaaagctctcagaagttacatacaacatcctaagttgaccccagttcgtgaagaggtcaaaattgtcagggctacgagcttttctactcgtctccctgaatatgatgtacctgttgttgacaaggctgtggatgctacatggagaagagagcagccacgaaagataccattcatgccccaagatgcagactcttctgtgaaaactatgtccaggccatctgattcctcctgggataagatcgttgcaactctgatggcttgtcttatggctattgtaatgttggttcgatcagtcaaagatcttgtcacaaggagattgccatataaaggcgggtcagaagaaatccactctacgctgtacccagaccccatccagaaagaggaattccgtcctccttctccgatccctggatttgctgaagccgacctgttcgccgtggtcttgcaaaggctgggagagcttgaagagaaggttcagatgcttcaagaaaagccttccgaaatgccttgcgagaaagaagagttgcttaacgccgctgtgcgtcgtgtcgatgcattggaagccgaactaattgtaacaaagaaggctttgcacgaggctcttatcaggcaagaggaactgcttgcgtacatcgaccgcaaagagattgccaaggctcagagaaagaagaaagcaatgctttgctactaggacaaggagggagatacttctgcttcctcagaggagatgccaaagatggcgcctgagatgtaaccagcgatccccttcattttcctgacacttgtgaatcttctacaagtttccgttgtaaatcgagaatattctgacatgaataaagtgttttttggcatcatgagctttgctgcctccggtcttgcaatctggttgttc

SEQ ID NO: 49404 - DNA, 2755 bp, Zea Mays
cccaccccgtcccctaccttcgtagttcctccctctttttctctctctctccttcatcagcttcgccctccacctccatcctcttctttactttaaagttactcccactagccccagcccccgcgccgtcccatcacccccaatcccagccttctcctcctcgacgacaccacacgcccccaaaaaatcccccttcgcctcggattcccacgcggccctcgagtcgccggcgcccgccgacgccacagcgaggttttgaagggcgctcaagtcatgatgaatgcagagaccataagtcagactttgaagtctctgaagacgaaaagaagaccagaatgggctctttgaagaaaaaagcaatagatgcatcaactaagattaggcattcattaaagaagaacaggaggaagagtggtagccgggtcctttctgtgtctattgaggatgtgcgtgatctagaggagctgcaagctgttgaagcatttagacaagcactactcttggatgagctgttgcctgcaagacacgatgactatcatatgatgctgagatttctaaaagcaaggaaatttgatatcgacaaagcaaagcaaatgtggatggatatgcttcattggcggagggagtatggcactgatacgattttggaggacttcgaatacactgagttggacgctgttttgcaatattatcctcatggttatcatggagttgacaaagaggggagacccgtttatattgaaaggcttggaaagcttgctctgttgctgcaaaaaggcacattgattccagcacaacaattctggatgtccagggcgtgggtttgaaaaatttcagcaaaactgcacgtgaattaattcagcgactgcagaaaattgacaatgataactacccagagactctataccaaatgtttattgtcaatgctggtccgggtttccggctactatggaacactgtgaagtcctttcttgatcccaaaactaccgccaagatacatgttcttgggaacaaataccaaagtaagctgcttgaaataattgacgccagtgaattgccggaattccttggtggcacttgtacctgtcctgaatacggaggctgccttaaggctgaaaagggaccatggaaggacccaaacatacttaagatagtccaaagtggtgaggttcattgtgctcgtcaaattgtaactatttccaatggtgaagaaaaaattattacttatgccaaaccgaagcaccattcaatgcgagggagtgacacatcaactgctgagtctggctcagaagctgacgatgctatctcccccaaagctctcagaagttacatacaacatcctaagttgaccccagttcgtgaagaggtcaaaattgtcagggctacgagcttttctactcgtctccctgaatatgatgtacctgttgttgacaaggctgtggatgctacatggagaagagagcagccacgaaagataccattcatgccccaagactcttctgtgaaaactatgtccaggccatctgattcctcctgggataagatcgttgcaactctgatggcttgtcttatggctattgtaatgttggttcgatcagtcaaagatcttgtcacaaggagattgccatataaaggcgggtcagaagaaatccactctacgctgtacccagaccccatccagaaagaggaattccgtcctccttctccgatccctggatttgctgaagccgacctgttcgccgtggtcttgcaaaggctgggagagcttgaagagaaggttcagatgcttcaagaaaagccttccgaaatgccttgcgagaaagaagagttgcttaacgccgctgtgcgtcgtgtcgatgcattggaagccgaactaattgtaacaaagaaggctttgcacgaggctcttatcaggcaagaggaactgcttgcgtacatcgaccgcaaagagattgccaaggctcagagaaagaagaaagcaatgctttgctactaggacaaggagggagatacttctgcttcctcagaggagatgccaaagatggcgcctgagatgtaaccagcgatccccttcattttcctgacacttgtgaatcttctacaagtttccgttgtaaatcgagaatattctgacatgaataaagtgttttttggcatcatgagctttgctgcctccggtcttgcaatctggttgttcgttgcagcataattggttggttggttgggtggccttagccgagccgataatatggccagctgttgactctaagcaggggcatggctcgtgctggaagagcgttggtgtgatggagaggtaaatctcgatcgcatgtttcttggctgggtttgcttcttagctcctgtaccaacagctaataagtgtttagttggttttatctggatggtgacggctaataactaatgtctatttaaaacttacagataattttagctgctaactattaggggtgtttgatgttttagtcactttgacccggtttgtttaccctctagattatgggcatgtttggtttgtggctaaatgtgccacactttgcctaaggttagtcgttcgaattgaataactaaccttaggcacaaaagttagacaaagtgtggcaattgaggtaaccaaccaaacatgccttatataatccagcttaaataagtttaaaggtaaataaagaattcagattattagatggattatgtaatctagatacatagattatgataatccataaacagctcaata

SEQ ID NO: 49405 - DNA, 2302 bp, Zea Mays
ctaccttcgtagttcctccctctttttctctctctctccttcatcagcttcgccctccacctccatcctcttctttactttaaagttactcccactagccccagcccccgcgccgtcccatcacccccaatcccagccttctcctcctcgacgacaccacacgcccccaaaaaatcccccttcgcctcggattcccacgcggccctcgagtcgccggcgcccgccgacgccacagcgaggtggttccgttcaaggcttgggaggcggaagtagggagcgggaggatccgttcgcgtccagcgcccgttgacgcgcccatgtcgggccacctcgatcgcttcgcgcggccatgttttgaagggcgctcaagtcatgatgaatgcagagaccataagtcagactttgaagtctctgaagacgaaaagaagaccagaatgggctctttgaagaaaaaagcaatagatgcatcaactaagattaggcattcattaaagaagaacaggaggaagagtggtagccgggtcctttctgtgtctattgaggatgtgcgtgatctagaggagctgcaagctgttgaagcatttagacaagcactactcttggatgagctgttgcctgcaagacacgatgactatcatatgatgctgagatttctaaaagcaaggaaatttgatatcgacaaagcaaagcaaatgtggatggatatgcttcattggcggagggagtatggcactgatacgattttggaggacttcgaatacactgagttggacgctgttttgcaatattatcctcatggttatcatggagttgacaaagaggggagacccgtttatattgaaaggcttggaaagcttgctctgttgctgcaaaaaggcacattgattccagcacaacaattctggatgtccagggcgtgggtttgaaaaatttcagcaaaactgcacgtgaattaattcagcgactgcagaaaattgacaatgataactacccagagactctataccaaatgtttattgtcaatgctggtccgggtttccggctactatggaacactgtgaagtcctttcttgatcccaaaactaccgccaagatacatgttcttgggaacaaataccaaagtaagctgcttgaaataattgacgccagtgaattgccggaattccttggtggcacttgtacctgtcctgaatacggaggctgccttaaggctgaaaagggaccatggaaggacccaaacatacttaagatagtccaaagtggtgaggttcattgtgctcgtcaaattgtaactatttccaatggtgaagaaaaaattattacttatgccaaaccgaagcaccattcaatgcgagggagtgacacatcaactgctgagtctggctcagaagctgacgatgctatctcccccaaagctctcagaagttacatacaacatcctaagttgaccccagttcgtgaagaggtcaaaattgtcagggctacgagcttttctactcgtctccctgaatatgatgtacctgttgttgacaaggctgtggatgctacatggagaagagagcagccacgaaagataccattcatgccccaagatgcagactcttctgtgaaaactatgtccaggccatctgattcctcctgggataagatcgttgcaactctgatggcttgtcttatggctattgtaatgttggttcgatcagtcaaagatcttgtcacaaggagattgccatataaaggcgggtcagaagaaatccactctacgctgtacccagaccccatccagaaagaggaattccgtcctccttctccgatccctggatttgctgaagccgacctgttcgccgtggtcttgcaaaggctgggagagcttgaagagaaggttcagatgcttcaagaaaagccttccgaaatgccttgcgagaaagaagagttgcttaacgccgctgtgcgtcgtgtcgatgcattggaagccgaactaattgtaacaaagaaggctttgcacgaggctcttatcaggcaagaggaactgcttgcgtacatcgaccgcaaagagattgccaaggctcagagaaagaagaaagcaatgctttgctactaggacaaggagggagatacttctgcttcctcagaggagatgccaaagatggcgcctgagatgtaaccagcgatccccttcattttcctgacacttgtgaatcttctacaagtttccgttgtaaatcgagaatattctgacatgaataaagtgttttttggcatcatgagctttgctgcctccggtcttgcaatctggttgttc

SEQ ID NO: 49406 - DNA, 1282 bp, Zea Mays
gtcctttcttcctccaactgccacgcggggcccacccttttcatttttcttccccatcttggagaagaagaaggcccgacgctctcaccgctgccaccaaaatcgcacgcgagccccaagagatccccaaaccctacacctgcccgccggcgcactcggggaccgtcgaatcgagcaggttgacggaggagagggagcctcgaagatgttccggaaccagtacgacaccgacgtgacgacatggagcccccaggggcggctgttccaggtggagtacgccatggaggccgtcaagcagggctccgcctgcgtcgggctccggtcgagcacccacgccgtcctagccgccgtcaacaagcccgcctccgagctctcctcctaccagcggaaggtgttccgcgtcgctgaccacgccggggtcgctctcgccggcctcaccgccgacggccgcgttctctcgcgtttcctccgcaacgagtgcatcaaccactccttcgtctacgaggcgccgctccccgtctccaggctcgcgctcaagctcgccgacaaggcgcaggtccgtacgtctccatgcgcatcccagactcccctccctcccgtgatcccgatctcatctcttacgagcccgcggggagaccggaagagtgaaccttaggatttgcatggtttgagtcgctgtacgagtcgggatctgtgcttcagtgaggtgattgtttctccgatctgtgattaaagttatggcgttagggtgttctgcggatgcgatttattagaactttatggcaatacagttttcctactggcttgttcttggtcctcactgttctcagccctccaaaagtctcaagtctgaacttctctctcctaatcttcacatgatgtacttaacattttatatgttagaaaagcttatgtgtttagaatttcaggttgagatgtttacatctaaccgcagacaccaaccatgtgtggtagtattaggctttgcaaatgttgttgagtttgctattttggtgttacagctacttgtggaacactgacactaagttgaacttagagaaacttggtaggtttttaattgatggacaattgaacatgatacctcggttacaccttcttttctcccttagttaaatcatatcagaaattcagcaaagttgattcggatatagcacataaactagctaatttatatgtcgtgcaagtgcaacaaactggcgaaaatatagctcaaccaagaaaagcacaaaagaagctaaatactagttacaattactggaag

SEQ ID NO: 49407 - DNA, 1362 bp, Zea Mays
tcgtctcgtttcagttcctcgtcgccctcgccacttcgccgccgccgctttggctccacccagtccgcttccggcatccgcccatggctgcggcccccgcccgccacctcgccgcggccttcacggccgccgctgcgcaccagcgcgtcgcgttcaggcgcgtccaggtccgggccccggtgtccgcctctctctccttcccgccgcgccatcccgcgacatttcgcggcagggccagcctcgcctgccccgccgccgcctctctatccgtcccctccggcgccgcgcctccgggctccgtgccattcaacctcctgccgcccgactccgaccctttcatcgagtgggacccgcccccgggcgactccgccccctcgccgctcgctggcggcggtgctgccgggggtgccacgctggtcgtgctgctcggctggctcggcgcgcgccagaagcacctgcgccgctacgccgacctctaccgcgagcgcggggtcggcgcggtgcggttcgtcgtgcccgtgcgcgagctcgtcggcctcgacctcggccgccgcgtcgagcgcagggtcgccgacctctccgagcaggtcgccgcgtggtgcgacgccgatcggcgccgcacgctcctcttccacaccttcagcaacaccggatggctcgcctatggtgctgtactggagaatttacaatcaagagctgacctaactgagagaataagaggatgtattgtagactctgcaccagttctagagataagaccagagttccatgactggtcctacgactgaatctcttgatgggcctgttgtaaatggcaccttgaacagagttggctccaatgtgacgcaaccttcatggggtgaatgttttctcctgtcaactctgcggaaattcttcgagattgttctttacgtacctgatgtaaacaagttctctcggtgctttcagagcagcagcctccttgcccgcagttctacctgtacagctcggccgaccgagtcatcccggcggagtgcgtggagcgcttcgtggagtcgcagaggtccctcgggcgcagcgtgttcgcccacgacttcgtctcgtcgccgcacgtggaccactaccggagcttcccccacgtgtactccgccaagatcgacgagttcctcaaggtctgctccacggtcgaggtgtcatgaccaacaggcagggccgtcgaatctatctgtgtttggtctgttactctgttctgagaatggataggtgtttctttgccactcagaaaatctgatggtaggctcccaaagatgtttgcctgaggttattgagatactgtatgcttgctttgtttgagcctgttcgctggctggttgcagcgctgtg

SEQ ID NO: 49408 - DNA, 4302 bp, Zea Mays
tcgtctcgtttcagttcctcgtcgccctcgccacttcgccgccgccgctttggctccacccagtccgcttccggcatccgcccatggctgcggcccccgcccgccacctcgccgcggccttcacggccgccgctgcgcaccagcgcgtcgcgttcaggcgcgtccaggtccgggccccggtgtccgcctctctctccttcccgccgcgccatcccgcgacatttcgcggcagggccagcctcgcctgccccgccgccgcctctctatccgtcccctccggcgccgcgcctccgggctccgtgccattcaacctcctgccgcccgactccgaccctttcatcgagtgggacccgcccccgggcgactccgccccctcgccgctcgctggcggcggtgctgccgggggtgccacgctggtcgtgctgctcggctggctcggcgcgcgccagaagcacctgcgccgctacgccgacctctaccgcgagcgcggggtcggcgcggtgcggttcgtcgtgcccgtgcgcgagctcgtcggcctcgacctcggccgccgcgtcgagcgcagggtcgccgacctctccgagcaggtcgccgcgtggtgcgacgccgatcggcgccgcacgctcctcttccacaccttcagcaacaccggatggctcgcctatggtgctgtactggagaatttacaatcaagagctgacctaactgagagaataagaggatgtattgtagactctgcaccagttctagagataagaccagaggtctgggcggccgggttctctgctgcaatgttaaagaaaagcagttccatgactggtcctacgactgaatctcttgatgggcctgttgtaaatggcaccttgaacagagttggctccaatgtgacgcaaccttcatggggtgaatgttttctcctgtcaactctgcggaaattcttcgagattgttctttacgtacctgatgtaaacaagcggctgtgcaaggttctctcggtgctttcagagcagcagcctccttgcccgcagttctacctgtacagctcggccgaccgagtcatcccggcggagtgcgtggagcgcttcgtggagtcgcagaggtccctcgggcgcagcgtgttcgcccacgacttcgtctcgtcgccgcacgtggaccactaccggagcttcccccacgtgtactccgccaagatcgacgagttcctcaagtgaacaggcggacaggtcaggactcaggagtaggaggagagcagcctcaaaaccaggcgcacgcacccgcgaggccgcgacgccactgaccaaccagccaaaaacccggccgcgcgcctgtttgttcggccggagcgcgccatggccatggaggaggggtcaggagcggtggagaaagggccggccgtgggcacggtggctgacgcctccgccagcgtcatcggcgaaggcgccgtgaaggaggaggccgggggcagacggcagccaccggccggctacgcggccgtcgtgatcggcggcaccttcgaccgcctgcaccagggccaccatctcttcctgaaggcggcagcggagctggcgagggagaggatcgtggtcggcgtctgcgacggccccatgctcgccaagaaacagtacgccgacctgatacaaccgatcgagaagcggatgcagaatgccatggattatattaagttcataaagcccgaccttgatgttcgtgtggagcccatcgtcgaccctttcggcccatccatcgttgaccaaggccttgaggccatcattgtcagcaaggagacgttgccgggaggacacgctgtcaacaggaagagagcagagagagggctcactcagttgcagatcgaggtgatagagctggtgccagaggagtcgacgggggacaagataagttccacggcattcagaaagatggaagccgagagggcgctgcagcaacagaataaacaagatgatacagcagtaggcactccggttggggtgcaaaacatagcggttcagtcacatggagcatagtaatgaaccgaagttcgtactttaacaaaaaatacattaaactttgagctctctacttccatcacatacaaaggcacagtgcttctgtgcccaaacatggactgatcaatacagaaaagttccagtttcttcacatatttagaccgaaggatattctaccaagaaaaaatatgcagccagcctttgcaactttagaccttgttcgtttgtgccggattggtgggtcggaacgatttctaaccgaattgtttctctgatttatataaactttgattagctgaaacgattccggatgcaatcacccgaaacaaacgaacaaagccttagttgtaccacgctcatgcttagatcttcagatctatgaagcatctttagatctatgaaacttacaaatcagaatttgagtcaggtcatcacatttcttcaaattgatgaaacttatacaaatcaggacggattcttgagacttgattcattgaccattaaaaaacaaatcaatcactgttaaaaatacattagcgtttgcacaacattgcaatcaaccagccgtaactataaactacagacccatgaccaagacgatttggatgctccttttgcttcacacaggcaataaactggaggtgcgctagaaacagttgggaaattctggatgatgatcttacaagcatagcaaaagacagcagttcagtactttttgtggcggccctcagacatccaaggaaggattctgcagcattagctctcaagcctggcagggcgaaagctcttaggcggcaactgcgaatgtagagaaacaagccttgattttgtcatcatagggcacccattatcagaaataacaagtatcaaacataggtattgcattgtgtcagacatccaaggaaggatatggggcagcactagctctcaagcctggcagggcgaaagctcttaggcggcaactgcgaatgtagagaaacaagccttgattttgtcatcacttgcaatgcacaacagctaataaaacagcaggatatacagaatgtactggaaaaaaatcatgagctggacaagaacaggtatgtctcagacatccaaggaaggattaaacagcacaagctaaatacaagtatcaaacataggtattgcattgcatcagacatccaaggaaggatttggcagcactagctctcaagcctggcagggcgaaagctcttaggcggcaactgcgaatgtagagaaacaagccttgacttcatcatcacttgcaatgcacaacagctaataaaacagcaagataatacagaacgtactgacaaaatcatgagctggacaagaacaggtatggctcagacatccaaggaaggattaaacagcacaagctctcaagcctggcagggcgaaagctcttaggcggctactgcgaatgttgagaaacaagcctttaacttcaacatcattgccatatgcataacaaatatacggaacaaaatgagctgaaggcaaagcactaacaataattatagtaaagcaatgactgtaatcacagaaaacggctctgtggacagatagaagccgtccccaggttcctatcgacatgtgaaacattgaaacacctttgtatcggcctaatcatagcatctccggtcaatgctcgtggctaccagagacgtggcatcaggcccaaactacttcagcattgacatcaagataatgaaatcatacataacagcagatttagtacagtccctcagagacccgattaaaatcacacaccacagctgaaacaaacagctgcagatgggagctccagcctgaccaaaccacaaaggttatggtcaaaggatggaacacctgcagctgagagaggcagctgctgtttgcagtgtcaaacggcacttcctatcggtaggtcttgggatcttcactgggacaacatagccaaactactctcatggcagattcaggaaactaaaacaaacattccctagaactgcacagaagaatctaaacacagcaaatctaggtgaatgcaattctaggattaaatgccattacaaatctagttcaaaacaaattgcaaatgtagctgatttcattggttaacaggttaatcatcaggaagctaggcaattttctatcaagttatcacaactaaaacaggcggcaaattgaaggataactacatcaacacatcatcataaaaaaaatgaaatatgggtgaaagaaatagcgcacatgctcccaacccacaaacaaaagtagacaacaaataatccaaaaacatgtgatttgtaac

SEQ ID NO: 49409 - DNA, 2960 bp, Zea Mays
gcacccgcgaggccgcgacgccactgaccaaccagccaaaaacccggccgcgcgcctgtttgttcggccggagcgcgccatggccatggaggaggggtcaggagcggtggagaaagggccggccgtgggcacggtggctgacgcctccgccagcgtcatcggcgaaggcgccgtgaaggaggaggccgggggcagacggcagccaccggccggctacgcggccgtcgtgatcggcggcaccttcgaccgcctgcaccagggccaccatctcttcctgaagtacgccgacctgatacaaccgatcgagaagcggatgcagaatgccatggattatattaagttcataaagcccgaccttgatgttcgtgtggagcccatcgtcgaccctttcggcccatccatcgttgaccaaggccttgaggccatcattgtcagcaaggagacgttgccgggaggacacgctgtcaacaggaagagagcagagagagggctcactcagttgcagatcgaggtgatagagctggtgccagaggagtcgacgggggacaagataagttccacggcattcagaaagatggaagccgagagggcgctgcagcaacagaataaacaagatgatacagcagtaggcactccggttggggtgcaaaacatagcggttcagtcacatggagcatagtaatgaaccgaagttcgtactttaacaaaaaatacattaaactttgagctctctacttccatcacatacaaaggcacagtgcttctgtgcccaaacatggactgatcaatacagaaaagttccagtttcttcacatatttagaccgaaggatattctaccaagaaaaaatatgcagccagcctttgcaactttagaccttgttcgtttgtgccggattggtgggtcggaacgatttctaaccgaattgtttctctgatttatataaactttgattagctgaaacgattccggatgcaatcacccgaaacaaacgaacaaagccttagttgtaccacgctcatgcttagatcttcagatctatgaagcatctttagatctatgaaacttacaaatcagaatttgagtcaggtcatcacatttcttcaaattgatgaaacttatacaaatcaggacggattcttgagacttgattcattgaccattaaaaaacaaatcaatcactgttaaaaatacattagcgtttgcacaacattgcaatcaaccagccgtaactataaactacagacccatgaccaagacgatttggatgctccttttgcttcacacaggcaataaactggaggtgcgctagaaacagttgggaaattctggatgatgatcttacaagcatagcaaaagacagcagttcagtactttttgtggcggccctcagacatccaaggaaggattctgcagcattagctctcaagcctggcagggcgaaagctcttaggcggcaactgcgaatgtagagaaacaagccttgattttgtcatcatagggcacccattatcagaaataacaagtatcaaacataggtattgcattgtgtcagacatccaaggaaggatatggggcagcactagctctcaagcctggcagggcgaaagctcttaggcggcaactgcgaatgtagagaaacaagccttgattttgtcatcacttgcaatgcacaacagctaataaaacagcaggatatacagaatgtactggaaaaaaatcatgagctggacaagaacaggtatgtctcagacatccaaggaaggattaaacagcacaagctaaatacaagtatcaaacataggtattgcattgcatcagacatccaaggaaggatttggcagcactagctctcaagcctggcagggcgaaagctcttaggcggcaactgcgaatgtagagaaacaagccttgacttcatcatcacttgcaatgcacaacagctaataaaacagcaagataatacagaacgtactgacaaaatcatgagctggacaagaacaggtatggctcagacatccaaggaaggattaaacagcacaagctctcaagcctggcagggcgaaagctcttaggcggctactgcgaatgttgagaaacaagcctttaacttcaacatcattgccatatgcataacaaatatacggaacaaaatgagctgaaggcaaagcactaacaataattatagtaaagcaatgactgtaatcacagaaaacggctctgtggacagatagaagccgtccccaggttcctatcgacatgtgaaacattgaaacacctttgtatcggcctaatcatagcatctccggtcaatgctcgtggctaccagagacgtggcatcaggcccaaactacttcagcattgacatcaagataatgaaatcatacataacagcagatttagtacagtccctcagagacccgattaaaatcacacaccacagctgaaacaaacagctgcagatgggagctccagcctgaccaaaccacaaaggttatggtcaaaggatggaacacctgcagctgagagaggcagctgctgtttgcagtgtcaaacggcacttcctatcggtaggtcttgggatcttcactgggacaacatagccaaactactctcatggcagattcaggaaactaaaacaaacattccctagaactgcacagaagaatctaaacacagcaaatctaggtgaatgcaattctaggattaaatgccattacaaatctagttcaaaacaaattgcaaatgtagctgatttcattggttaacaggttaatcatcaggaagctaggcaattttctatcaagttatcacaactaaaacaggcggcaaattgaaggataactacatcaacacatcatcataaaaaaaatgaaatatgggtgaaagaaatagcgcacatgctcccaacccacaaacaaaagtagacaacaaataatccaaaaacatgtgatttgtaac

SEQ ID NO: 49410 - DNA, 2265 bp, Zea Mays
cggccgcgcgcctgtttgttcggccggagcgcgccatggccatggaggaggggtcaggagcggtggagaaagggccggccgtgggcacggtggctgacgcctccgccagcgtcatcggcgaaggcgccgtgaaggaggaggccgggggcagacggcagccaccggccggctacgcggccgtcgtgatcggcggcaccttcgaccgcctgcaccagggccaccatctcttcctgaagtacgccgacctgatacaaccgatcgagaagcggatgcagaatgccatggattatattaagttcataaagcccgaccttgatgttcgtgtggagcccatcgtcgaccctttcggcccatccatcgttgaccaaggccttgaggccatcattgtcagcaaggagacgttgccgggaggacacgctgtcaacaggaagagagcagagagagggctcactcagttgcagatcgaggtgatagagctggtgccagaggagtcgacgggggacaagataagttccacggcattcagaaagatggaagccgagagggcgctgcagcaacagaataaacaagatgatacagcagtaggcactccggcaataaactggaggtgcgctagaaacagttgggaaattctggatgatgatcttacaagcatagcaaaagacagcagttcagtactttttgtggcggccctcagacatccaaggaaggattctgcagcattagctctcaagcctggcagggcgaaagctcttaggcggcaactgcgaatgtagagaaacaagccttgattttgtcatcatagggcacccattatcagaaataacaagtatcaaacataggtattgcattgtgtcagacatccaaggaaggatatggggcagcactagctctcaagcctggcagggcgaaagctcttaggcggcaactgcgaatgtagagaaacaagccttgattttgtcatcacttgcaatgcacaacagctaataaaacagcaggatatacagaatgtactggaaaaaaatcatgagctggacaagaacaggtatgtctcagacatccaaggaaggattaaacagcacaagctaaatacaagtatcaaacataggtattgcattgcatcagacatccaaggaaggatttggcagcactagctctcaagcctggcagggcgaaagctcttaggcggcaactgcgaatgtagagaaacaagccttgacttcatcatcacttgcaatgcacaacagctaataaaacagcaagataatacagaacgtactgacaaaatcatgagctggacaagaacaggtatggctcagacatccaaggaaggattaaacagcacaagctctcaagcctggcagggcgaaagctcttaggcggctactgcgaatgttgagaaacaagcctttaacttcaacatcattgccatatgcataacaaatatacggaacaaaatgagctgaaggcaaagcactaacaataattatagtaaagcaatgactgtaatcacagaaaacggctctgtggacagatagaagccgtccccaggttcctatcgacatgtgaaacattgaaacacctttgtatcggcctaatcatagcatctccggtcaatgctcgtggctaccagagacgtggcatcaggcccaaactacttcagcattgacatcaagataatgaaatcatacataacagcagatttagtacagtccctcagagacccgattaaaatcacacaccacagctgaaacaaacagctgcagatgggagctccagcctgaccaaaccacaaaggttatggtcaaaggatggaacacctgcagctgagagaggcagctgctgtttgcagtgtcaaacggcacttcctatcggtaggtcttgggatcttcactgggacaacatagccaaactactctcatggcagattcaggaaactaaaacaaacattccctagaactgcacagaagaatctaaacacagcaaatctaggtgaatgcaattctaggattaaatgccattacaaatctagttcaaaacaaattgcaaatgtagctgatttcattggttaacaggttaatcatcaggaagctaggcaattttctatcaagttatcacaactaaaacaggcggcaaattgaaggataactacatcaacacatcatcataaaaaaaatgaaatatgggtgaaagaaatagcgcacatgctcccaacccacaaacaaaagtagacaacaaataatccaaaaacatgtgatttgtaac

SEQ ID NO: 49411 - DNA, 2298 bp, Zea Mays
atggccatggaggaggggtcaggagcggtggagaaagggccggccgtgggcacggtggctgacgcctccgccagcgtcatcggcgaaggcgccgtgaaggaggaggccgggggcagacggcagccaccggccggctacgcggccgtcgtgatcggcggcaccttcgaccgcctgcaccagggccaccatctcttcctgaaggcggcagcggagctggcgagggagaggatcgtggtcggcgtctgcgacggccccatgctcgccaagaaacagtacgccgacctgatacaaccgatcgagaagcggatgcagaatgccatggattatattaagttcataaagcccgaccttgatgttcgtgtggagcccatcgtcgaccctttcggcccatccatcgttgaccaaggccttgaggccatcattgtcagcaaggagacgttgccgggaggacacgctgtcaacaggaagagagcagagagagggctcactcagttatcgaggtgatagagctggtgccagaggagtcgacgggggacaagataagttccacggcattcagaaagatggaagccgagagggcgctgcagcaacagaataaacaagatgatacagcagtaggcactccggcaataaactggaggtgcgctagaaacagttgggaaattctggatgatgatcttacaagcatagcaaaagacagcagttcagtactttttgtggcggccctcagacatccaaggaaggattctgcagcattagctctcaagcctggcagggcgaaagctcttaggcggcaactgcgaatgtagagaaacaagccttgattttgtcatcatagggcacccattatcagaaataacaagtatcaaacataggtattgcattgtgtcagacatccaaggaaggatatggggcagcactagctctcaagcctggcagggcgaaagctcttaggcggcaactgcgaatgtagagaaacaagccttgattttgtcatcacttgcaatgcacaacagctaataaaacagcaggatatacagaatgtactggaaaaaaatcatgagctggacaagaacaggtatgtctcagacatccaaggaaggattaaacagcacaagctaaatacaagtatcaaacataggtattgcattgcatcagacatccaaggaaggatttggcagcactagctctcaagcctggcagggcgaaagctcttaggcggcaactgcgaatgtagagaaacaagccttgacttcatcatcacttgcaatgcacaacagctaataaaacagcaagataatacagaacgtactgacaaaatcatgagctggacaagaacaggtatggctcagacatccaaggaaggattaaacagcacaagctctcaagcctggcagggcgaaagctcttaggcggctactgcgaatgttgagaaacaagcctttaacttcaacatcattgccatatgcataacaaatatacggaacaaaatgagctgaaggcaaagcactaacaataattatagtaaagcaatgactgtaatcacagaaaacggctctgtggacagatagaagccgtccccaggttcctatcgacatgtgaaacattgaaacacctttgtatcggcctaatcatagcatctccggtcaatgctcgtggctaccagagacgtggcatcaggcccaaactacttcagcattgacatcaagataatgaaatcatacataacagcagatttagtacagtccctcagagacccgattaaaatcacacaccacagctgaaacaaacagctgcagatgggagctccagcctgaccaaaccacaaaggttatggtcaaaggatggaacacctgcagctgagagaggcagctgctgtttgcagtgtcaaacggcacttcctatcggtaggtcttgggatcttcactgggacaacatagccaaactactctcatggcagattcaggaaactaaaacaaacattccctagaactgcacagaagaatctaaacacagcaaatctaggtgaatgcaattctaggattaaatgccattacaaatctagttcaaaacaaattgcaaatgtagctgatttcattggttaacaggttaatcatcaggaagctaggcaattttctatcaagttatcacaactaaaacaggcggcaaattgaaggataactacatcaacacatcatcataaaaaaaatgaaatatgggtgaaagaaatagcgcacatgctcccaacccacaaacaaaagtagacaacaaataatccaaaaacatgtgatttgtaac

SEQ ID NO: 49412 - DNA, 4933 bp, Zea Mays
aaagagaaagggtatcatggcaccacgctcacacgactacgcgagccgaggtggcggcggcgtcgtcaccggtcttcgacggcgatgtggcgcattggggtgccaggaattttcctcgcctagtcttttttttccctttctgagccaaacggaagcgccattaaaccatctctctcccggcactcccacgctcgctgcctttctttggctggcagccgctggctccccacctgtccctctccctcacacccttttccccccgtggcttctctcgctgccgcccctccgcaataaaccgctgccagcccgagcggctccatcgccccgctcgcgcttttcggagtgccaaaggccgtgattccagcgctgctttttttggaattcccgaccttcttcctctcctcgtcgtctcattgccattggagctagcgtctcttgcacagagacaggcccagggaggccgcgatggcgaacctgacgaacggctttgcgagcctccattgcgcaggggcgatgcatgtggacaaagggcacatgcaagcatcgggactgccttttctctctttcagaagatgcgcccagcttgatatctccagactaggtagcgtgcctcgtttcatgggcgcaacatctgctactgtctcccaacatcatgtgaggcagaggatcagcgccatcagagcctctactctttcctgcctgcaagacgatgccacaaaattctttgattttgtggttattggcagcggtgttgctggcctaaggtatgctctggaagtttcaaagcacggctctgttgctattatcaccaaggcagagcctcatgagagcaacacaaactatgcacaaggcggtgttagtgccgttctatgcccctcggattctgtagaaagtcacatgaaagacacaattgttgcaggggcttatttgtgcgatgaagagattgtcagggtagtttgcacagaaggtccagagcgtgtcaaggaactaattgccatgggtgcctcattcgaccatggtgaagatggtaggctgcaccttgcaagggaaggtggtcattctcacaacagaattgtccattctgccgatatgactggaagagagattgaaagagcactgcttcaagcagttcacaatgatgataacatatctttgtttggtcatcactttgctattgatctattgacatgtcagttctgttgcagaaaaatggtgaaatctattgctatggagtggattcaatagacattgaaacccagaaggtagtccgcttcatctcgaaagtgacattgcttgcatcaggaggagctggccatatatatcccacaaccaccaatccaccggtagctactggggacggaatcgcaatgtgtcatcgtgctcaggctgtaatatccaatatggagtttgtgcagttccatccaactgcactttcagatgagggcctgccaataaagccaaagacaagaagagagaatgcatttctcataacggaagcggtgagaggagacggaggaattctttacaaccagtccatggagagattcatgccgatgtacgatgaccgctcggagctggcgccgagagacgtggttgcgaggagcatagacgaccagctgaagaaacgaggcgaaaagtatgtcctcctggacatcagccacagaccaagagacaaggttcttgcccacttccccaacatcgccgccgagtgcctgcggtacggcctggacatcacccggcagcccatcccggtggtcccggcggcgcactacatgtgcggcggcgtccgggcagggctgcagggggagaccaacgtgaagggcctctacgtggccggcgaggtcgcgtgcacggggctgcacggtgccaaccggctagcaagcaactcgctgctggaagcgctggtgttcgccaggagggcggtgcagccgtccatcgacctcatggtggatgccgacggagatgccagaccgtcgctggtggcgaggtgggcacggccgacgctgccgcggtcggtgctgggcgacagcgtgctgtcggacatcgtggggcggacgaggcaggccaggatggagctgcaatcagtgatgtgggagtatgtcggcatcgtgcgctcgacggggcggctgaagcaggccgagtggaggatcggtgacctggagtcggagtgggaggagttcctgttccggcgggggtggaagccgaccacggtgggcgtcgaggtctgcgagatgcgcaacctcttctgctgcgccaagctcgtcgtcaggagcgcgctggccaggcgcgagagccgcggcctgcacttcaccgaggacttcccgtacctggaggagagcaggaggaagcctacggtcatcttcccggccgccgtgcaggagctcacgtggagctccaagccgttgcagaggcagctgcaagcagatgacaatgcatgcagttcatccggctgggccttggggattcgttaattcattcattaatttttaagaactctcagtcgacagcatacacaaaatccagacagttaggctgtagtagcctgcgtatctttgcaattcttgccagttccagctgttgcaacttgtaaacggtgttgttggagctgcattatggtttatgaaccttgatccgtagtatatgtatgtggtgattggctgattgcacaccaactgatgaccattgtgatgtcatgcagaaaaaattgcgagaacttctgaatttcatttaccacacaagtgagttgccatttgacatgtagatacatcatcgctagaagttcagagttcccatcacatttatacacacatgaaacctgcaccaaaaactttgttcagaaatgaagttgtcaggatcagctacatgtctcggcggaacagattgtatgcggagatgagggagcaaatggcgaaaacaacaaatgccacgaaagatatggcaatggagccgttcgccatgctcgggaaggaatcgctcccccagttctcaatcaaatcacttgctcgagcagttgctgatgacgatgacgatatcagaaggtatgctaccacctgaaacggcaaaagaagttaccatcatgagagcaagctcgtccctggaaattgggagtacacatctatattcacaatagttggggatcaggggcggactcaccacccaggcaccgcaggcggtggcctgggctggctcgccagctgcaatggagggcaaggcgcgagcacagtgcacggaagcaagcagcacgtggcacgagcacaggcgtggggatcacaccgtattctcgcctaggctgtcatcagttcctgggtccgccactgttggggatagacgggggagaaacgagctactccaatgcacagtttggttatctagtcgattctattccctaagagacagaccaggtgaccaattgtgattagtcatcgaccagggcgactaaacaacactagtagtcccctatatgtcaggacaaatatatatcatatactatgtatacaagtgcagaaccaaatctacacaagtgcagcagccaagacacaagccagcacccaccagcagcagtagacatacacatcagtaaatggcagaaaagcagaacaaacaggaattgctacaccgctactgcagcagtcaagattcaggaataagatctcaagaaaatggaggaatggaggaagtaccatgatcgtgagctcatcctcgcagaccagcagcagttaggatgggaagggttgcaaattggtccaaaaaaattaatcccaaaaacttaaaccgaagtggctccagccatagtagatgcacccaatgtctcagctgctcagcaattgcaatatgtttcttgctgctcaccccctagccgcctgactaatcatgattagtcatcacatgtctagaaaagtaatcagtctaatcaggttgtagctcctagtcgagtccagagtagcgattaggactactaaccgtgattaattgaatgacttaataacactgcaagtttcaaccctgaaactattgtgtttgtgggatacttgttgaagttagccatctaaactatctatttaacctttcacaaagtcaattctggcactagctatcacgtgcttagaaacagggaggaatggagatatgtcacctcaaatgtaagtgacaaggaggcagtatcaagtttgtgtaactgacaaaataaggagtataattgacactagtacagtgacatcacagtaaaggtgctgcacaccaatattatggtcttgtaactctatgcacttgagcacatattcgttgtgaagacatattaactaagcaagctcatgctcatcaattgctcactcactcaatttacatttgagcatggatgcaatgaacgtgaaaatgagatatgtcgaacatgccaatgatcttgctgatcctcatgtataaagtatcaagagtaagctaggttttatttccaggctgatgttgaatattctctactcaacttcagataagtagcaattaacatccacaaatattcatcacaaatttggatgacgcaaagtttagcacaggataggacgatcagaatgcaggcatttggtgcgtatcatatgaagaggcgatgaactaaccatgccgacttcaatccaggcagcaaatggagggagcataaattaaccaaggagtgtatcagcaatcacaagtaagtcatctccttcaccaccagattaaaaagcctatactgtgcttcagtaagacgacttctaccaattcctcttcctcggtgtaacatcatagcaaggagggcaaccatttgcacagccgtaaacaagcctacgaagagcgagcggtaaagacgacacgaggcagcaggcacacacctgatccatggtgaagtcgaagagatcacgcttgggatggggaatcaaatgcttgttcctcctcatgagctcggcga

SEQ ID NO: 49413 - DNA, 4373 bp, Zea Mays
ctgcctttctttggctggcagccgctggctccccacctgtccctctccctcacacccttttccccccgtggcttctctcgctgccgcccctccgcaataaaccgctgccagcccgagcggctccatcgccccgctcgcgcttttcggagtgccaaaggccgtgattccagcgctgctttttttggaattcccgaccttcttcctctcctcgtcgtctcattgccattggagctagcgtctcttgcacagagacaggcccagggaggccgcgatggcgaacctgacgaacggctttgcgagcctccattgcgcaggggcgatgcatgtggacaaagggcacatgcaagcatcgggactgccttttctctctttcagaagatgcgcccagcttgatatctccaggtagtttgcacagaaggtccagagcgtgtcaaggaactaattgccatgggtgcctcattcgaccatggtgaagatggtaggctgcaccttgcaagggaaggtggtcattctcacaacagaattgtccattctgccgatatgactggaagagagattgaaagagcactgcttcaagcagttcacaatgatgataacatatctttgtttggtcatcactttgctattgatctattgacatgtcagaaaaatggtgaaatctattgctatggagtggattcaatagacattgaaacccagaaggtagtccgcttcatctcgaaagtgacattgcttgcatcaggaggagctggccatatatatcccacaaccaccaatccaccggtagctactggggacggaatcgcaatgtgtcatcgtgctcaggctgtaatatccaatatggagtttgtgcagttccatccaactgcactttcagatgagggcctgccaataaagccaaagacaagaagagagaatgcatttctcataacggaagcggtgagaggagacggaggaattctttacaaccagtccatggagagattcatgccgatgtacgatgaccgctcggagctggcgccgagagacgtggttgcgaggagcatagacgaccagctgaagaaacgaggcgaaaagtatgtcctcctggacatcagccacagaccaagagacaaggttcttgcccacttccccaacatcgccgccgagtgcctgcggtacggcctggacatcacccggcagcccatcccggtggtcccggcggcgcactacatgtgcggcggcgtccgggcagggctgcagggggagaccaacgtgaagggcctctacgtggccggcgaggtcgcgtgcacggggctgcacggtgccaaccggctagcaagcaactcgctgctggaagcgctggtgttcgccaggagggcggtgcagccgtccatcgacctcatggtggatgccgacggagatgccagaccgtcgctggtggcgaggtgggcacggccgacgctgccgcggtcggtgctgggcgacagcgtgctgtcggacatcgtggggcggacgaggcaggccaggatggagctgcaatcagtgatgtgggagtatgtcggcatcgtgcgctcgacggggcggctgaagcaggccgagtggaggatcggtgacctggagtcggagtgggaggagttcctgttccggcgggggtggaagccgaccacggtgggcgtcgaggtctgcgagatgcgcaacctcttctgctgcgccaagctcgtcgtcaggagcgcgctggccaggcgcgagagccgcggcctgcacttcaccgaggacttcccgtacctggaggagagcaggaggaagcctacggtcatcttcccggccgccgtgcaggagctcacgtggagctccaagccgttgcagaggcagctgcaagcagatgacaatgcatgcagttcatccggctgggccttggggattcgttaattcattcattaatttttaagaactctcagtcgacagcatacacaaaatccagacagttaggctgtagtagcctgcgtatctttgcaattcttgccagttccagctgttgcaacttgtaaacggtgttgttggagctgcattatggtttatgaaccttgatccgtagtatatgtatgtggtgattggctgattgcacaccaactgatgaccattgtgatgtcatgcagaaaaaattgcgagaacttctgaatttcatttaccacacaagtgagttgccatttgacatgtagatacatcatcgctagaagttcagagttcccatcacatttatacacacatgaaacctgcaccaaaaactttgttcagaaatgaagttgtcaggatcagctacatgtctcggcggaacagattgtatgcggagatgagggagcaaatggcgaaaacaacaaatgccacgaaagatatggcaatggagccgttcgccatgctcgggaaggaatcgctcccccagttctcaatcaaatcacttgctcgagcagttgctgatgacgatgacgatatcagaaggtatgctaccacctgaaacggcaaaagaagttaccatcatgagagcaagctcgtccctggaaattgggagtacacatctatattcacaatagttggggatcaggggcggactcaccacccaggcaccgcaggcggtggcctgggctggctcgccagctgcaatggagggcaaggcgcgagcacagtgcacggaagcaagcagcacgtggcacgagcacaggcgtggggatcacaccgtattctcgcctaggctgtcatcagttcctgggtccgccactgttggggatagacgggggagaaacgagctactccaatgcacagtttggttatctagtcgattctattccctaagagacagaccaggtgaccaattgtgattagtcatcgaccagggcgactaaacaacactagtagtcccctatatgtcaggacaaatatatatcatatactatgtatacaagtgcagaaccaaatctacacaagtgcagcagccaagacacaagccagcacccaccagcagcagtagacatacacatcagtaaatggcagaaaagcagaacaaacaggaattgctacaccgctactgcagcagtcaagattcaggaataagatctcaagaaaatggaggaatggaggaagtaccatgatcgtgagctcatcctcgcagaccagcagcagttaggatgggaagggttgcaaattggtccaaaaaaattaatcccaaaaacttaaaccgaagtggctccagccatagtagatgcacccaatgtctcagctgctcagcaattgcaatatgtttcttgctgctcaccccctagccgcctgactaatcatgattagtcatcacatgtctagaaaagtaatcagtctaatcaggttgtagctcctagtcgagtccagagtagcgattaggactactaaccgtgattaattgaatgacttaataacactgcaagtttcaaccctgaaactattgtgtttgtgggatacttgttgaagttagccatctaaactatctatttaacctttcacaaagtcaattctggcactagctatcacgtgcttagaaacagggaggaatggagatatgtcacctcaaatgtaagtgacaaggaggcagtatcaagtttgtgtaactgacaaaataaggagtataattgacactagtacagtgacatcacagtaaaggtgctgcacaccaatattatggtcttgtaactctatgcacttgagcacatattcgttgtgaagacatattaactaagcaagctcatgctcatcaattgctcactcactcaatttacatttgagcatggatgcaatgaacgtgaaaatgagatatgtcgaacatgccaatgatcttgctgatcctcatgtataaagtatcaagagtaagctaggttttatttccaggctgatgttgaatattctctactcaacttcagataagtagcaattaacatccacaaatattcatcacaaatttggatgacgcaaagtttagcacaggataggacgatcagaatgcaggcatttggtgcgtatcatatgaagaggcgatgaactaaccatgccgacttcaatccaggcagcaaatggagggagcataaattaaccaaggagtgtatcagcaatcacaagtaagtcatctccttcaccaccagattaaaaagcctatactgtgcttcagtaagacgacttctaccaattcctcttcctcggtgtaacatcatagcaaggagggcaaccatttgcacagccgtaaacaagcctacgaagagcgagcggtaaagacgacacgaggcagcaggcacacacctgatccatggtgaagtcgaagagatcacgcttgggatggggaatcaaatgcttgttcctcctcatgagctcggcga

SEQ ID NO: 49414 - DNA, 2406 bp, Zea Mays
ctggttaggagcgtcggcgtcggcgtcggcgtcagacaacgcagcacatagcaggggccgccaagcagctagccactactcggccgtcagtccgttgttccccaccgctcagtgcagaatcaacggctctagcctcgcctgctgctccctgccccgccgggcgccggccgccggcgcccctcccagtcccgggtagttggcctggccgccccggcctcgctgtccgcgcaccggtcaaccccgcgtcgtgctcatgctcgtgcccgacgcctgggttagattattgcactagtattaggctagactagatgccgctgaagccgatggcaaaactctcaatcacagcgttgttgtttaatgtgctaattgccccgtagatccatctcggcacggcagcttaagaccagtcttctcctgccgcttccttcccttccctttcttcttcggcttggcatctccacccttccttccttcctcgcctggcgttcccaccccctgccacctcgcccgctcccggctcctcccccctcggccgtcctgctctggtcgcggcggagccgccagatctgggccacgggtgccagcccagccggcgggcggcgggacggagggctgcgggatgaagtcgtcgctgaggagccggcaggagccgcggcgggtcagcaacggcgtcatcatcggcgccatgctgctatccctctgcgtcctcagcatcgtcaaggccagatactgcgccacccccttcggcaaggccgaggaccagctccaggagcagatgaactccagcatccggatggagccggaggagtcgtcgccggccaggacgcccggagaggaggaggaggaggacgacggagagaatggggcgtcggccaccaccaccacggcgcccgcggtgacgaaaacgccggcggccgtcgcggccggcggcaacaggggcaagggcaagcccacgtgctacatgacgagcaagcgctcggagcggtgcgacgcgtccggtgacatccgtgtggacgggaaccgctccaccatctacgtcagcgggatagaccgggagtggaagaccaagccgtacgcgcgctaccacgacccggtcgccatggcccacgtccgcgagtacaccctcaagccgctcccggaggcggcgccggcgccggcgtgcacccggaaccactccgtcccgggcttcctcttctccaacggcggcttctccggcaacctgtaccacgactacacggacgtgctggtgccgctgttcatcagcacgcaccagttccggggccgggtgcagttcctgctgagcgggatgaagccgtggtgggtggccaagttcacgcccttcttccggcagctgacccggtacgacgtcatcgacgtggacaacgaccaggaggtgcactgcttcccccggatcgtggtcggcgccaccttccacaaggacatgggcgtggacccgcggcggtcgccgggccacgtctccgtggtggacttcaagcgcgcgctgcgccgcgccttcggccttccgcgcgaggccgcctcccgcggcggcgccacggggcgcggcaagccccggctgctgatcatctcgcgccgcggctcccggcggttcctgaacgagcgggagatggcgcgcgccgcggcgggcgccgggttcgaggtgcgcgtggcggagcccgaccagcacacggacacggccgcgttcgcggcgctggtgaactcggcggacgtgatggtgggcgtgcacggcgccgggctgaccaacatggtgttcctgccccgcggcgccgtgctcgtccaggttgtgccgttcggcgggctggagtggctcacgggcgtcactttcaaggaccccgccgcggacatggagggctgggacgcgctcaaggcggcgtacctggataagcagaacatccggatggatctcgacaggttcagggccacgctgagggaggccatgagccggttgccgccggctccgtgaccggccgccgtgccccggcccggaggtagataggttggtgtatctatcgtccccgttgtcatgctctcaacaagttgacttaatcttcttcttcttcgtccccctttttatttttattttgtcactagcaagattcttttggtccattgttttgttgtgttgtttactgctgctacataaggaatcaatctcatgggaagatgatgagcagaagcaaagcaataccaggttgctgttataaattatatatatatgcagtgagaaaggccagctgaatccggcactggtgttgatttgtaaaccaatactagtacaagccagcattttgtgattattgatagctttgatgccatgatcaagatgtaaaagtacgccagcaaggatcatgcatgatgcatgaaactttttatgtacccccatttctg

SEQ ID NO: 49415 - DNA, 1155 bp, Zea Mays
ggtcccggactcccggttccggcctagaggatctcgttcccggccgtctgccgctcggtcctcacccgtcgccgtcgcccccctcccggtcccggcctcccggccttccaaatcgtcagcgcagggcgcacacgcttgcccgcgccgcccagccagcggcacacgcctgcccgcgccgcccagccgctctcccatagccgtcgcgccgtcccggccctccaagattcagattggtgttttgctggcaccatgtccagtccgtggagccctatgagtttggaggaagaggaagagatccaagagctcgatgccgaggagcagcaggacggtgagcagccgcagcagggtgatgggctgcagcaggggtccacagctgaagcaagggcacaacaaaccggaaagaaacgcgcaagatcagtggccaactcgtctactaagtctgaggcaaagataaaggtcgaggaaagtgcaccaggagctgcgacaggagtgattctgtctcttcgtgaaagtttacaggactgtaaacaaagccttgcatcctgccaggtggaacttgaagctgcaaaatcagaaattgagaagtggcattcagcatttcagagcattccagctgtaccttctggtaccagtccagatcctgtttcagtggtatcttacctcagtaacctgaagtcatcagaggaatcattgaaggagcaggttttttttgtctttctacaagggactgttaaaatggtccttcctttgcttcaattttaatttggttgttacatactcagctggagaaagcaaagaaaagggaggcagcttttatagtaacatttgcaaaacgagagcaggagattgcagaactgaagtctgcagttagagatttaaaaacacaattaaggccaccgtcaatgcagacaaggagattgttgcttgatccagcaattcatgaggaatttacacgcttaaaaaatcttgtggaggagaaagagaaaaaaataaaggagctacaggacaacgttgctgctgtcaatttcactccatccagcaaactgggaaaaatgctgatggctaaatgcagaacattgcaagaggaaaacgaagagattggggcgatggcatcggaaggaaaaatggacttgtaacagggcatctttgttccag

SEQ ID NO: 49416 - DNA, 1666 bp, Zea Mays
ggtcccggactcccggttccggcctagaggatctcgttcccggccgtctgccgctcggtcctcacccgtcgccgtcgcccccctcccggtcccggcctcccggccttccaaatcgtcagcgcagggcgcacacgcttgcccgcgccgcccagccagcggcacacgcctgcccgcgccgcccagccgctctcccatagccgtcgcgccgtcccggccctccaagattcagattggtgttttgctggcaccatgtccagtccgtggagccctatgagtttggaggaagaggaagagatccaagagctcgatgccgaggagcagcaggacggtgagcagccgcagcagggtgatgggctgcagcaggggtccacagctgaagcaagggcacaacaaaccggaaagaaacgcgcaagatcagtggccaactcgtctactaagtctgaggcaaagataaaggtcgaggaaagtgcaccaggagctgcgacaggagtgattctgtctcttcgtgaaagtttacaggactgtaaacaaagccttgcatcctgccaggtggaacttgaagctgcaaaatcagaaattgagaagtggcattcagcatttcagagcattccagctgtaccttctggtaccagtccagtggtatcttacctcagtaacctgaagtcatcagaggaatcattgaaggagcagctggagaaagcaaagaaaagggaggcagcttttatagtaacatttgcaaaacgagagcaggagattgcagaactgaagtctgcagttagagatttaaaaacacaattaaggccaccgtcaatgcagacaaggagattgttgcttgatccagcaattcatgaggaatttacacgcttaaaaaatcttgtggaggagaaagagaaaaaaataaaggagctacaggacaacgttgctgctgtcaatttcactccatccagcaaactgggaaaaatgctgatggctaaatgcagaacattgcaagaggaaaacgaagagattggggcgatggcatcggaaggaaaaatccatgagcttgggatgaaaatcgccgttctgaagtcgcagaacaacgagctccggaatcaatttgatgttttgtataagcacatggacggcgtgacgaatgacgtggagagatcaaacgaactggtggccatcctgcaagaggagctagaagccaaggagttagaggtgactagactgaaggaggagacgctttcccagaaggaaggcactcaagaagcaccggcaccggcaccagctccggtggaagagggagacggagctggaaacgatctgaagccggcttcagatccgctgcaagtgaagctggaaagttaaggggagacggaggggtggaaacgaccagacggtagtgtgtttgttgagactcccgatgtgcgggaagtcgtagcatattaggccaatcttaactagtagaaccgttcgatttttataatatctatgttcattttagttctatctatatagttacaatataaaacatgctctctatctctcatctagatgtgtacgtatctgtgccgcagttgaagttctccgactggtctcgttgccttcgtcatactctccctgcaccaatctctctacccctacatgccaacatcacacagtcaatcttagcccaccggacgac

SEQ ID NO: 49417 - DNA, 1672 bp, Zea Mays
ggtcccggactcccggttccggcctagaggatctcgttcccggccgtctgccgctcggtcctcacccgtcgccgtcgcccccctcccggtcccggcctcccggccttccaaatcgtcagcgcagggcgcacacgcttgcccgcgccgcccagccagcggcacacgcctgcccgcgccgcccagccgctctcccatagccgtcgcgccgtcccggccctccaagattggtgttttgctggcaccatgtccagtccgtggagccctatgagtttggaggaagaggaagagatccaagagctcgatgccgaggagcagcaggacggtgagcagccgcagcagggtgatgggctgcagcaggggtccacagctgaagcaagggcacaacaaaccggaaagaaacgcgcaagatcagtggccaactcgtctactaagtctgaggcaaagataaaggtcgaggaaagtgcaccaggagctgcgacaggagtgattctgtctcttcgtgaaagtttacaggactgtaaacaaagccttgcatcctgccaggtggaacttgaagctgcaaaatcagaaattgagaagtggcattcagcatttcagagcattccagctgtaccttctggtaccagtccagatcctgtttcagtggtatcttacctcagtaacctgaagtcatcagaggaatcattgaaggagcagctggagaaagcaaagaaaagggaggcagcttttatagtaacatttgcaaaacgagagcaggagattgcagaactgaagtctgcagttagagatttaaaaacacaattaaggccaccgtcaatgcagacaaggagattgttgcttgatccagcaattcatgaggaatttacacgcttaaaaaatcttgtggaggagaaagagaaaaaaataaaggagctacaggacaacgttgctgctgtcaatttcactccatccagcaaactgggaaaaatgctgatggctaaatgcagaacattgcaagaggaaaacgaagagattggggcgatggcatcggaaggaaaaatccatgagcttgggatgaaaatcgccgttctgaagtcgcagaacaacgagctccggaatcaatttgatgttttgtataagcacatggacggcgtgacgaatgacgtggagagatcaaacgaactggtggccatcctgcaagaggagctagaagccaaggagttagaggtgactagactgaaggaggagacgctttcccagaaggaaggcactcaagaagcaccggcaccggcaccagctccggtggaagagggagacggagctggaaacgatctgaagccggcttcagatccgctgcaagtgaagctggaaagttaaggggagacggaggggtggaaacgaccagacggtagtgtgtttgttgagactcccgatgtgcgggaagtcgtagcatattaggccaatcttaactagtagaaccgttcgatttttataatatctatgttcattttagttctatctatatagttacaatataaaacatgctctctatctctcatctagatgtgtacgtatctgtgccgcagttgaagttctccgactggtctcgttgccttcgtcatactctccctgcaccaatctctctacccctacatgccaacatcacacagtcaatcttagcccaccggacgac

SEQ ID NO: 49418 - DNA, 1608 bp, Zea Mays
ggtcccggactcccggttccggcctagaggatctcgttcccggccgtctgccgctcggtcctcacccgtcgccgtcgcccccctcccggtcccggcctcccggccttccaaatcgtcagcgcagggcgcacacgcttgcccgcgccgcccagccagcggcacacgcctgcccgcgccgcccagccgctctcccatagccgtcgcgccgtcccggccctccaagattcagattggtgttttgctggcaccatgtccagtccgtggagccctatgagtttggaggaagaggaagagatccaagagctcgatgccgaggagcagcaggacggtgagcagccgcagcagggtgatgggctgcagcaggggtccacagctgaagcaagggcacaacaaaccggaaagaaacgcgcaagatcagtggccaactcgtctactaagtctgaggcaaagataaaggtcgaggaaagtgcaccaggagctgcgacaggagtgattctgtctcttcgtgaaagtttacaggactgtaaacaaagccttgcatcctgccaggtggaacttgaagctgcaaaatcagaaattgagaagtggcattcagcatttcagagcattccagctgtaccttctggtaccagtccagatcctgtttcagtggtatcttacctcagtaacctgaagtcatcagaggaatcattgaaggagcagctggagaaagcaaagaaaagggaggcagcttttatagtaacatttgcaaaacgagagcaggagattgcagaactgaagtctgcagttagagatttaaaaacacaattaaggccaccgtcaatgcagacaaggagattgttgcttgatccagcaattcatgaggaatttacacgcttaaaaaatcttgtggaggagaaagagaaaaaaataaaggagctacaggacaacgttgctgctgtcaatttcactccatccagcaaactgggaaaaatgctgatggctaaatgcagaacattgcaagaggaaaacgaagagattggggcgatggcatcggaaggaaaattttgtataagcacatggacggcgtgacgaatgacgtggagagatcaaacgaactggtggccatcctgcaagaggagctagaagccaaggagttagaggtgactagactgaaggaggagacgctttcccagaaggaaggcactcaagaagcaccggcaccggcaccagctccggtggaagagggagacggagctggaaacgatctgaagccggcttcagatccgctgcaagtgaagctggaaagttaaggggagacggaggggtggaaacgaccagacggtagtgtgtttgttgagactcccgatgtgcgggaagtcgtagcatattaggccaatcttaactagtagaaccgttcgatttttataatatctatgttcattttagttctatctatatagttacaatataaaacatgctctctatctctcatctagatgtgtacgtatctgtgccgcagttgaagttctccgactggtctcgttgccttcgtcatactctccctgcaccaatctctctacccctacatgccaacatcacacagtcaatcttagcccaccggacgac

SEQ ID NO: 49419 - DNA, 1500 bp, Zea Mays
ggtcccggactcccggttccggcctagaggatctcgttcccggccgtctgccgctcggtcctcacccgtcgccgtcgcccccctcccggtcccggcctcccggccttccaaatcgtcagcgcagggcgcacacgcttgcccgcgccgcccagccagcggcacacgcctgcccgcgccgcccagccgctctcccatagccgtcgcgccgtcccggccctccaagattcagattggtgttttgctggcaccatgtccagtccgtggagccctatgagtttggaggaagaggaagagatccaagagctcgatgccgaggagcagcaggacggtgagcagccgcagcagggtgatgggctgcagcaggggtccacagctgaagcaagggcacaacaaaccggaaagaaacgcgcaagatcagtggccaactcgtctactaagtctgaggcaaagataaaggtcgaggaaagtgcaccaggagctgcgacaggagtgattctgtctcttcgtgaaagtttacaggactgtaaacaaagccttgcatcctgccaggtggaacttgaagctgcaaaatcagaaattgagaagtggcattcagcatttcagagcattccagctgtaccttctggtaccagtccagatcctgtttcagtggtatcttacctcagtaacctgaagtcatcagaggaatcattgaaggagcagctggagaaagcaaagaaaagggaggcagcttttatagtaacatttgcaaaacgagagcaggagattgcagaactgaagtctgcagttagagatttaaaaacacaattaaggccaccgtcaatgcagacaaggagattgttgcttgatccagcaattcatgaggaatttacacgcttaaaaaatcttgtggaggagaaagagaaaaaaataaaggagctacaggacaacgttgctgctgtcaatttcactccatccagcaaactgggaaaaatgctgatggctaaatgcagaacattgcaagaggaaaacgaagagattggggcgatggcatcggaaggaaaaatccatgagcttgggatgaaaatcgccgttctgaagtcgcagaacaacgagctccggaatcaatttgatgttttgtataagcacatggacggcgtgacgaatgacgtggagagatcaaacgaactggtggccatcctgcaagaggagctagaagccaaggagttagaggtgactagactgaaggaggagacgctttcccagaaggaaggcactcaagaagcaccggcaccggcaccagctccggtggaagagggagacggagctggaaacgatctgaagccggcttcagatccgctgcaagtgaagctggaaagttaaggggagacggaggggtggaaacgaccagacgttgaagttctccgactggtctcgttgccttcgtcatactctccctgcaccaatctctctacccctacatgccaacatcacacagtcaatcttagcccaccggacgac

SEQ ID NO: 49420 - DNA, 1671 bp, Zea Mays
ggtcccggactcccggttccggcctagaggatctcgttcccggccgtctgccgctcggtcctcacccgtcgccgtcgcccccctcccggtcccggcctcccggccttccaaatcgtcagcgcagggcgcacacgcttgcccgcgccgcccagccagcggcacacgcctgcccgcgccgcccagccgctctcccatagccgtcgcgccgtcccggccctccaagattcagattggtgttttgctggcaccatgtccagtccgtggagccctatgagtttggaggaagaggaagagatccaagagctcgatgccgaggagcagcaggacggtgagcagccgcagcagggtgatgggctgcagcaggggtccacagctgaagcaagggcacaacaaaccggaaagaaacgcgcaagatcagtggccaactcgtctactaagtctgaggcaaagataaaggtcgaggaaagtgcaccaggagctgcgacaggagtgattctgtctcttcgtgaaaggactgtaaacaaagccttgcatcctgccaggtggaacttgaagctgcaaaatcagaaattgagaagtggcattcagcatttcagagcattccagctgtaccttctggtaccagtccagatcctgtttcagtggtatcttacctcagtaacctgaagtcatcagaggaatcattgaaggagcagctggagaaagcaaagaaaagggaggcagcttttatagtaacatttgcaaaacgagagcaggagattgcagaactgaagtctgcagttagagatttaaaaacacaattaaggccaccgtcaatgcagacaaggagattgttgcttgatccagcaattcatgaggaatttacacgcttaaaaaatcttgtggaggagaaagagaaaaaaataaaggagctacaggacaacgttgctgctgtcaatttcactccatccagcaaactgggaaaaatgctgatggctaaatgcagaacattgcaagaggaaaacgaagagattggggcgatggcatcggaaggaaaaatccatgagcttgggatgaaaatcgccgttctgaagtcgcagaacaacgagctccggaatcaatttgatgttttgtataagcacatggacggcgtgacgaatgacgtggagagatcaaacgaactggtggccatcctgcaagaggagctagaagccaaggagttagaggtgactagactgaaggaggagacgctttcccagaaggaaggcactcaagaagcaccggcaccggcaccagctccggtggaagagggagacggagctggaaacgatctgaagccggcttcagatccgctgcaagtgaagctggaaagttaaggggagacggaggggtggaaacgaccagacggtagtgtgtttgttgagactcccgatgtgcgggaagtcgtagcatattaggccaatcttaactagtagaaccgttcgatttttataatatctatgttcattttagttctatctatatagttacaatataaaacatgctctctatctctcatctagatgtgtacgtatctgtgccgcagttgaagttctccgactggtctcgttgccttcgtcatactctccctgcaccaatctctctacccctacatgccaacatcacacagtcaatcttagcccaccggacgac

SEQ ID NO: 49421 - DNA, 4279 bp, Zea Mays
caacgtccgcgcagaaaaaaaaagcaggaaaaaagtcgagaaggaaaacccctaaccctaggcaagggcctcccccgccgtctcgtgtcggcataaaccccagccgtctctcctcgactctccgaggcacggccctgcctctccgcctcgactctgtggtaagcatcgcggcgagggagctccgatggccgggaaaaaacggacccagactgatcgcgcggttctggaggcggtgcctgcctcggacgctatccggaatgaggctgcagctgcggaggcgccggcgaagaagaagctggccatggagcggaagaaggagcggaaggagatggataaggagcgccaccgccagtcggccgaatttgccaagccccagccgccggcagcggagtctgcggctcctgtgaatcccccggccgctccggtggctgtgggaccgggactgcacatgaacgtgttcagagacctggcatcaccagaggcatcggttagagaggctgcagccgaggcgctggtggtggagctccggcaagtgcagaaggcgtacgagaagagcgcgcggaatggggagagggatgctggtgatggggatacgcagatggaggctgagaaggacgacgggctggataactgcgccccatcagtgcgttacgccatccggcggcttattcgtggcatctcttcttctagagagtatgcaaggcaaggatttgctttgggtcttgccgctgtcctcgaatcgattcgggcaatcaaggtggaagcaattatgaagttgatccctaatttattggaacattcatcttctatgaagggaccgctaaggacaatcttttggggcgcctgtttggatttggagcaattgagaggtctggtcgtgtgtcacgacagtggtcacgtgacaaaagctcacccattgttaaggaatttgtgagtgtggttgtagaactcggtggcaagaaacgatatttgacggagcctgcagttgctgtgattctggatttagtcaggaagctgcctgatgaagccatactatctgaggttcttgaagttcctggtgttcaagattggtttaacaaagctgctgaggttggagatccagatgcactctttctagctttgaagttgcaagagagaactattgtccagaaggagatatttgggaagctcctgccttatccattcagctcggacaatttttttgccgaacaacatcttagatccattgctgcttgttttaaggaatcttccttttgtcttccacgtattcatagtttatggcttgtcatcacggagatgcttgttcgagaagcaacatctcagcatgatattagcaccagttctggcaagaagcacaaaaagaataagaaagccagctcctgtgaggataacagaaggaatctacgtaatttctgtgaggttataattgaaggatctttgctgctctcctctcatgacagaaaacatttagcatttagtatacttgttagcctcctcccaaaattgtctccttcagctatccaagtagtactgtccagcaaagttgttcagggtttgatggatattttgtcaaatgaatcttcatggttgtataatgccggcaaacattttctgaaagagttaatgagtgttgcaagtcatgacaatgatcggtgtgctgctgtcattatcaacttacagaaatacagtggtggaagatttgactccatgacaaaaacaaaaactgttaaagagctgcttctcaaattccataatgttgaagattgtttgtatcttgtgcaaaatttgatggccctattcgtggatgaagaatctgttacagacgaaccatctgatcaaagtcagacaactgatgataattcagaaaatggcccaactgaagagcaggacctttttagccaagggaatgctgatcttctgaagagctgggtggtgaatacaatttcttgtgttctaaaaaatttaaagcttacttctaaagggaattcagattctgaaatggctaggtgcattgaagaaaagtttcaagtgcaaacggaaatattaaaattccttgctgtccaaggtctgttctcagcatctttaggaactgaggttacatcatttgagttgcaagagaagttcaaatggccaaagaatcccatatccacatcgctacgtaaagaatgcatagaacgacttcaattcttgctggaagatgcacaaaaggatgcatctttacatgttcctaatgaggtcaaatccaatgacttaggctactaccttatgtgtttcattaacaccgtatgcaacatcccctcagtctccctcttcaggatcttgagtggccacgatgataacgcattcaagaaattgatggcagtagaatcaatgcttttccacgaggagagaaaaactggtcctggattggagtctactaagatgcatgcaatgcgttatctccttatacagttactgctacaagttcttctccatccggatgagtattgggaggctgcagttgatgtgactatatgttgcaagaaatcctttcctgtcattgctcaaggtgataactcgagtgcacaagaatccgctgaacacggttcacaggagtctgatgaggatggttttgaggaatctgacgaggatggttcagaggatcccaatgaggaagtttccctagagtttatggatgttcttgtccagactttcctctctattttgcctcatgcatctggacctgtgtgtttcacagttgaacaggtttttcgtgtgttctgtgatgatattacagaaactggtctccttgatatgttgagggtcgtgaagatagatttgaaagaccgtcatcaaacagatagtgatgatgaagatgatggtcgtgttgatattgaagacgatgatgaaactgtaatggaagatgaagaggttggggaaattgataatgttacagatggtttggatgagaatacagatgatgattctactgatgaagatgatttggatcaagatgatttcaacaaaacagtcccgaatgagacaaaaggtggaggcaaaacagaaactactaaagatggggatgattcagatgattcagatggcatggatgatgatgctatgttccgtattgatccttacattgcaaggatattcaaggagcgcaatcttcctggtagtgatactaagcaatcccaacttatgcgattcaagcttcgtgtgctgacgttacttgatatatatcttcagaggaatccagggaaagttctggtgctggaggtgtattctttcttaatgcaagcttttgtaaaatcacatggtgctgatggtactgaacagttcaggcaacgtatttccggcatactgcagaggagggtattcaaagggaacgagtatccaaaaggcgatgccgtcgaatttggtaaactcgagagcttgttggagaaagctctgaggttgacatcgcgctcaagatacaacacggttgcttccgtagcacagaacgccacattttggatcctgaagatcatcaactcgaagcactgttctgagcaggagctcgcacgcgtggttgatctgttccgttcaatcttgagcgattacgacaggaagaaatcgcggctgaagcttggctttgtgaagcaggttgctaagaggaacccttggatagggcagaagctcttcggttttgtcctgcagagggccgaaaacacgaaggcgcagtatcggagaaaccagctgctggagttggcagagttcatactgaaatcatgggccgatggcacgtcagagatgttcttgaaccatctgtctcagctgtgcgggttgatacaagcagccctttcagccgttgccgaaaacaagtcgcgccgcaaggaagtgcgcaacttctgcactgggatcctgcagacggtgctgaagcttggtctcaaagaccagttccagaaagcgttgagtcctgaaacttattccctctgcgaggccaagctaggggctgcgtttaccgccttcaaaaagtgatcatgtgggacaccgattaaattcatttcacacagaccgtggatccttggaagttttataagaagaattagtgtatcttctagtttttgagctcggtgagagtaggatcaatcaaattaatgggtgcttgtgctagacttttagccgcagggagggatgcatgtacaagttgcttgggcccttattggatacaaaatgtttttatgttgttgcgtacgtaaatttgagcaaatattttttttattgaaagagcgtatttggatagggcgcctgaagtttg

SEQ ID NO: 49422 - DNA, 4161 bp, Zea Mays
caacgtccgcgcagaaaaaaaaagcaggaaaaaagtcgagaaggaaaacccctaaccctaggcaagggcctcccccgccgtctcgtgtcggcataaaccccagccgtctctcctcgactctccgaggcacggccctgcctctccgcctcgactctgtggtaagcatcgcggcgagggagctccgatggccgggaaaaaacggacccagactgatcgcgcggttctggaggcggtgcctgcctcggacgctatccggaatgaggcatcggttagagaggctgcagccgaggcgctggtggtggagctccggcaagtgcagaaggcgtacgagaagagcgcgcggaatggggagagggatgctggtgatggggatacgcagatggaggctgagaaggacgacgggctggataactgcgccccatcagtgcgttacgccatccggcggcttattcgtggcatctcttcttctagagaggtagaaatgtttttccatgagttcaggacaagcttagtttgagttggctgatgtcacgatctgctttactctattaacttcggaaatttgtttgcagtatgcaaggcaaggatttgctttgggtcttgccgctgtcctcgaatcgattcgggcaatcaaggtggaagcaattatgaagttgatccctaatttattggaacattcatcttctatgaagggaccggaagctaaggacaatcttttggggcgcctgtttggatttggagcaattgagaggtctggtcgtgtgtcacgacagtggtcacgtgacaaaagctcacccattgttaaggaatttgtgagtgtggttgtagaactcggtggcaagaaacgatatttgacggagcctgcagttgctgtgattctggatttagtcaggaagctgcctgatgaagccatactatctgaggttcttgaagttcctggtgttcaagattggtttaacaaagctgctgaggttggagatccagatgcactctttctagctttgaagttgcaagagagaactattgtccagaaggagatatttgggaagctcctgccttatccattcagctcggacaatttttttgccgaacaacatcttagatccattgctgcttgttttaaggaatcttccttttgtcttccacgtattcatagtttatggcttgtcatcacggagatgcttgttcgagaagcaacatctcagcatgatattagcaccagttctggcaagaagcacaaaaagaataagaaagccagctcctgtgaggataacagaaggaatctacgtaatttctgtgaggttataattgaaggatctttgctgctctcctctcatgacagaaaacatttagcatttagtatacttgttagcctcctcccaaaattgtctccttcagctatccaagtagtactgtccagcaaagttgttcagggtttgatggatattttgtcaaatgaatcttcatggttgtataatgccggcaaacattttctgaaagagttaatgagtgttgcaagtcatgacaatgatcggtgtgctgctgtcattatcaacttacagaaatacagtggtggaagatttgactccatgacaaaaacaaaaactgttaaagagctgcttctcaaattccataatgttgaagattgtttgtatcttgtgcaaaatttgatggccctattcgtggatgaagaatctgttacagacgaaccatctgatcaaagtcagacaactgatgataattcagaaaatggcccaactgaagagcaggacctttttagccaagggaatgctgatcttctgaagagctgggtggtgaatacaatttcttgtgttctaaaaaatttaaagcttacttctaaagggaattcagattctgaaatggctaggtgcattgaagaaaagtttcaagtgcaaacggaaatattaaaattccttgctgtccaaggtctgttctcagcatctttaggaactgaggttacatcatttgagttgcaagagaagttcaaatggccaaagaatcccatatccacatcgctacgtaaagaatgcatagaacgacttcaattcttgctggaagatgcacaaaaggatgcatctttacatgttcctaatgaggtcaaatccaatgacttaggctactaccttatgtgtttcattaacaccgtatgcaacatcccctcagtctccctcttcaggatcttgagtggccacgatgataacgcattcaagaaattgatggcagtagaatcaatgcttttccacgaggagagaaaaactggtcctggattggagtctactaagatgcatgcaatgcgttatctccttatacagttactgctacaagttcttctccatccggatgagtattgggaggctgcagttgatgtgactatatgttgcaagaaatcctttcctgtcattgctcaaggtgataactcgagtgcacaagaatccgctgaacacggttcacaggagtctgatgaggatggttttgaggaatctgacgaggatggttcagaggatcccaatgaggaagtttccctagagtttatggatgttcttgtccagactttcctctctattttgcctcatgcatctggacctgtgtgtttcacagttgaacaggtttttcgtgtgttctgtgatgatattacagaaactggtctccttgatatgttgagggtcgtgaagatagatttgaaagaccgtcatcaaacagatagtgatgatgaagatgatggtcgtgttgatattgaagacgatgatgaaactgtaatggaagatgaagaggttggggaaattgataatgttacagatggtttggatgagaatacagatgatgattctactgatgaagatgatttggatcaagatgatttcaacaaaacagtcccgaatgagacaaaaggtggaggcaaaacagaaactactaaagatggggatgattcagatgattcagatggcatggatgatgatgctatgttccgtattgatccttacattgcaaggatattcaaggagcgcaatcttcctggtagtgatactaagcaatcccaacttatgcgattcaagcttcgtgtgctgacgttacttgatatatatcttcagaggaatccagggaaagttctggtgctggaggtgtattctttcttaatgcaagcttttgtaaaatcacatggtgctgatggtactgaacagttcaggcaacgtatttccggcatactgcagaggagggtattcaaagggaacgagtatccaaaaggcgatgccgtcgaatttggtaaactcgagagcttgttggagaaagctctgaggttgacatcgcgctcaagatacaacacggttgcttccgtagcacagaacgccacattttggatcctgaagatcatcaactcgaagcactgttctgagcaggagctcgcacgcgtggttgatctgttccgttcaatcttgagcgattacgacaggaagaaatcgcggctgaagcttggctttgtgaagcaggttgctaagaggaacccttggatagggcagaagctcttcggttttgtcctgcagagggccgaaaacacgaaggcgcagtatcggagaaaccagctgctggagttggcagagttcatactgaaatcatgggccgatggcacgtcagagatgttcttgaaccatctgtctcagctgtgcgggttgatacaagcagccctttcagccgttgccgaaaacaagtcgcgccgcaaggaagtgcgcaacttctgcactgggatcctgcagacggtgctgaagcttggtctcaaagaccagttccagaaagcgttgagtcctgaaacttattccctctgcgaggccaagctaggggctgcgtttaccgccttcaaaaagtgatcatgtgggacaccgattaaattcatttcacacagaccgtggatccttggaagttttataagaagaattagtgtatcttctagtttttgagctcggtgagagtaggatcaatcaaattaatgggtgcttgtgctagacttttagccgcagggagggatgcatgtacaagttgcttgggcccttattggatacaaaatgtttttatgttgttgcgtacgtaaatttgagcaaatattttttttattgaaagagcgtatttggatagggcgcctgaagtttg

SEQ ID NO: 49423 - DNA, 2038 bp, Zea Mays
tgtatagtctaactatgtgagtaactgagtatgcaggacttcgcttgaacatactaaaacaaaagcatgtgcactgaagctcctgcatgtttgaactgctgtggtacaacacatgtatcattacagctgatatgcttcaatgcagagagaaaaactggtcctggattggagtctactaagatgcatgcaatgcgttatctccttatacagttactgctacaagttcttctccatccggatgagtattgggaggctgcagttgatgtgactatatgttgcaagaaatcctttcctgtcattgctcaaggtgataactcgagtgcacaagaatccgctgaacacggttcacaggagtctgatgaggatggttttgaggaatctgacgaggatggttcagaggatcccaatgaggaagtttccctagagtttatggatgttcttgtccagactttcctctctattttgcctcatgcatctggacctgtgtgtttcacagttgaacaggtttttcgtgtgttctgtgatgatattacagaaactggtctccttgatatgttgagggtcgtgaagatagatttgaaagaccgtcatcaaacagatagtgatgatgaagatgatggtcgtgttgatattgaagacgatgatgaaactgtaatggaagatgaagaggttggggaaattgataatgttacagatggtttggatgagaatacagatgatgattctactgatgaagatgatttggatcaagatgatttcaacaaaacagtcccgaatgagacaaaaggtggaggcaaaacagaaactactaaagatggggatgattcagatgattcagatggcatggatgatgatgctatgttccgtattgatccttacattgcaaggatattcaaggagcgcaatcttcctggtagtgatactaagcaatcccaacttatgcgattcaagcttcgtgtgctgacgttacttgatatatatcttcagaggaatccagggaaagttctggtgctggaggtgtattctttcttaatgcaagcttttgtaaaatcacatggtgctgatggtactgaacagttcaggcaacgtatttccggcatactgcagaggagggtattcaaagggaacgagtatccaaaaggcgatgccgtcgaatttggtaaactcgagagcttgttggagaaagctctgaggttgacatcgcgctcaagatacaacacggttgcttccgtagcacagaacgccacattttggatcctgaagatcatcaactcgaagcactgttctgagcaggagctcgcacgcgtggttgatctgttccgttcaatcttgagcgattacgacaggaagaaatcgcggctgaagcttggctttgtgaagcaggttgctaagaggaacccttggatagggcagaagctcttcggttttgtcctgcagagggccgaaaacacgaaggcgcagtatcggagaaaccagctgctggagttggcagagttcatactgaaatcatgggccgatggcacgtcagagatgttcttgaaccatctgtctcagctgtgcgggttgatacaagcagccctttcagccgttgccgaaaacaagtcgcgccgcaaggaagtgcgcaacttctgcactgggatcctgcagacggtgctgaagcttggtctcaaagaccagttccagaaagcgttgagtcctgaaacttattccctctgcgaggccaagctaggggctgcgtttaccgccttcaaaaagtgatcatgtgggacaccgattaaattcatttcacacagaccgtggatccttggaagttttataagaagaattagtgtatcttctagtttttgagctcggtgagagtaggatcaatcaaattaatgggtgcttgtgctagacttttagccgcagggagggatgcatgtacaagttgcttgggcccttattggatacaaaatgtttttatgttgttgcgtacgtaaatttgagcaaatattttttttattgaaagagcgtatttggatagggcgcctgaagtttg

SEQ ID NO: 49424 - DNA, 2723 bp, Zea Mays
aaaataaaaaaaataccgttttagttttcagccctaggagttcagaatggccacgggccaaaaatggtggagtttgctaatttgaattcagccaaaaaaggtgcctccaaaaacctgcacggagctccattaatagaagcagtccacccgtggcccgcgcccatctccggccgtccaggcgccgccgtggtggtttccctccgggcccaccgtcccacgcacgctttattacctgccctgccccgcggtcgatccccggctccccgtcctcctccccgacgaagcgaataggccggccccaacgcgccgccgcccaacccagctcgccctccccgtccggccgccccccctcgccgtaatgtcaaggtcctgcgagccacgaaaaccggactggggtttccagctgaacccacacgccgctcccttcgttccgtcctcgacgcccagcttcgcattcgcagctgcatccgagacgctcaaccagacgaccggctcccagaacaagaccggcagcacgaccgacgacgaggccactcctgacaagtccgccgacgccgagtaccatctcccggactcgctgtctctggatttccacgcggagagcctgctggcaaagcccagcgtgtccgccgagcctctgtctctctccagagcggaggccgccgccgccgctgctgctacggcgcccgactcgtcggtacgtttgggcggtggttcgggtgttcatcacctccccggcgccgtgtcgtgtctctcccacatgttccccgacgtgtccgtcgacttcatcgtccacgcgctcaggctccaggagttcgacttcgattttaccgtcgacatgctttctcacttgtgtgaagcctatggttatggccattctgctgaatgacaagcgccagtatcgaggcatccagaagccttctctaccaacttgcaagatagatgactgccgagatattggatgtagctcctctgaaagcaaaaagagactgtatgtgcccagtacccactagagtaagaaactgttgctgccgcacgaggactggtgttgtaaatataactagtgttggatgagtcgatgatgatatcctgactaaaaaattaatatgttgagatagttgatcgatcgaaaagaatgtcttagtaatgtcatactaataaattgtattttcttttcaaaagcatgtcttagtaatgttgagatagttgatcgatcgaaaagaaagtgcgggaatactctatgatatgagatggccgtccgggagttaacgggttattacagctaatattataaaaaaatgtatcttcgagagactgtgtagatggccctctaaattttaacacgcggatattcttagtacaaagacaaaaatcgacaggcaggtgaaacaaatcgccgtgacgaggatggcgctgctggcgctcaagcctaatccactgccgaacggcttccgcctctgccccaagcgcaccaacgcctctgcagccgccgccgccgcaaggtcccccagtgtccaccctctccccgacgagctccagctggtggcggacatccggtccccatacaaccacatccgcgtggccgacgtctccccgcgggccgcgggccacccgctggccggcgcccgcctcctgctcctggacggcccgggcaacatccactccctcaccttcccgcgccgcggcgaccggcccccgctcaccggcacctacctcgacgccttcgccaccctgccgccgctcctcccgcggccgtcgctcgcggtgctcggcttcggcgccggcgccgccgcccgcgcgctgctgcacttctacccggacatctccgtgcacggctgggagctggaccccgccgtggtcgccgtggcgcgcgacttcttcggcctcgcggacctggagaggcgccacgcggcgcgcctgtccgtgcacgtcggcgacgcgctggaggcccgcgcgccgcccggcggcttcggcggcgccgcggtcgacctgttcgcccgcggcagcgtgctgccggcgctccaggagccgggcacgtggcggcggctgggagcgctcgtggcgcccgggggcagggtgatggtgaactgcggcggcgcgggcgtggaggccgaggacgaggggcgggacggcgcggcggtcaaggacgccacgctgcgggccatggccgcggcgttcggggagggcgcggtgtcggtgctgcacgtggacgggagctgggtggcgatgacggggccgccggtgacggcggccgcgtggagggcgcggctgcctccagagctgcggcatttcgttgacgcgtggagaccgtacggcggcggcgcgagtggcgaatgaactcggctcagctgggacttcatcactggttgagtggttgtgtgtcttttaaatcaaccacatctcatcactcacagacacatatacgatgtgtttggtttgtggagtcactctatactttatgaggtgatgcatcataagtttatttcatagaatcaactcactcttaatgtatatactaatcattagcttatgaagaatgaggtggtgatgaattaatccattctattctccaaaccaaataaaaaagtgaggagtgataagaagatagatcactttatttctcaaactaaacacactaatagtgtctatcgatgaacgcacgcatccgtcaggtctattctcgcttcagtaccaaggtttttgtcaattcagtgggatctgag

SEQ ID NO: 49425 - DNA, 1305 bp, Zea Mays
gctctgcatgccggcctttagccacttgccgcccctgagtctgcctcccaacgtaattcgctgtcacacacacccaacgctctcccctgagcctgcctcccgatgccacctcccttgtttaccgacccaacgcgtggagttttcaggggattatggaatgcttaacaacaagttttccaagaaatgttggaaaagagtacatctgttcaagcaagttggtgtccggaaaccaatggatccccaaaaggatttgctgctacgtctcttgttcgacaaactccagtcgatgccacaagttcactgatgtggcatgccccatgagcccagttattcgaaaaaggttacgctggagatgctttgctgcaagtttgaacttagaagatggccctgcaccctctgactcgacgtcatcttcatcagagcagactactgatgctgatggaactactaatggtgatgtatctgaaaatctgctttctcgaaagccaagctctgatgagttaaaggctcttttggctgattcggaacgaagtaggcttttgagaagactgagtgaagcaaatcaatataaccgattcctcaagagacagttgcaaataaaggatgatgcagtcgtaaaattcaaaggtgaacttgctgttttggaactagaaatgcagtagggtctaggaagataaacggaaaatatattcaatctcatcttctctccagattagaagctgtccatgataagattatggaacaggtaaagagtgttgacgctttaaagacccaagaaattcctgtctactggattggcatggctgagaatgtgcagatcatgggttcattcgacggatggtcacagggcgaggcgatgtccatggagtattcaggtgactacggaagattctctgcaactctgaagctaagacctggaaggtacgagatcaagtttttggttgatggggaatggagattgtcgcctgaatatcccactgctggagatggactgacgcagaacaacattcttgttgtggagtaatacaacttcctcatctaccatttcaatcatccaaacaatgccgaagtgcacctacatctacatgtcttcttccatctgtaatactatgcttactatgtggacatgtggttgcctcacagaaatcgaataaattagcctatcctggcatatgatcctttcgtatttaaatatatgacgaataaattaacctatcctgaacgtcatatacttaaaaatggagcgaataccagtgctagatcacaatgatttgttcttttctgtgccctagactagaccagatc

SEQ ID NO: 49426 - DNA, 1345 bp, Zea Mays
gctctgcatgccggcctttagccacttgccgcccctgagtctgcctcccaacgtaattcgctgtcacacacacccaacgctctcccctgagcctgcctcccgatgccacctcccttgtttaccgacccaacgcgtggagttttcaggggattatggaatgcttaacaacaagttttccaagaaatgttggaaaagagtacatctgttcaagcaagttggtgtccggaaaccaatggatccccaaaaggatttgctgctacgtctcttgttcgacaaactccagtcgatgccacaagttcactgatgtggcatgccccatgagcccagttattcgaaaaaggttacgctggagatgctttgctgcaagtttgaacttagaagatggccctgcaccctctgactcgacgtcatcttcatcagagcagactactgatgctgatggaactactaatggtgatgtatctgaaaatctgctttctcgaaagccaagctctgatgaggctcttttggctgattcggaacgaagtaggcttttgagaagactgagtgaagcaaatcaatataaccgattcctcaagagacagttgcaaataaaggatgatgcagtcgtaaaattcaaaggtgaacttgctgttttggaactagaaatgcaggctctggttggcctagctgaagaggttgctaattttgatgttccgttagggtctaggaagataaacggaaaatatattcaatctcatcttctctccagattagaagctgtccatgataagattatggaacaggtaaagagtgttgacgctttaaagacccaagaaattcctgtctactggattggcatggctgagaatgtgcagatcatgggttcattcgacggatggtcacagggcgaggcgatgtccatggagtattcaggtgactacggaagattctctgcaactctgaagctaagacctggaaggtacgagatcaagtttttggttgatggggaatggagattgtcgcctgaatatcccactgctggagatggactgacgcagaacaacattcttgttgtggagtaatacaacttcctcatctaccatttcaatcatccaaacaatgccgaagtgcacctacatctacatgtcttcttccatctgtaatactatgcttactatgtggacatgtggttgcctcacagaaatcgaataaattagcctatcctggcatatgatcctttcgtatttaaatatatgacgaataaattaacctatcctgaacgtcatatacttaaaaatggagcgaataccagtgctagatcacaatgatttgttcttttctgtgccctagactagaccagatc

SEQ ID NO: 49427 - DNA, 1304 bp, Zea Mays
gctctgcatgccggcctttagccacttgccgcccctgagtctgcctcccaacgtaattcgctgtcacacacacccaacgctctcccctgagcctgcctcccgatgccacctcccttgtttaccgacccaacgcgtggagttttcaggggattatggaatgcttaacaacaagttttccaagaaatgttggaaaagagtacatctgttcaagcaagttggtgtccggaaaccaatggatccccaaaaggatttgctgctacgtctcttgttcgacaaactccagtcgatgccacaagttcactgatgtggcatgccccatgagcccagttattcgaaaaaggttacgctggagatgctttgctgcaagtttgaacttagaagatggccctgcaccctctgactcgacgtcatcttcatcagagcagactactgatgctgatggaactactaatggtgatgtatctgaaaatctgctttctcgaaagccaagctctgatgagttaaaggctcttttggctgattcggaacgaagtaggcttttgagaagactgagtgaagcaaatcaatataaccgattcctcaagagacagttgcaaataaaggatgatgcagtcgtaaaattcaaaggtgaacttgctgttttggaactagaaatgcagagggtctaggaagataaacggaaaatatattcaatctcatcttctctccagattagaagctgtccatgataagattatggaacaggtaaagagtgttgacgctttaaagacccaagaaattcctgtctactggattggcatggctgagaatgtgcagatcatgggttcattcgacggatggtcacagggcgaggcgatgtccatggagtattcaggtgactacggaagattctctgcaactctgaagctaagacctggaaggtacgagatcaagtttttggttgatggggaatggagattgtcgcctgaatatcccactgctggagatggactgacgcagaacaacattcttgttgtggagtaatacaacttcctcatctaccatttcaatcatccaaacaatgccgaagtgcacctacatctacatgtcttcttccatctgtaatactatgcttactatgtggacatgtggttgcctcacagaaatcgaataaattagcctatcctggcatatgatcctttcgtatttaaatatatgacgaataaattaacctatcctgaacgtcatatacttaaaaatggagcgaataccagtgctagatcacaatgatttgttcttttctgtgccctagactagaccagatc

SEQ ID NO: 49428 - DNA, 1302 bp, Zea Mays
gctctgcatgccggcctttagccacttgccgcccctgagtctgcctcccaacgtaattcgctgtcacacacacccaacgctctcccctgagcctgcctcccgatgccacctcccttgtttaccgacccaacgcgtggagttttcaggggattatggaatgcttaacaacaagttttccaagaaatgttggaaaagagtacatctgttcaagcaagttggtgtccggaaaccaatggatccccaaaaggatttgctgctacgtctcttgttcgacaaactccagtcgatgccacaagttcactgatgtggcatgccccatgagcccagttattcgaaaaaggttacgctggagatgctttgctgcaagtttgaacttagaagatggccctgcaccctctgactcgacgtcatcttcatcagagcagactactgatgctgatggaactactaatggtgatgtatctgaaaatctgctttctcgaaagccaagctctgatgagttaaaggctcttttggctgattcggaacgaagtaggcttttgagaagactgagtgaagcaaatcaatataaccgattcctcaagagacagttgcaaataaaggatgatgcagtcgtaaaattcaaaggtgaacttgctgttttggaactagaaatgcagggtctaggaagataaacggaaaatatattcaatctcatcttctctccagattagaagctgtccatgataagattatggaacaggtaaagagtgttgacgctttaaagacccaagaaattcctgtctactggattggcatggctgagaatgtgcagatcatgggttcattcgacggatggtcacagggcgaggcgatgtccatggagtattcaggtgactacggaagattctctgcaactctgaagctaagacctggaaggtacgagatcaagtttttggttgatggggaatggagattgtcgcctgaatatcccactgctggagatggactgacgcagaacaacattcttgttgtggagtaatacaacttcctcatctaccatttcaatcatccaaacaatgccgaagtgcacctacatctacatgtcttcttccatctgtaatactatgcttactatgtggacatgtggttgcctcacagaaatcgaataaattagcctatcctggcatatgatcctttcgtatttaaatatatgacgaataaattaacctatcctgaacgtcatatacttaaaaatggagcgaataccagtgctagatcacaatgatttgttcttttctgtgccctagactagaccagatc

SEQ ID NO: 49429 - DNA, 1040 bp, Zea Mays
gctctgcatgccggcctttagccacttgccgcccctgagtctgcctcccaacgtaattcgctgtcacacacacccaacgctctcccctgagcctgcctcccgatgccacctcccttgtttaccgacccaacgcgtggagttttcaggggattatggaatgcttaacaacaagttttccaagaaatgttggaaaagagtacatctgttcaagcaagttggtgtccggaaaccaatggatccccaaaaggatttgctgctacgtctcttgttcgacaaactccagtcgatgccacaagttcactgatgtggcatgccccatgagcccagttattcgaaaaaggttacgctggagatgctttgctgcaagtttgaacttagaagatggccctgcaccctctgactcgacgtcatcttcatcagagcagactactgatgctgatggaactactaatggtgatgtatctgaaaatctgctttctcgaaagccaagctctgatgagttaaaggctcttttggctgattcggaacgaagtaggcttttgagaagactgagtgaagcaaatcaatataaccgattcctcaagagacagttgcaaataaaggatgatgcagtcgtaaaattcaaaggtgaacttgctgttttggaactagaaatgcagggtctaggaagataaacggaaaatatattcaatctcatcttctctccagattagaagctgtccatgataagattatggaacaggtaaagagtgttgacgctttaaagacccaagaaattcctgtctactggattggcatggctgagaatgtgcagatcatgggttcattcgacggatggtcacagggcgaggcgatgtccatggagtattcaggtgactacggaagattctctgcaactctgaagctaagacctggaaggtacgagatcaagtttttggttgatggggaatggagattgtcgcctgaatatcccactgctggagatggactgacgcagaacaacattcttgttgtggagagctcccatggacctcagctac

SEQ ID NO: 49430 - DNA, 1531 bp, Zea Mays
ctctctctctcccacccgcctcctctctcctccccctcgctcctctctccgatgcgcagccgagcagaccgtgccgaccgcgcgaccccgcggccgcgacaccgacgcgccagcgccctgccatgtgcgcctgcagccacccggagaccgaccgagctccctgcgcccatcgagccgcccgcgcgccacttcctccatggccacttcctctctgtcacttcctccatggtcgaagtctgggagcggcaaggtattggccccctacccttacaactcctagagctctaccctcacgcttaccttagggagacgggatgctttgctcgcctactggaggacatgctctgatggtgtttcctctgctaccatttttagttcttgcttgtttcaattaggcatattaggttttgtactaatctgctagggaatctgtggatgtagttaaatattctgtggatgtagttaaatattctgcaatgataacaagccaaatatactttccacattatgcaaaggggctcacggcaagtggcaataactttctgcaattgttccttctttctgtcaagttatttcaattgtcttatgcaatgattctgcaattattctgcaattgtttctgcaagtggcatatatgtggatgtagttaaatattctgcaatgataacaagccaaatataactttctgcaaaggggctcatgagcaattgtcttaactttctgtcaagttcaattcacctattcctcatcaatttcaccatatatgtcaatcattgtcataacttacacctctttaagcttaatgccaagcagttcagcctcggttaaaccaattgtattttttattttagagcttagttcactgataattgttttgttttttctctgaaaaattagagaaattaataacttattttcctgttcctacaacttaataaagtctcattacaagtcatgtttttaagcaggctatgcgttctttctccgagaaagatattctttctctaattgctaaacttgtactaaggggtgttgaacaaatttttgtcggaggcgttgcttgggagacaactgaaggtaaaatttatgtgttatttactagactgcttgcgcctggagtttgatttttctatttcggttctttagatgttttgaatgctaaaataaaggagctcctggagttttctttgcctagaactagatgggttctctagatgttttgaatgctgaaataaaaatgtggaaacatcaaacatgaactatcggcgagcaggttgtcatatagggttgatatggcgtctgttattgtggaaagtagtgtttctgttagcatgcttccattaagtgtccgacatgccattttccttgtttgtctctgttcttttgctacattggcttagtgttattcgtgtgttttcttccatattttgttgcctgtggcattattcgttatttggttggttgaagatatagagcatgcactcatcatatctaagtgatcggagtgatatttattggcttattagatgga

SEQ ID NO: 49431 - DNA, 1156 bp, Zea Mays
ctctctctctcccacccgcctcctctctcctccccctcgctcctctctccgatgcgcagccgagcagaccgtgccgaccgcgcgaccccgcggccgcgacaccgacgcgccagcgccctgccatgtgcgcctgcagccacccggagaccgaccgagctccctgcgcccatcgagccgcccgcgcgccacttcctccatggccacttcctctctgtcacttcctccatggtcgaagtctgggagcggcaaggtattggccccctacccttacaactcctagagctctaccctcacgcttaccttagggagacgggatgctttgctcgcctactggaggacatgctctgatggtgtttcctctgctaccatttttagttcttgcttgtttcaattaggcatattaggttttgtactaatctgctagggaatctgtggatgtagttaaatattctgtggatgtagttaaatattctgcaatgataacaagccaaatatactttccacattatgcaaaggggctcacggcaagtggcaataactttctgcaattgttccttctttctgtcaagttatttcaattgtcttatgcaatgattctgcaattattctgcaattgtttctgcaagtggcatatatgtggatgtagttaaatattctgcaatgataacaagccaaatataactttctgcaaaggggctcatgagcaattgtcttaactttctgtcaagttcaattcacctattcctcatcaatttcaccatatatgtcaatcattgtcataacttacacctctttaagcttaatgccaagcagttcagcctcggttaaaccaattgtattttttattttagagcttagttcactgataattgttttgttttttctctgaaaaattagagaaattaataacttattttcctgttcctacaacttaataaagtctcattacaagtcatgtttttaagcaggctatgcgttctttctccgagaaagatattctttctctaattgctaaacttgtactaaggggtgttgaacaaatttttgtcggaggcgttgcttgggagacaactgaagggctcagggtgccttggaagtacgctagcttgttgtcatgaagaagtcattcaagttccttccagggagctattagttc

SEQ ID NO: 49432 - DNA, 1113 bp, Zea Mays
ctctctctctcccacccgcctcctctctcctccccctcgctcctctctccgatgcgcagccgagcagaccgtgccgaccgcgcgaccccgcggccgcgacaccgacgcgccagcgccctgccatgtgcgcctgcagccacccggagaccgaccgagctccctgcgcccatcgagccgcccgcgcgccacttcctccatggccacttcctctctgtcacttcctccatggtcgaagtctgggagcggcaaggtattggccccctacccttacaactcctagagctctaccctcacgcttaccttagggagacgggatgctttgctcgcctactggaggacatgctctgatggtgtttcctctgctaccatttttagttcttgcttgtttcaattaggcatattaggttttgtactaatctgctagggaatctgtggatgtagttaaatattctgtggatgtagttaaatattctgcaatgataacaagccaaatatactttccacattatgcaaaggggctcacggcaagtggcaataactttctgcaattgttccttctttctgtcaagttatttcaattgtcttatgcaatgattctgcaattattctgcaattgtttctgcaagtggcatatatgtggatgtagttaaatattctgcaatgataacaagccaaatataactttctgcaaaggggctcatgagcaattgtcttaactttctgtcaagttcaattcacctattcctcatcaatttcaccatatatgtcaatcattgtcataacttacacctctttaagcttaatgccaagcagttcagcctcggttaaaccaattgtattttttattttagagcttagttcactgataattgttttgttttttctctgaaaaattagagaaattaataacttattttcctgttcctacaacttaataaagtctcattacaagtcatgtttttaagcaggctatgcgttctttctccgagaaagatattctttctctaattgctaaacttgtactaaggggtgttgaacaaaaagatttttgtcggaggcgttgcttgggagacaactgaagatttatatgagccaacaacttaatgattgcac

SEQ ID NO: 49433 - DNA, 397 bp, Zea Mays
tctccgatgcgcagccgagcagaccgtgccgaccgcgcgaccccgcggccgcgacaccgacgcgccagcgccctgccatgtgcgcctgcagccacccggagaccgaccgagctccctgcgcccatcgagccgcccgcgcgccacttcctccatggccacttcctctctgtcacttcctccatggtcgaagtctgggagcggcaaggctatgcgttctttctccgagaaagatattctttctctaattgctaaacttgtactaaggggtgttgaacaaaaagatttttgtcggaggcgttgcttgggagacaactgaagggctcagggtgccttggaagtacgctagcttgttgtcatgaagaagtcattcaagttccttccagggagctattagttc

SEQ ID NO: 49434 - DNA, 7514 bp, Zea Mays
atcttggatgtccgcggcccgtcaggccgtacgagtcttgctttccgccccccttccgtcgcagcgtcctccttccacggtgaagaggagcgaccgcgcgaggacacgagacgagacccctgttcaatccccaatctggaatggtgatccgcgacgagatctgagagagagcgcctcgcaagaggcccgccgtccgcttcccccctccccacggcagccttccacgcgatggcgtcctccgcggcgccgccggcctccccgtcgtcgcgatcgcacggcaatgcggcgggcgccggcagcagcgccacggcgatgatgctcccgggccctccggggcgcggcaacggcggctgcatcgacctcagccccgcgggcctcctggcgcacggcgccgggagcagcgtcgttgtgtccgacccgcgctccatgcagctcctctgcgtgctccccatgccctcctcctcactcgcctccttcgtcaccgccgtccgctgggcgccccccgacacgccctccctcgacgacgacgacgacgaccgtcgcccgctccgcctcgccgcgggggaccgccacggccgcatcgccgtttgggacgcccgcgcgcgggctgtgctccactggctcaacctcgacgaggcgcgcggcgttgcgccgggctccgggggcggggtgcaggacctgtgctgggtccaccacggctccggctggcacctcgcctccatccacggcccctcgctgctctgcatctgggagacgtccaacagcccgcgcgtcctctggatgttcgacgcggcgcccgagtacctctcctgcctccgccgtgatcccttcgacgccaggcacctctgcgccattggccttcgcggcttcctcctctctgcgattcccaggcaggactccgacatctctctgcaggagcaccgggtgaactgcggtgcaggggatgtcgccgacctgcagaggctggagaaggagatttcagcacctgtacccgccccggcgctcgcggcgttcccgctcttttcctcgagaatttgcttctcccccctgtggaggcagatcctcttcgtcaccttccctcgggagctcatcgtctttgacctcagctacagcactgcgctttctgttactccattgcccagggggtttggcaagttctcggatgttatggccgatcctgatatcgacatgctctattgcacccatctcgacggcaagctgagcatctggaggcgcaaggagggtgaacaagtgcatttattatgtgctgtggaagagctcatgccttcaattggtactgttgttccttctccggctgttcttgcagctacaatatggcagtcagagtctattttccgaagcattgaaaaacaatgtcaggatttggcacagccacattctttcatgattgatacaaattcagaccagaatgcttgtcaagggactatgacatatctaacgtcgatatcagaagatggcaagatctggtcgtggcttttgaaatttgacaagtccgcacttcctagcaaagctaatctaggaaccaggtagaccgagccataacaatgctgcaactgccaacacatgctccaatagacctgattttataataaagattaatttggtgggacaacttcatcttttgtcatctactgtgactacactagcagtgccatccccttcattgcttgccacagtagctcgtggtggaaacaatcctgctccagcagtgccacttgttgctctggggactcagaatggaactattgaagttgtagatgttgtggcaaatgcagtttcagccagtttttccgttcatagcagcacagtgagaggattgagatggcttggcaactcacgtcttgtttcattcacatataatcaggttaatgataaaactggtggatacaataataaacttgttattacatgcttaagaagtgggctaaatcgctcattccgtgtgctccaaaagcctgaacgtgcaccgattagagcattgagggcttcttcatctggacggtaccttctgattctgtttcgcgatgctcctgttgaagtgtgggctatgacaaagaaccccatgatgcttaggtccttggcgcttccttttacagtattagaatggacactgccagctgcacctcggccaggtcaaaatgcatcatctaaacagtcttcaacctccaaggagcgatcagcagaggcttctggtgcagaaagttctgatgaaacatgtgaaagttttgcttttgcattagtcaatggcgctcttggtgtgtttgaagtgcatgggcggcgaatacgagattttaggccaaagtggccctcgtcatcatttgcatcttcagatggtttggttactgctatggcttaccgccttccccatgttgtaatgggggatcgatcaggcaacattagatggtgggatgttacaagtggcctttcttcttcttttagcactcacagggaaggcatcaggaggataaagttttctcctgttgttcatggtgatcgaagcagagggcgcatcgctgtgcttttctatgataatacattttcgatatttgacttggatagtccagatcccttggcaaatgcccttcttcagccgcagtctcctggtacccttgtcttggagcttgattggttgtcaacccgaacaaggaaggatgaaccacttatgttatgcattgccggagctgatagtagcttccgactgattgaggttaacattgatgctaagggcagttctatttcgaagccagtagctacgaaagagaggtttaggccaatgccattttgtttgccagtattatttccaacggcccatgctttggctttgcgaatgatacttcaacttggggtgaagccttcttggtttgaatgcaatagtagtgataaattaactggggacagctttaaggtagcaccaacatttggagatcttcgtagttacatgattgagacaacactccctcctattggtgacgccgttgtggctgaattgctccttaaagtgttggaaccatacagaaaggagggttgcattcttgatgatggaagagccagcctatattcagctatagtgaacaagggagcttgtgcaagatttgcatttgctgctgcgatttttggtgatttccaagaagcacttttctggctacagctgcctcaagctcttcgccacttcctgggtaaatccacaagtagatcaagagagaagatctcacaatcaagtttacatcctgattctgaacaaagctccagatttaatcggatagcttcaagagagagatctgcttctgaaaagttcacgaaaaatgctgcgaattatgggcaattaagctcaatggcatttaatcaagagcaactatggttcaatgcaagtgaaaggataccttggcatgacaagctcgatggtgaagatgctttgcaaaagcatgttcatgagcttgtctctctcgggaacttagaggctgcggtttcattgttactttcaacgccacctgaaggatcaaatttttacccaaatgcattaagagcagttgtgctgtcatctgcagtctcacaatccttgcatgaacttgcagtgaaggttgttgcagccaatatggttagaacggacaaatcgctatctggcacacatcttctatgtgctgttggaagatatcaggaagcatgttcacagcttcaagatgctgggtgttggaatgatgcagctactttggccgcaagccatttgcatggatctgactacgcaagggtgctgcagaggtgggccgattatgttcttcgtggtgagcacaatatgtggagagctcttatcctatacgttgctgctggagcactgccagaggctttggatacacttcgcaagagccagcgcccagataccgcagccatgttcttgctagcttgccacgagacctactcacaagccttatcagaatcagagcccgaggacgacacttccgtgttagcactgacgccgacgccggagcagacggagaagctccggttcccttccaagaatgtggccgacgaggacctgatcgcagtcagtgaggtcttcgggcagtaccagcagaagctggttcatctctgcatggacgccgaaccgacgtctgactgaatcgcacgccttgtcgcatggcagactgatgcgggcgtggattctccgtttttgaagcttattattatcaacaggttgcaaattccttccaagtttctgcgaagctttttgttctgtctgttggtaggtaccagacgtccagacatgacatcgggactgctgatgtggcagaatctgatggcaggaggcaggaacagacatgcagtgctgtatcgtaggtgccaatggttggcactgtttatacatacgtaagcatttgtatttggtacaagctatgttttttttttctttggtgcgcaaagagcgagtgcgcagcgaacttctcttgtggccgagatgagatgagaacagatgccatcgaggcagcagcagacgatatacttacacctgtacacccatgacagtttttgtctgaagattggttattatatgcttatctgcaaatgcatcgcttcaggccctggagacatcgctgtcactggatccatcgtcattgccgatccgtgcagacattgttttggaggtccgaaagctacgttcttgtcgcattcaagccctccatgattatggatgatggataatgataacaggtccagaatctcattgaacgttgccttcagctatatatgaaccagaaagaagtggtggacaccctatctttccaggcaaaaatagaacctagtttcactgagcttgtctggcagaagctcgaggaagagaatcgtgatttttcaaggcatactatgtaaggctgatgcttatgaatcaaataacggccttcaataagctccttgagcagcagtatgagattatgactaaagatcatccttctgggatgccatctgtacctcctgctgctcctaatggctcaaactctaacacattgaaccaaaacatgccctttctgcctgacactatccccagtactgcactgcaagataactcgttgcgcaatggaggttctagtagtatagttaatggtgctccatccgatgaccaatttatgtatactggtaaagttgttcatggccttcctggtggcatggatgcttcatcaagcctgctaacagcacacaatcctgctgttgggcagtttaatggacacaatggagcaacaataaagacagaatttggctactcaagcaactcagattttggattcagcaatgaggccgtgttcctagagcagtcagttggagatgtatcagattcctcgtaatttcagcttttcagatttgacagaggatttcagccaaagcgcagaaatattagagaattatggtcgatcccctttcatcccttccgatgcaaataacttcccagaatctactgctggagaacatactgaaataggaaataggcggctagatacaatatctgagggcattcattttgaagattttggaagtgattaatgaaacctttgatgacactgcacatggttgaggagtgatccatttgtacagactattttgggcagctaaatatctacaattgtggtcgtggaactagctgatttggtggccactgtttcttcttccgtgttaggttttgtgctcttagagtagaagcatggatggcttattattatgatcaaataatccgtattgaagggtggcccaaacaatccgtcttctttgtatcttctctgagggtgatgtggtagcaaatgtattcgttcagttggctatagtggaagctttacgattatgtcaaagttctcctttctgcccccctgttgcacaaggttacgtctgcagtttttcttgtttgtcgcatttcctggttccgttttggttgcgtttcctgactcagatcagtacatatctgcatgatctgcgaccatttgtatttaactatttgtatgatctatggccatagaattaatcaactattgtttagcggaattcaggaaccagaagtgcatcttgcattacctgcctattactctctcacccaagcatccaaattgtacaggttatagttttactaatctgaagttgcatgtgttcaaaaactggaaattggcaaaggattacatccagtttgtagcagggtaacaaacacaaacactcaacattcacccccctgaaaaaagaagtctagttcttggggatgttcttgccgacgatcttggccggcgttatgcggaggaggttcccgggcttccctggcacggcccccttgatcatgagcacccggaggttgttgtcgatcttgacgatcttgagcttcctgatcttggtcttggttcctcccatcctcccgggcatcttcttccccttgtacacgcggcccggcgtcgtcccggctccgatggaacccagctgccggtggctcttggaaccgtgcgtcatcagcccgcgcttgaagttgtgcctcttgatgccacctgcgcagtgccacaagtaaaaccgcgcgcgagcggatcaagaacgttgcaagctaggagattgcacaagtggcatagcaatcgcaaatgcaaacctttgaaactacagctacagcaaatgctgctaaaacttcactctccatgaaacggaacaatgacacatacaaccgaggctggcagatcattagcagaattgctgttgctggcaatgcaatcgcactattggatggaggcgcgagaatcggtgtactaccttggaaccccttgccgatggagttgccggagacgtcgatgaggtcgccctccttgaagaggtcggcgaagtcgaggggctggccgggctcgaaggcgtcgacggcggtgagccggaactcctgcaggtggcgcagcggcggggcgccggccttgcccaggtggcccagctccgggcgggtgagcttgtcctcgcgcacgccgtggtacccgacctggacggcgtcgtacccgtccgtggcggccgtcttcacctgcgtcaccacgttgccgccctcccggaacccgaccacggtcaccggcaccggcttccccgtctccggatcgaagtaggtcatcatccccaccttggtcgccatcacgcccaccccggcctcgtacgacgcgcgcaccgccacgggcgcccgccgccgcccgccgctccaggggacggcgccctggcggcgctgcgggaggaggaacgccactgcgccgcccacgcccacggccgccatggccatgcttgcttcgatttgactgggattagcagaggggagtggcgctctcgttcaatttgactgggatttatgcggatgcggataggccgctcttcctcgcgcctatccccttatccaaggaggacgtctgctcggaagcgactcaaatagatacgcctttctacaaagaaagcgtatatacagttgcttagaaatttgcatggcaagacctccatccattctcctattgtcacgtact

SEQ ID NO: 49435 - DNA, 7483 bp, Zea Mays
ggccgtacgagtcttgctttccgccccccttccgtcgcagcgtcctccttccacggtgaagaggagcgaccgcgcgaggacacgagacgagacccctgttcaatccccaatctggaatggtgatccgcgacgagatctgagagagagcgcctcgcaagaggcccgccgtccgcttcccccctccccacggcagccttccacgcgatggcgtcctccgcggcgccgccggcctccccgtcgtcgcgatcgcacggcaatgcggcgggcgccggcagcagcgccacggcgatgatgctcccgggccctccggggcgcggcaacggcggctgcatcgacctcagccccgcgggcctcctggcgcacggcgccgggagcagcgtcgttgtgtccgacccgcgctccatgcagctcctctgcgtgctccccatgccctcctcctcactcgcctccttcgtcaccgccgtccgctgggcgccccccgacacgccctccctcgacgacgacgacgacgaccgtcgcccgctccgcctcgccgcgggggaccgccacggccgcatcgccgtttgggacgcccgcgcgcgggctgtgctccactggctcaacctcgacgaggcgcgcggcgttgcgccgggctccgggggcggggtgcaggacctgtgctgggtccaccacggctccggctggcacctcgcctccatccacggcccctcgctgctctgcatctgggagacgtccaacagcccgcgcgtcctctggatgttcgacgcggcgcccgagtacctctcctgcctccgccgtgatcccttcgacgccaggcacctctgcgccattggccttcgcggcttcctcctctctgcgattcccaggcaggactccgacatctctctgcaggagcaccgggtgaactgcggtgcaggggatgtcgccgacctgcagaggctggagaaggagatttcagcacctgtacccgccccggcgctcgcggcgttcccgctcttttcctcgagaatttgcttctcccccctgtggaggcagatcctcttcgtcaccttccctcgggagctcatcgtctttgacctcagctacagcactgcgctttctgttactccattgcccagggggtttggcaagttctcggatgttatggccgatcctgatatcgacatgctctattgcacccatctcgacggcaagctgagcatctggaggcgcaaggagggtgaacaagtgcatttattatgtgctgtggaagagctcatgccttcaattggtactgttgttccttctccggctgttcttgcagctacaatatggcagtcagagtctattttccgaagcattgaaaaacaatgtcaggatttggcacagccacattctttcatgattgatacaaattcagaccagaatgcttgtcaagggactatgacatatctaacgtcgatatcagaagatggcaagatctggtcgtggcttttgaaatttgacaagtccgcacttcctagcaaagctaatctaggtagaccgagccataacaatgctgcaactgccaacacatgctccaatagacctgattttataataaagattaatttggtgggacaacttcatcttttgtcatctactgtgactacactagcagtgccatccccttcattgcttgccacagtagctcgtggtggaaacaatcctgctccagcagtgccacttgttgctctggggactcagaatggaactattgaagttgtagatgttgtggcaaatgcagtttcagccagtttttccgttcatagcagcacagtgagaggattgagatggcttggcaactcacgtcttgtttcattcacatataatcaggttaatgataaaactggtggatacaataataaacttgttattacatgcttaagaagtgggctaaatcgctcattccgtgtgctccaaaagcctgaacgtgcaccgattagagcattgagggcttcttcatctggacggtaccttctgattctgtttcgcgatgctcctgttgaagtgtgggctatgacaaagaaccccatgatgcttaggtccttggcgcttccttttacagtattagaatggacactgccagctgcacctcggccaggtcaaaatgcatcatctaaacagtcttcaacctccaaggagcgatcagcagaggcttctggtgcagaaagttctgatgaaacatgtgaaagttttgcttttgcattagtcaatggcgctcttggtgtgtttgaagtgcatgggcggcgaatacgagattttaggccaaagtggccctcgtcatcatttgcatcttcagatggtttggttactgctatggcttaccgccttccccatgttgtaatgggggatcgatcaggcaacattagatggtgggatgttacaagtggcctttcttcttcttttagcactcacagggaaggcatcaggaggataaagttttctcctgttgttcatggtgatcgaagcagagggcgcatcgctgtgcttttctatgataatacattttcgatatttgacttggatagtccagatcccttggcaaatgcccttcttcagccgcagtctcctggtacccttgtcttggagcttgattggttgtcaacccgaacaaggaaggatgaaccacttatgttatgcattgccggagctgatagtagcttccgactgattgaggttaacattgatgctaagggcagttctatttcgaagccagtagctacgaaagagaggtttaggccaatgccattttgtttgccagtattatttccaacggcccatgctttggctttgcgaatgatacttcaacttggggtgaagccttcttggtttgaatgcaatagtagtgataaattaactggggacagctttaaggtagcaccaacatttggagatcttcgtagttacatgattgagacaacactccctcctattggtgacgccgttgtggctgaattgctccttaaagtgttggaaccatacagaaaggagggttgcattcttgatgatggaagagccagcctatattcagctatagtgaacaagggagcttgtgcaagatttgcatttgctgctgcgatttttggtgatttccaagaagcacttttctggctacagctgcctcaagctcttcgccacttcctgggtaaatccacaagtagatcaagagagaagatctcacaatcaagtttacatcctgattctgaacaaagctccagatttaatcggatagcttcaagagagagatctgcttctgaaaagttcacgaaaaatgctgcgaattatgggcaattaagctcaatggcatttaatcaagagcaactatggttcaatgcaagtgaaaggataccttggcatgacaagctcgatggtgaagatgctttgcaaaagcatgttcatgagcttgtctctctcgggaacttagaggctgcggtttcattgttactttcaacgccacctgaaggatcaaatttttacccaaatgcattaagagcagttgtgctgtcatctgcagtctcacaatccttgcatgaacttgcagtgaaggttgttgcagccaatatggttagaacggacaaatcgctatctggcacacatcttctatgtgctgttggaagatatcaggaagcatgttcacagcttcaagatgctgggtgttggaatgatgcagctactttggccgcaagccatttgcatggatctgactacgcaagggtgctgcagaggtgggccgattatgttcttcgtggtgagcacaatatgtggagagctcttatcctatacgttgctgctggagcactgccagaggctttggatacacttcgcaagagccagcgcccagataccgcagccatgttcttgctagcttgccacgagacctactcacaagccttatcagaatcagagcccgaggacgacacttccgtgttagcactgacgccgacgccggagcagacggagaagctccggttcccttccaagaatgtggccgacgaggacctgatcgcagtcagtgaggtcttcgggcagtaccagcagaagctggttcatctctgcatggacgccgaaccgacgtctgactgaatcgcacgccttgtcgcatggcagactgatgcgggcgtggattctccgtttttgaagcttattattatcaacaggttgcaaattccttccaagtttctgcgaagctttttgttctgtctgttggtaggtaccagacgtccagacatgacatcgggactgctgatgtggcagaatctgatggcaggaggcaggaacagacatgcagtgctgtatcgtaggtgccaatggttggcactgtttatacatacgtaagcatttgtatttggtacaagctatgttttttttttctttggtgcgcaaagagcgagtgcgcagcgaacttctcttgtggccgagatgagatgagaacagatgccatcgaggcagcagcagacgatatacttacacctgtacacccatgacagtttttgtctgaagattggttattatatgcttatctgcaaatgcatcgcttcaggccctggagacatcgctgtcactggatccatcgtcattgccgatccgtgcagacattgttttggaggtccgaaagctacgttcttgtcgcattcaagccctccatgattatggatgatggataatgataacaggtccagaatctcattgaacgttgccttcagctatatatgaaccagaaagaagtggtggacaccctatctttccaggcaaaaatagaacctagtttcactgagcttgtctggcagaagctcgaggaagagaatcgtgatttttcaaggcatactatgtaaggctgatgcttatgaatcaaataacggccttcaataagctccttgagcagcagtatgagattatgactaaagatcatccttctgggatgccatctgtacctcctgctgctcctaatggctcaaactctaacacattgaaccaaaacatgccctttctgcctgacactatccccagtactgcactgcaagataactcgttgcgcaatggaggttctagtagtatagttaatggtgctccatccgatgaccaatttatgtatactggtaaagttgttcatggccttcctggtggcatggatgcttcatcaagcctgctaacagcacacaatcctgctgttgggcagtttaatggacacaatggagcaacaataaagacagaatttggctactcaagcaactcagattttggattcagcaatgaggccgtgttcctagagcagtcagttggagatgtatcagattcctcgtaatttcagcttttcagatttgacagaggatttcagccaaagcgcagaaatattagagaattatggtcgatcccctttcatcccttccgatgcaaataacttcccagaatctactgctggagaacatactgaaataggaaataggcggctagatacaatatctgagggcattcattttgaagattttggaagtgattaatgaaacctttgatgacactgcacatggttgaggagtgatccatttgtacagactattttgggcagctaaatatctacaattgtggtcgtggaactagctgatttggtggccactgtttcttcttccgtgttaggttttgtgctcttagagtagaagcatggatggcttattattatgatcaaataatccgtattgaagggtggcccaaacaatccgtcttctttgtatcttctctgagggtgatgtggtagcaaatgtattcgttcagttggctatagtggaagctttacgattatgtcaaagttctcctttctgcccccctgttgcacaaggttacgtctgcagtttttcttgtttgtcgcatttcctggttccgttttggttgcgtttcctgactcagatcagtacatatctgcatgatctgcgaccatttgtatttaactatttgtatgatctatggccatagaattaatcaactattgtttagcggaattcaggaaccagaagtgcatcttgcattacctgcctattactctctcacccaagcatccaaattgtacaggttatagttttactaatctgaagttgcatgtgttcaaaaactggaaattggcaaaggattacatccagtttgtagcagggtaacaaacacaaacactcaacattcacccccctgaaaaaagaagtctagttcttggggatgttcttgccgacgatcttggccggcgttatgcggaggaggttcccgggcttccctggcacggcccccttgatcatgagcacccggaggttgttgtcgatcttgacgatcttgagcttcctgatcttggtcttggttcctcccatcctcccgggcatcttcttccccttgtacacgcggcccggcgtcgtcccggctccgatggaacccagctgccggtggctcttggaaccgtgcgtcatcagcccgcgcttgaagttgtgcctcttgatgccacctgcgcagtgccacaagtaaaaccgcgcgcgagcggatcaagaacgttgcaagctaggagattgcacaagtggcatagcaatcgcaaatgcaaacctttgaaactacagctacagcaaatgctgctaaaacttcactctccatgaaacggaacaatgacacatacaaccgaggctggcagatcattagcagaattgctgttgctggcaatgcaatcgcactattggatggaggcgcgagaatcggtgtactaccttggaaccccttgccgatggagttgccggagacgtcgatgaggtcgccctccttgaagaggtcggcgaagtcgaggggctggccgggctcgaaggcgtcgacggcggtgagccggaactcctgcaggtggcgcagcggcggggcgccggccttgcccaggtggcccagctccgggcgggtgagcttgtcctcgcgcacgccgtggtacccgacctggacggcgtcgtacccgtccgtggcggccgtcttcacctgcgtcaccacgttgccgccctcccggaacccgaccacggtcaccggcaccggcttccccgtctccggatcgaagtaggtcatcatccccaccttggtcgccatcacgcccaccccggcctcgtacgacgcgcgcaccgccacgggcgcccgccgccgcccgccgctccaggggacggcgccctggcggcgctgcgggaggaggaacgccactgcgccgcccacgcccacggccgccatggccatgcttgcttcgatttgactgggattagcagaggggagtggcgctctcgttcaatttgactgggatttatgcggatgcggataggccgctcttcctcgcgcctatccccttatccaaggaggacgtctgctcggaagcgactcaaatagatacgcctttctacaaagaaagcgtatatacagttgcttagaaatttgcatggcaagacctccatccattctcctattgtcacgtact

SEQ ID NO: 49436 - DNA, 7452 bp, Zea Mays
cccttccgtcgcagcgtcctccttccacggtgaagaggagcgaccgcgcgaggacacgagacgagacccctgttcaatccccaatctggaatggtgatccgcgacgagatctgagagagagcgcctcgcaagaggcccgccgtccgcttcccccctccccacggcagccttccacgcgatggcgtcctccgcggcgccgccggcctccccgtcgtcgcgatcgcacggcaatgcggcgggcgccggcagcagcgccacggcgatgatgctcccgggccctccggggcgcggcaacggcggctgcatcgacctcagccccgcgggcctcctggcgcacggcgccgggagcagcgtcgttgtgtccgacccgcgctccatgcagctcctctgcgtgctccccatgccctcctcctcactcgcctccttcgtcaccgccgtccgctgggcgccccccgacacgccctccctcgacgacgacgacgacgaccgtcgcccgctccgcctcgccgcgggggaccgccacggccgcatcgccgtttgggacgcccgcgcgcgggctgtgctccactggctcaacctcgacgaggcgcgcggcgttgcgccgggctccgggggcggggtgcaggacctgtgctgggtccaccacggctccggctggcacctcgcctccatccacggcccctcgctgctctgcatctgggagacgtccaacagcccgcgcgtcctctggatgttcgacgcggcgcccgagtacctctcctgcctccgccgtgatcccttcgacgccaggcacctctgcgccattggccttcgcggcttcctcctctctgcgattcccaggcaggactccgacatctctctgcaggagcaccgggtgaactgcggtgcaggggatgtcgccgacctgcagaggctggagaaggagatttcagcacctgtacccgccccggcgctcgcggcgttcccgctcttttcctcgagaatttgcttctcccccctgtggaggcagatcctcttcgtcaccttccctcgggagctcatcgtctttgacctcagctacagcactgcgctttctgttactccattgcccagggggtttggcaagttctcggatgttatggccgatcctgatatcgacatgctctattgcacccatctcgacggcaagctgagcatctggaggcgcaaggagggtgaacaagtgcatttattatgtgctgtggaagagctcatgccttcaattggtactgttgttccttctccggctgttcttgcagctacaatatggcagtcagagtctattttccgaagcattgaaaaacaatgtcaggatttggcacagccacattctttcatgattgatacaaattcagaccagaatgcttgtcaagggactatgacatatctaacgtcgatatcagaagatggcaagatctggtcgtggcttttgaaatttgacaagtccgcacttcctagcaaagctaatctaggtagaccgagccataacaatgctgcaactgccaacacatgctccaatagacctgattttataataaagattaatttggtgggacaacttcatcttttgtcatctactgtgactacactagcagtgccatccccttcattgcttgccacagtagctcgtggtggaaacaatcctgctccagcagtgccacttgttgctctggggactcagaatggaactattgaagttgtagatgttgtggcaaatgcagtttcagccagtttttccgttcatagcagcacagtgagaggattgagatggcttggcaactcacgtcttgtttcattcacatataatcaggttaatgataaaactggtggatacaataataaacttgttattacatgcttaagaagtgggctaaatcgctcattccgtgtgctccaaaagcctgaacgtgcaccgattagagcattgagggcttcttcatctggacggtaccttctgattctgtttcgcgatgctcctgttgaagtgtgggctatgacaaagaaccccatgatggtccttggcgcttccttttacagtattagaatggacactgccagctgcacctcggccaggtcaaaatgcatcatctaaacagtcttcaacctccaaggagcgatcagcagaggcttctggtgcagaaagttctgatgaaacatgtgaaagttttgcttttgcattagtcaatggcgctcttggtgtgtttgaagtgcatgggcggcgaatacgagattttaggccaaagtggccctcgtcatcatttgcatcttcagatggtttggttactgctatggcttaccgccttccccatgttgtaatgggggatcgatcaggcaacattagatggtgggatgttacaagtggcctttcttcttcttttagcactcacagggaaggcatcaggaggataaagttttctcctgttgttcatggtgatcgaagcagagggcgcatcgctgtgcttttctatgataatacattttcgatatttgacttggatagtccagatcccttggcaaatgcccttcttcagccgcagtctcctggtacccttgtcttggagcttgattggttgtcaacccgaacaaggaaggatgaaccacttatgttatgcattgccggagctgatagtagcttccgactgattgaggttaacattgatgctaagggcagttctatttcgaagccagtagctacgaaagagaggtttaggccaatgccattttgtttgccagtattatttccaacggcccatgctttggctttgcgaatgatacttcaacttggggtgaagccttcttggtttgaatgcaatagtagtgataaattaactggggacagctttaaggtagcaccaacatttggagatcttcgtagttacatgattgagacaacactccctcctattggtgacgccgttgtggctgaattgctccttaaagtgttggaaccatacagaaaggagggttgcattcttgatgatggaagagccagcctatattcagctatagtgaacaagggagcttgtgcaagatttgcatttgctgctgcgatttttggtgatttccaagaagcacttttctggctacagctgcctcaagctcttcgccacttcctgggtaaatccacaagtagatcaagagagaagatctcacaatcaagtttacatcctgattctgaacaaagctccagatttaatcggatagcttcaagagagagatctgcttctgaaaagttcacgaaaaatgctgcgaattatgggcaattaagctcaatggcatttaatcaagagcaactatggttcaatgcaagtgaaaggataccttggcatgacaagctcgatggtgaagatgctttgcaaaagcatgttcatgagcttgtctctctcgggaacttagaggctgcggtttcattgttactttcaacgccacctgaaggatcaaatttttacccaaatgcattaagagcagttgtgctgtcatctgcagtctcacaatccttgcatgaacttgcagtgaaggttgttgcagccaatatggttagaacggacaaatcgctatctggcacacatcttctatgtgctgttggaagatatcaggaagcatgttcacagcttcaagatgctgggtgttggaatgatgcagctactttggccgcaagccatttgcatggatctgactacgcaagggtgctgcagaggtgggccgattatgttcttcgtggtgagcacaatatgtggagagctcttatcctatacgttgctgctggagcactgccagaggctttggatacacttcgcaagagccagcgcccagataccgcagccatgttcttgctagcttgccacgagacctactcacaagccttatcagaatcagagcccgaggacgacacttccgtgttagcactgacgccgacgccggagcagacggagaagctccggttcccttccaagaatgtggccgacgaggacctgatcgcagtcagtgaggtcttcgggcagtaccagcagaagctggttcatctctgcatggacgccgaaccgacgtctgactgaatcgcacgccttgtcgcatggcagactgatgcgggcgtggattctccgtttttgaagcttattattatcaacaggttgcaaattccttccaagtttctgcgaagctttttgttctgtctgttggtaggtaccagacgtccagacatgacatcgggactgctgatgtggcagaatctgatggcaggaggcaggaacagacatgcagtgctgtatcgtaggtgccaatggttggcactgtttatacatacgtaagcatttgtatttggtacaagctatgttttttttttctttggtgcgcaaagagcgagtgcgcagcgaacttctcttgtggccgagatgagatgagaacagatgccatcgaggcagcagcagacgatatacttacacctgtacacccatgacagtttttgtctgaagattggttattatatgcttatctgcaaatgcatcgcttcaggccctggagacatcgctgtcactggatccatcgtcattgccgatccgtgcagacattgttttggaggtccgaaagctacgttcttgtcgcattcaagccctccatgattatggatgatggataatgataacaggtccagaatctcattgaacgttgccttcagctatatatgaaccagaaagaagtggtggacaccctatctttccaggcaaaaatagaacctagtttcactgagcttgtctggcagaagctcgaggaagagaatcgtgatttttcaaggcatactatgtaaggctgatgcttatgaatcaaataacggccttcaataagctccttgagcagcagtatgagattatgactaaagatcatccttctgggatgccatctgtacctcctgctgctcctaatggctcaaactctaacacattgaaccaaaacatgccctttctgcctgacactatccccagtactgcactgcaagataactcgttgcgcaatggaggttctagtagtatagttaatggtgctccatccgatgaccaatttatgtatactggtaaagttgttcatggccttcctggtggcatggatgcttcatcaagcctgctaacagcacacaatcctgctgttgggcagtttaatggacacaatggagcaacaataaagacagaatttggctactcaagcaactcagattttggattcagcaatgaggccgtgttcctagagcagtcagttggagatgtatcagattcctcgtaatttcagcttttcagatttgacagaggatttcagccaaagcgcagaaatattagagaattatggtcgatcccctttcatcccttccgatgcaaataacttcccagaatctactgctggagaacatactgaaataggaaataggcggctagatacaatatctgagggcattcattttgaagattttggaagtgattaatgaaacctttgatgacactgcacatggttgaggagtgatccatttgtacagactattttgggcagctaaatatctacaattgtggtcgtggaactagctgatttggtggccactgtttcttcttccgtgttaggttttgtgctcttagagtagaagcatggatggcttattattatgatcaaataatccgtattgaagggtggcccaaacaatccgtcttctttgtatcttctctgagggtgatgtggtagcaaatgtattcgttcagttggctatagtggaagctttacgattatgtcaaagttctcctttctgcccccctgttgcacaaggttacgtctgcagtttttcttgtttgtcgcatttcctggttccgttttggttgcgtttcctgactcagatcagtacatatctgcatgatctgcgaccatttgtatttaactatttgtatgatctatggccatagaattaatcaactattgtttagcggaattcaggaaccagaagtgcatcttgcattacctgcctattactctctcacccaagcatccaaattgtacaggttatagttttactaatctgaagttgcatgtgttcaaaaactggaaattggcaaaggattacatccagtttgtagcagggtaacaaacacaaacactcaacattcacccccctgaaaaaagaagtctagttcttggggatgttcttgccgacgatcttggccggcgttatgcggaggaggttcccgggcttccctggcacggcccccttgatcatgagcacccggaggttgttgtcgatcttgacgatcttgagcttcctgatcttggtcttggttcctcccatcctcccgggcatcttcttccccttgtacacgcggcccggcgtcgtcccggctccgatggaacccagctgccggtggctcttggaaccgtgcgtcatcagcccgcgcttgaagttgtgcctcttgatgccacctgcgcagtgccacaagtaaaaccgcgcgcgagcggatcaagaacgttgcaagctaggagattgcacaagtggcatagcaatcgcaaatgcaaacctttgaaactacagctacagcaaatgctgctaaaacttcactctccatgaaacggaacaatgacacatacaaccgaggctggcagatcattagcagaattgctgttgctggcaatgcaatcgcactattggatggaggcgcgagaatcggtgtactaccttggaaccccttgccgatggagttgccggagacgtcgatgaggtcgccctccttgaagaggtcggcgaagtcgaggggctggccgggctcgaaggcgtcgacggcggtgagccggaactcctgcaggtggcgcagcggcggggcgccggccttgcccaggtggcccagctccgggcgggtgagcttgtcctcgcgcacgccgtggtacccgacctggacggcgtcgtacccgtccgtggcggccgtcttcacctgcgtcaccacgttgccgccctcccggaacccgaccacggtcaccggcaccggcttccccgtctccggatcgaagtaggtcatcatccccaccttggtcgccatcacgcccaccccggcctcgtacgacgcgcgcaccgccacgggcgcccgccgccgcccgccgctccaggggacggcgccctggcggcgctgcgggaggaggaacgccactgcgccgcccacgcccacggccgccatggccatgcttgcttcgatttgactgggattagcagaggggagtggcgctctcgttcaatttgactgggatttatgcggatgcggataggccgctcttcctcgcgcctatccccttatccaaggaggacgtctgctcggaagcgactcaaatagatacgcctttctacaaagaaagcgtatatacagttgcttagaaatttgcatggcaagacctccatccattctcctattgtcacgtact

SEQ ID NO: 49437 - DNA, 7462 bp, Zea Mays
cccttccgtcgcagcgtcctccttccacggtgaagaggagcgaccgcgcgaggacacgagacgagacccctgttcaatccccaatctggaatggtgatccgcgacgagatctgagagagagcgcctcgcaagaggcccgccgtccgcttcccccctccccacggcagccttccacgcgatggcgtcctccgcggcgccgccggcctccccgtcgtcgcgatcgcacggcaatgcggcgggcgccggcagcagcgccacggcgatgatgctcccgggccctccggggcgcggcaacggcggctgcatcgacctcagccccgcgggcctcctggcgcacggcgccgggagcagcgtcgttgtgtccgacccgcgctccatgcagctcctctgcgtgctccccatgccctcctcctcactcgcctccttcgtcaccgccgtccgctgggcgccccccgacacgccctccctcgacgacgacgacgacgaccgtcgcccgctccgcctcgccgcgggggaccgccacggccgcatcgccgtttgggacgcccgcgcgcgggctgtgctccactggctcaacctcgacgaggcgcgcggcgttgcgccgggctccgggggcggggtgcaggacctgtgctgggtccaccacggctccggctggcacctcgcctccatccacggcccctcgctgctctgcatctgggagacgtccaacagcccgcgcgtcctctggatgttcgacgcggcgcccgagtacctctcctgcctccgccgtgatcccttcgacgccaggcacctctgcgccattggccttcgcggcttcctcctctctgcgattcccaggcaggactccgacatctctctgcaggagcaccgggtgaactgcggtgcaggggatgtcgccgacctgcagaggctggagaaggagatttcagcacctgtacccgccccggcgctcgcggcgttcccgctcttttcctcgagaatttgcttctcccccctgtggaggcagatcctcttcgtcaccttccctcgggagctcatcgtctttgacctcagctacagcactgcgctttctgttactccattgcccagggggtttggcaagttctcggatgttatggccgatcctgatatcgacatgctctattgcacccatctcgacggcaagctgagcatctggaggcgcaaggagggtgaacaagtgcatttattatgtgctgtggaagagctcatgccttcaattggtactgttgttccttctccggctgttcttgcagctacaatatggcagtcagagtctattttccgaagcattgaaaaacaatgtcaggatttggcacagccacattctttcatgattgatacaaattcagaccagaatgcttgtcaagggactatgacatatctaacgtcgatatcagaagatggcaagatctggtcgtggcttttgaaatttgacaagtccgcacttcctagcaaagctaatctaggtagaccgagccataacaatgctgcaactgccaacacatgctccaatagacctgattttataataaagattaatttggtgggacaacttcatcttttgtcatctactgtgactacactagcagtgccatccccttcattgcttgccacagtagctcgtggtggaaacaatcctgctccagcagtgccacttgttgctctggggactcagaatggaactattgaagttgtagatgttgtggcaaatgcagtttcagccagtttttccgttcatagcagcacagtgagaggattgagatggcttggcaactcacgtcttgtttcattcacatataatcaggttaatgataaaactggtggatacaataataaacttgttattacatgcttaagaagtgggctaaatcgctcattccgtgtgctccaaaagcctgaacgtgcaccgattagagcattgagggcttcttcatctggacggtaccttctgattctgtttcgcgatgctcctgttgaagtgtgggctatgacaaagaaccccatgatgcttaggtccttggcgcttccttttacagtattagaatggacactgccagctgcacctcggccaggtcaaaatgcatcatctaaacagtcttcaacctccaaggagcgatcagcagaggcttctggtgcagaaagttctgatgaaacatgtgaaagttttgcttttgcattagtcaatggcgctcttggtgtgtttgaagtgcatgggcggcgaatacgagattttaggccaaagtggccctcgtcatcatttgcatcttcagatggtttggttactgctatggcttaccgccttccccatgttgtaatgggggatcgatcaggcaacattagatggtgggatgttacaagtggcctttcttcttcttttagcactcacagggaaggcatcaggaggataaagttttctcctgttgttcatggtgatcgaagcagagggcgcatcgctgtgcttttctatgataatacattttcgatatttgacttggatagtccagatcccttggcaaatgcccttcttcagccgcagtctcctggtacccttgtcttggagcttgattggttgtcaacccgaacaaggaaggatgaaccacttatgttatgcattgccggagctgatagtagcttccgactgattgaggttaacattgatgctaagggcagttctatttcgaagccagtagctacgaaagagaggtttaggccaatgccattttgtttgccagtattatttccaacggcccatgctttggtaaggctttgcgaatgatacttcaacttggggtgaagccttcttggtttgaatgcaatagtagtgataaattaactggggacagctttaaggtagcaccaacatttggagatcttcgtagttacatgattgagacaacactccctcctattggtgacgccgttgtggctgaattgctccttaaagtgttggaaccatacagaaaggagggttgcattcttgatgatggaagagccagcctatattcagctatagtgaacaagggagcttgtgcaagatttgcatttgctgctgcgatttttggtgatttccaagaagcacttttctggctacagctgcctcaagctcttcgccacttcctgggtaaatccacaagtagatcaagagagaagatctcacaatcaagtttacatcctgattctgaacaaagctccagatttaatcggatagcttcaagagagagatctgcttctgaaaagttcacgaaaaatgctgcgaattatgggcaattaagctcaatggcatttaatcaagagcaactatggttcaatgcaagtgaaaggataccttggcatgacaagctcgatggtgaagatgctttgcaaaagcatgttcatgagcttgtctctctcgggaacttagaggctgcggtttcattgttactttcaacgccacctgaaggatcaaatttttacccaaatgcattaagagcagttgtgctgtcatctgcagtctcacaatccttgcatgaacttgcagtgaaggttgttgcagccaatatggttagaacggacaaatcgctatctggcacacatcttctatgtgctgttggaagatatcaggaagcatgttcacagcttcaagatgctgggtgttggaatgatgcagctactttggccgcaagccatttgcatggatctgactacgcaagggtgctgcagaggtgggccgattatgttcttcgtggtgagcacaatatgtggagagctcttatcctatacgttgctgctggagcactgccagaggctttggatacacttcgcaagagccagcgcccagataccgcagccatgttcttgctagcttgccacgagacctactcacaagccttatcagaatcagagcccgaggacgacacttccgtgttagcactgacgccgacgccggagcagacggagaagctccggttcccttccaagaatgtggccgacgaggacctgatcgcagtcagtgaggtcttcgggcagtaccagcagaagctggttcatctctgcatggacgccgaaccgacgtctgactgaatcgcacgccttgtcgcatggcagactgatgcgggcgtggattctccgtttttgaagcttattattatcaacaggttgcaaattccttccaagtttctgcgaagctttttgttctgtctgttggtaggtaccagacgtccagacatgacatcgggactgctgatgtggcagaatctgatggcaggaggcaggaacagacatgcagtgctgtatcgtaggtgccaatggttggcactgtttatacatacgtaagcatttgtatttggtacaagctatgttttttttttctttggtgcgcaaagagcgagtgcgcagcgaacttctcttgtggccgagatgagatgagaacagatgccatcgaggcagcagcagacgatatacttacacctgtacacccatgacagtttttgtctgaagattggttattatatgcttatctgcaaatgcatcgcttcaggccctggagacatcgctgtcactggatccatcgtcattgccgatccgtgcagacattgttttggaggtccgaaagctacgttcttgtcgcattcaagccctccatgattatggatgatggataatgataacaggtccagaatctcattgaacgttgccttcagctatatatgaaccagaaagaagtggtggacaccctatctttccaggcaaaaatagaacctagtttcactgagcttgtctggcagaagctcgaggaagagaatcgtgatttttcaaggcatactatgtaaggctgatgcttatgaatcaaataacggccttcaataagctccttgagcagcagtatgagattatgactaaagatcatccttctgggatgccatctgtacctcctgctgctcctaatggctcaaactctaacacattgaaccaaaacatgccctttctgcctgacactatccccagtactgcactgcaagataactcgttgcgcaatggaggttctagtagtatagttaatggtgctccatccgatgaccaatttatgtatactggtaaagttgttcatggccttcctggtggcatggatgcttcatcaagcctgctaacagcacacaatcctgctgttgggcagtttaatggacacaatggagcaacaataaagacagaatttggctactcaagcaactcagattttggattcagcaatgaggccgtgttcctagagcagtcagttggagatgtatcagattcctcgtaatttcagcttttcagatttgacagaggatttcagccaaagcgcagaaatattagagaattatggtcgatcccctttcatcccttccgatgcaaataacttcccagaatctactgctggagaacatactgaaataggaaataggcggctagatacaatatctgagggcattcattttgaagattttggaagtgattaatgaaacctttgatgacactgcacatggttgaggagtgatccatttgtacagactattttgggcagctaaatatctacaattgtggtcgtggaactagctgatttggtggccactgtttcttcttccgtgttaggttttgtgctcttagagtagaagcatggatggcttattattatgatcaaataatccgtattgaagggtggcccaaacaatccgtcttctttgtatcttctctgagggtgatgtggtagcaaatgtattcgttcagttggctatagtggaagctttacgattatgtcaaagttctcctttctgcccccctgttgcacaaggttacgtctgcagtttttcttgtttgtcgcatttcctggttccgttttggttgcgtttcctgactcagatcagtacatatctgcatgatctgcgaccatttgtatttaactatttgtatgatctatggccatagaattaatcaactattgtttagcggaattcaggaaccagaagtgcatcttgcattacctgcctattactctctcacccaagcatccaaattgtacaggttatagttttactaatctgaagttgcatgtgttcaaaaactggaaattggcaaaggattacatccagtttgtagcagggtaacaaacacaaacactcaacattcacccccctgaaaaaagaagtctagttcttggggatgttcttgccgacgatcttggccggcgttatgcggaggaggttcccgggcttccctggcacggcccccttgatcatgagcacccggaggttgttgtcgatcttgacgatcttgagcttcctgatcttggtcttggttcctcccatcctcccgggcatcttcttccccttgtacacgcggcccggcgtcgtcccggctccgatggaacccagctgccggtggctcttggaaccgtgcgtcatcagcccgcgcttgaagttgtgcctcttgatgccacctgcgcagtgccacaagtaaaaccgcgcgcgagcggatcaagaacgttgcaagctaggagattgcacaagtggcatagcaatcgcaaatgcaaacctttgaaactacagctacagcaaatgctgctaaaacttcactctccatgaaacggaacaatgacacatacaaccgaggctggcagatcattagcagaattgctgttgctggcaatgcaatcgcactattggatggaggcgcgagaatcggtgtactaccttggaaccccttgccgatggagttgccggagacgtcgatgaggtcgccctccttgaagaggtcggcgaagtcgaggggctggccgggctcgaaggcgtcgacggcggtgagccggaactcctgcaggtggcgcagcggcggggcgccggccttgcccaggtggcccagctccgggcgggtgagcttgtcctcgcgcacgccgtggtacccgacctggacggcgtcgtacccgtccgtggcggccgtcttcacctgcgtcaccacgttgccgccctcccggaacccgaccacggtcaccggcaccggcttccccgtctccggatcgaagtaggtcatcatccccaccttggtcgccatcacgcccaccccggcctcgtacgacgcgcgcaccgccacgggcgcccgccgccgcccgccgctccaggggacggcgccctggcggcgctgcgggaggaggaacgccactgcgccgcccacgcccacggccgccatggccatgcttgcttcgatttgactgggattagcagaggggagtggcgctctcgttcaatttgactgggatttatgcggatgcggataggccgctcttcctcgcgcctatccccttatccaaggaggacgtctgctcggaagcgactcaaatagatacgcctttctacaaagaaagcgtatatacagttgcttagaaatttgcatggcaagacctccatccattctcctattgtcacgtact

SEQ ID NO: 49438 - DNA, 7449 bp, Zea Mays
cccttccgtcgcagcgtcctccttccacggtgaagaggagcgaccgcgcgaggacacgagacgagacccctgttcaatccccaatctggaatggtgatccgcgacgagatctgagagagagcgcctcgcaagaggcccgccgtccgcttcccccctccccacggcagccttccacgcgatggcgtcctccgcggcgccgccggcctccccgtcgtcgcgatcgcacggcaatgcggcgggcgccggcagcagcgccacggcgatgatgctcccgggccctccggggcgcggcaacggcggctgcatcgacctcagccccgcgggcctcctggcgcacggcgccgggagcagcgtcgttgtgtccgacccgcgctccatgcagctcctctgcgtgctccccatgccctcctcctcactcgcctccttcgtcaccgccgtccgctgggcgccccccgacacgccctccctcgacgacgacgacgacgaccgtcgcccgctccgcctcgccgcgggggaccgccacggccgcatcgccgtttgggacgcccgcgcgcgggctgtgctccactggctcaacctcgacgaggcgcgcggcgttgcgccgggctccgggggcggggtgcaggacctgtgctgggtccaccacggctccggctggcacctcgcctccatccacggcccctcgctgctctgcatctgggagacgtccaacagcccgcgcgtcctctggatgttcgacgcggcgcccgagtacctctcctgcctccgccgtgatcccttcgacgccaggcacctctgcgccattggccttcgcggcttcctcctctctgcgattcccaggcaggactccgacatctctctgcaggagcaccgggtgaactgcggtgcaggggatgtcgccgacctgcagaggctggagaaggagatttcagcacctgtacccgccccggcgctcgcggcgttcccgctcttttcctcgagaatttgcttctcccccctgtggaggcagatcctcttcgtcaccttccctcgggagctcatcgtctttgacctcagctacagcactgcgctttctgttactccattgcccagggggtttggcaagttctcggatgttatggccgatcctgatatcgacatgctctattgcacccatctcgacggcaagctgagcatctggaggcgcaaggagggtgaacaagtgcatttattatgtgctgtggaagagctcatgccttcaattggtactgttgttccttctccggctgttcttgcagctacaatatggcagtcagagtctattttccgaagcattgaaaaacaatgtcaggatttggcacagccacattctttcatgattgatacaaattcagaccagaatgcttgtcaagggactatgacatatctaacgtcgatatcagaagatggcaagatctggtcgtggcttttgaaatttgacaagtccgcacttcctagcaaagctaatctaggtagaccgagccataacaatgctgcaactgccaacacatgctccaatagacctgattttataataaagattaatttggtgggacaacttcatcttttgtcatctactgtgactacactagcagtgccatccccttcattgcttgccacagtagctcgtggtggaaacaatcctgctccagcagtgccacttgttgctctggggactcagaatggaactattgaagttgtagatgttgtggcaaatgcagtttcagccagtttttccgttcatagcagcacagtgagaggattgagatggcttggcaactcacgtcttgtttcattcacatataatcaggttaatgataaaactggtggatacaataataaacttgttattacatgcttaagaagtgggctaaatcgctcattccgtgtgctccaaaagcctgaacgtgcaccgattagagcattgagggcttcttcatctggacggtaccttctgattctgtttcgcgatgctcctgttgaagtgtgggctatgacaaagaaccccatgatgcttaggtccttggcgcttccttttacagtattagaatggacactgccagctgcacctcggccaggtcaaaatgcatcatctaaacagtcttcaacctccaaggagcgatcagcagaggcttctggtgcagaaagttctgatgaaacatgtgaaagttttgcttttgcattagtcaatggcgctcttggtgtgtttgaagtgcatgggcggcgaatacgagattttaggccaaagtggccctcgtcatcatttgcatcttcagatggtttggttactgctatggcttaccgccttccccatgttgtaatgggggatcgatcaggcaacattagatggtgggatgttacaagtggcctttcttcttcttttagcactcacagggaaggcatcaggaggataaagttttctcctgttgttcatggtgatcgaagcagagggcgcatcgctgtgcttttctatgataatacattttcgatatttgacttggatagtccagatcccttggcaaatgcccttcttcagccgcagtctcctggtacccttgtcttggagcttgattggttgtcaacccgaacaaggaaggatgaaccacttatgttatgcattgccggagctgatagtagcttccgactgattgagtgatgctaagggcagttctatttcgaagccagtagctacgaaagagaggtttaggccaatgccattttgtttgccagtattatttccaacggcccatgctttggctttgcgaatgatacttcaacttggggtgaagccttcttggtttgaatgcaatagtagtgataaattaactggggacagctttaaggtagcaccaacatttggagatcttcgtagttacatgattgagacaacactccctcctattggtgacgccgttgtggctgaattgctccttaaagtgttggaaccatacagaaaggagggttgcattcttgatgatggaagagccagcctatattcagctatagtgaacaagggagcttgtgcaagatttgcatttgctgctgcgatttttggtgatttccaagaagcacttttctggctacagctgcctcaagctcttcgccacttcctgggtaaatccacaagtagatcaagagagaagatctcacaatcaagtttacatcctgattctgaacaaagctccagatttaatcggatagcttcaagagagagatctgcttctgaaaagttcacgaaaaatgctgcgaattatgggcaattaagctcaatggcatttaatcaagagcaactatggttcaatgcaagtgaaaggataccttggcatgacaagctcgatggtgaagatgctttgcaaaagcatgttcatgagcttgtctctctcgggaacttagaggctgcggtttcattgttactttcaacgccacctgaaggatcaaatttttacccaaatgcattaagagcagttgtgctgtcatctgcagtctcacaatccttgcatgaacttgcagtgaaggttgttgcagccaatatggttagaacggacaaatcgctatctggcacacatcttctatgtgctgttggaagatatcaggaagcatgttcacagcttcaagatgctgggtgttggaatgatgcagctactttggccgcaagccatttgcatggatctgactacgcaagggtgctgcagaggtgggccgattatgttcttcgtggtgagcacaatatgtggagagctcttatcctatacgttgctgctggagcactgccagaggctttggatacacttcgcaagagccagcgcccagataccgcagccatgttcttgctagcttgccacgagacctactcacaagccttatcagaatcagagcccgaggacgacacttccgtgttagcactgacgccgacgccggagcagacggagaagctccggttcccttccaagaatgtggccgacgaggacctgatcgcagtcagtgaggtcttcgggcagtaccagcagaagctggttcatctctgcatggacgccgaaccgacgtctgactgaatcgcacgccttgtcgcatggcagactgatgcgggcgtggattctccgtttttgaagcttattattatcaacaggttgcaaattccttccaagtttctgcgaagctttttgttctgtctgttggtaggtaccagacgtccagacatgacatcgggactgctgatgtggcagaatctgatggcaggaggcaggaacagacatgcagtgctgtatcgtaggtgccaatggttggcactgtttatacatacgtaagcatttgtatttggtacaagctatgttttttttttctttggtgcgcaaagagcgagtgcgcagcgaacttctcttgtggccgagatgagatgagaacagatgccatcgaggcagcagcagacgatatacttacacctgtacacccatgacagtttttgtctgaagattggttattatatgcttatctgcaaatgcatcgcttcaggccctggagacatcgctgtcactggatccatcgtcattgccgatccgtgcagacattgttttggaggtccgaaagctacgttcttgtcgcattcaagccctccatgattatggatgatggataatgataacaggtccagaatctcattgaacgttgccttcagctatatatgaaccagaaagaagtggtggacaccctatctttccaggcaaaaatagaacctagtttcactgagcttgtctggcagaagctcgaggaagagaatcgtgatttttcaaggcatactatgtaaggctgatgcttatgaatcaaataacggccttcaataagctccttgagcagcagtatgagattatgactaaagatcatccttctgggatgccatctgtacctcctgctgctcctaatggctcaaactctaacacattgaaccaaaacatgccctttctgcctgacactatccccagtactgcactgcaagataactcgttgcgcaatggaggttctagtagtatagttaatggtgctccatccgatgaccaatttatgtatactggtaaagttgttcatggccttcctggtggcatggatgcttcatcaagcctgctaacagcacacaatcctgctgttgggcagtttaatggacacaatggagcaacaataaagacagaatttggctactcaagcaactcagattttggattcagcaatgaggccgtgttcctagagcagtcagttggagatgtatcagattcctcgtaatttcagcttttcagatttgacagaggatttcagccaaagcgcagaaatattagagaattatggtcgatcccctttcatcccttccgatgcaaataacttcccagaatctactgctggagaacatactgaaataggaaataggcggctagatacaatatctgagggcattcattttgaagattttggaagtgattaatgaaacctttgatgacactgcacatggttgaggagtgatccatttgtacagactattttgggcagctaaatatctacaattgtggtcgtggaactagctgatttggtggccactgtttcttcttccgtgttaggttttgtgctcttagagtagaagcatggatggcttattattatgatcaaataatccgtattgaagggtggcccaaacaatccgtcttctttgtatcttctctgagggtgatgtggtagcaaatgtattcgttcagttggctatagtggaagctttacgattatgtcaaagttctcctttctgcccccctgttgcacaaggttacgtctgcagtttttcttgtttgtcgcatttcctggttccgttttggttgcgtttcctgactcagatcagtacatatctgcatgatctgcgaccatttgtatttaactatttgtatgatctatggccatagaattaatcaactattgtttagcggaattcaggaaccagaagtgcatcttgcattacctgcctattactctctcacccaagcatccaaattgtacaggttatagttttactaatctgaagttgcatgtgttcaaaaactggaaattggcaaaggattacatccagtttgtagcagggtaacaaacacaaacactcaacattcacccccctgaaaaaagaagtctagttcttggggatgttcttgccgacgatcttggccggcgttatgcggaggaggttcccgggcttccctggcacggcccccttgatcatgagcacccggaggttgttgtcgatcttgacgatcttgagcttcctgatcttggtcttggttcctcccatcctcccgggcatcttcttccccttgtacacgcggcccggcgtcgtcccggctccgatggaacccagctgccggtggctcttggaaccgtgcgtcatcagcccgcgcttgaagttgtgcctcttgatgccacctgcgcagtgccacaagtaaaaccgcgcgcgagcggatcaagaacgttgcaagctaggagattgcacaagtggcatagcaatcgcaaatgcaaacctttgaaactacagctacagcaaatgctgctaaaacttcactctccatgaaacggaacaatgacacatacaaccgaggctggcagatcattagcagaattgctgttgctggcaatgcaatcgcactattggatggaggcgcgagaatcggtgtactaccttggaaccccttgccgatggagttgccggagacgtcgatgaggtcgccctccttgaagaggtcggcgaagtcgaggggctggccgggctcgaaggcgtcgacggcggtgagccggaactcctgcaggtggcgcagcggcggggcgccggccttgcccaggtggcccagctccgggcgggtgagcttgtcctcgcgcacgccgtggtacccgacctggacggcgtcgtacccgtccgtggcggccgtcttcacctgcgtcaccacgttgccgccctcccggaacccgaccacggtcaccggcaccggcttccccgtctccggatcgaagtaggtcatcatccccaccttggtcgccatcacgcccaccccggcctcgtacgacgcgcgcaccgccacgggcgcccgccgccgcccgccgctccaggggacggcgccctggcggcgctgcgggaggaggaacgccactgcgccgcccacgcccacggccgccatggccatgcttgcttcgatttgactgggattagcagaggggagtggcgctctcgttcaatttgactgggatttatgcggatgcggataggccgctcttcctcgcgcctatccccttatccaaggaggacgtctgctcggaagcgactcaaatagatacgcctttctacaaagaaagcgtatatacagttgcttagaaatttgcatggcaagacctccatccattctcctattgtcacgtact

SEQ ID NO: 49439 - DNA, 5676 bp, Zea Mays
attaggttactcttggcaatcaaaactattatgatggttttccttaatttaggttaatgataaaactggtggatacaataataaacttgttattacatgcttaagaagtgggctaaatcgctcattccgtgtgctccaaaagcctgaacgtgcaccgattagagcattgagggcttcttcatctggacggtaccttctgattctgtttcgcgatgctcctgttgaagtgtgggctatgacaaagaaccccatgatggtccttggcgcttccttttacagtattagaatggacactgccagctgcacctcggccaggtcaaaatgcatcatctaaacagtcttcaacctccaaggagcgatcagcagaggcttctggtgcagaaagttctgatgaaacatgtgaaagttttgcttttgcattagtcaatggcgctcttggtgtgtttgaagtgcatgggcggcgaatacgagattttaggccaaagtggccctcgtcatcatttgcatcttcagatggtttggttactgctatggcttaccgccttccccatgttgtaatgggggatcgatcaggcaacattagatggtgggatgttacaagtggcctttcttcttcttttagcactcacagggaaggcatcaggaggataaagttttctcctgttgttcatggtgatcgaagcagagggcgcatcgctgtgcttttctatgataatacattttcgatatttgacttggatagtccagatcccttggcaaatgcccttcttcagccgcagtctcctggtacccttgtcttggagcttgattggttgtcaacccgaacaaggaaggatgaaccacttatgttatgcattgccggagctgatagtagcttccgactgattgaggttaacattgatgctaagggcagttctatttcgaagccagtagctacgaaagagaggtttaggccaatgccattttgtttgccagtattatttccaacggcccatgctttggctttgcgaatgatacttcaacttggggtgaagccttcttggtttgaatgcaatagtagtgataaattaactggggacagctttaaggtagcaccaacatttggagatcttcgtagttacatgattgagacaacactccctcctattggtgacgccgttgtggctgaattgctccttaaagtgttggaaccatacagaaaggagggttgcattcttgatgatggaagagccagcctatattcagctatagtgaacaagggagcttgtgcaagatttgcatttgctgctgcgatttttggtgatttccaagaagcacttttctggctacagctgcctcaagctcttcgccacttcctgggtaaatccacaagtagatcaagagagaagatctcacaatcaagtttacatcctgattctgaacaaagctccagatttaatcggatagcttcaagagagagatctgcttctgaaaagttcacgaaaaatgctgcgaattatgggcaattaagctcaatggcatttaatcaagagcaactatggttcaatgcaagtgaaaggataccttggcatgacaagctcgatggtgaagatgctttgcaaaagcatgttcatgagcttgtctctctcgggaacttagaggctgcggtttcattgttactttcaacgccacctgaaggatcaaatttttacccaaatgcattaagagcagttgtgctgtcatctgcagtctcacaatccttgcatgaacttgcagtgaaggttgttgcagccaatatggttagaacggacaaatcgctatctggcacacatcttctatgtgctgttggaagatatcaggaagcatgttcacagcttcaagatgctgggtgttggaatgatgcagctactttggccgcaagccatttgcatggatctgactacgcaagggtgctgcagaggtgggccgattatgttcttcgtggtgagcacaatatgtggagagctcttatcctatacgttgctgctggagcactgccagaggctttggatacacttcgcaagagccagcgcccagataccgcagccatgttcttgctagcttgccacgagacctactcacaagccttatcagaatcagagcccgaggacgacacttccgtgttagcactgacgccgacgccggagcagacggagaagctccggttcccttccaagaatgtggccgacgaggacctgatcgcagtcagtgaggtcttcgggcagtaccagcagaagctggttcatctctgcatggacgccgaaccgacgtctgactgaatcgcacgccttgtcgcatggcagactgatgcgggcgtggattctccgtttttgaagcttattattatcaacaggttgcaaattccttccaagtttctgcgaagctttttgttctgtctgttggtaggtaccagacgtccagacatgacatcgggactgctgatgtggcagaatctgatggcaggaggcaggaacagacatgcagtgctgtatcgtaggtgccaatggttggcactgtttatacatacgtaagcatttgtatttggtacaagctatgttttttttttctttggtgcgcaaagagcgagtgcgcagcgaacttctcttgtggccgagatgagatgagaacagatgccatcgaggcagcagcagacgatatacttacacctgtacacccatgacagtttttgtctgaagattggttattatatgcttatctgcaaatgcatcgcttcaggccctggagacatcgctgtcactggatccatcgtcattgccgatccgtgcagacattgttttggaggtccgaaagctacgttcttgtcgcattcaagccctccatgattatggatgatggataatgataacaggtccagaatctcattgaacgttgccttcagctatatatgaaccagaaagaagtggtggacaccctatctttccaggcaaaaatagaacctagtttcactgagcttgtctggcagaagctcgaggaagagaatcgtgatttttcaaggcatactatgtaaggctgatgcttatgaatcaaataacggccttcaataagctccttgagcagcagtatgagattatgactaaagatcatccttctgggatgccatctgtacctcctgctgctcctaatggctcaaactctaacacattgaaccaaaacatgccctttctgcctgacactatccccagtactgcactgcaagataactcgttgcgcaatggaggttctagtagtatagttaatggtgctccatccgatgaccaatttatgtatactggtaaagttgttcatggccttcctggtggcatggatgcttcatcaagcctgctaacagcacacaatcctgctgttgggcagtttaatggacacaatggagcaacaataaagacagaatttggctactcaagcaactcagattttggattcagcaatgaggccgtgttcctagagcagtcagttggagatgtatcagattcctcgtaatttcagcttttcagatttgacagaggatttcagccaaagcgcagaaatattagagaattatggtcgatcccctttcatcccttccgatgcaaataacttcccagaatctactgctggagaacatactgaaataggaaataggcggctagatacaatatctgagggcattcattttgaagattttggaagtgattaatgaaacctttgatgacactgcacatggttgaggagtgatccatttgtacagactattttgggcagctaaatatctacaattgtggtcgtggaactagctgatttggtggccactgtttcttcttccgtgttaggttttgtgctcttagagtagaagcatggatggcttattattatgatcaaataatccgtattgaagggtggcccaaacaatccgtcttctttgtatcttctctgagggtgatgtggtagcaaatgtattcgttcagttggctatagtggaagctttacgattatgtcaaagttctcctttctgcccccctgttgcacaaggttacgtctgcagtttttcttgtttgtcgcatttcctggttccgttttggttgcgtttcctgactcagatcagtacatatctgcatgatctgcgaccatttgtatttaactatttgtatgatctatggccatagaattaatcaactattgtttagcggaattcaggaaccagaagtgcatcttgcattacctgcctattactctctcacccaagcatccaaattgtacaggttatagttttactaatctgaagttgcatgtgttcaaaaactggaaattggcaaaggattacatccagtttgtagcagggtaacaaacacaaacactcaacattcacccccctgaaaaaagaagtctagttcttggggatgttcttgccgacgatcttggccggcgttatgcggaggaggttcccgggcttccctggcacggcccccttgatcatgagcacccggaggttgttgtcgatcttgacgatcttgagcttcctgatcttggtcttggttcctcccatcctcccgggcatcttcttccccttgtacacgcggcccggcgtcgtcccggctccgatggaacccagctgccggtggctcttggaaccgtgcgtcatcagcccgcgcttgaagttgtgcctcttgatgccacctgcgcagtgccacaagtaaaaccgcgcgcgagcggatcaagaacgttgcaagctaggagattgcacaagtggcatagcaatcgcaaatgcaaacctttgaaactacagctacagcaaatgctgctaaaacttcactctccatgaaacggaacaatgacacatacaaccgaggctggcagatcattagcagaattgctgttgctggcaatgcaatcgcactattggatggaggcgcgagaatcggtgtactaccttggaaccccttgccgatggagttgccggagacgtcgatgaggtcgccctccttgaagaggtcggcgaagtcgaggggctggccgggctcgaaggcgtcgacggcggtgagccggaactcctgcaggtggcgcagcggcggggcgccggccttgcccaggtggcccagctccgggcgggtgagcttgtcctcgcgcacgccgtggtacccgacctggacggcgtcgtacccgtccgtggcggccgtcttcacctgcgtcaccacgttgccgccctcccggaacccgaccacggtcaccggcaccggcttccccgtctccggatcgaagtaggtcatcatccccaccttggtcgccatcacgcccaccccggcctcgtacgacgcgcgcaccgccacgggcgcccgccgccgcccgccgctccaggggacggcgccctggcggcgctgcgggaggaggaacgccactgcgccgcccacgcccacggccgccatggccatgcttgcttcgatttgactgggattagcagaggggagtggcgctctcgttcaatttgactgggatttatgcggatgcggataggccgctcttcctcgcgcctatccccttatccaaggaggacgtctgctcggaagcgactcaaatagatacgcctttctacaaagaaagcgtatatacagttgcttagaaatttgcatggcaagacctccatccattctcctattgtcacgtact

SEQ ID NO: 49440 - DNA, 5660 bp, Zea Mays
aaaactattatgatggttttccttaatttaggttaatgataaaactggtggatacaataataaacttgttattacatgcttaagaagtgggctaaatcgctcattccgtgtgctccaaaagcctgaacgtgcaccgattagagcattgagggcttcttcatctggacggtaccttctgattctgtttcgcgatgctcctgttgaagtgtgggctatgacaaagaaccccatgatgcttaggtccttggcgcttccttttacagtattagaatggacactgccagctgcacctcggccaggtcaaaatgcatcatctaaacagtcttcaacctccaaggagcgatcagcagaggcttctggtgcagaaagttctgatgaaacatgtgaaagttttgcttttgcattagtcaatggcgctcttggtgtgtttgaagtgcatgggcggcgaatacgagattttaggccaaagtggccctcgtcatcatttgcatcttcagatggtttggttactgctatggcttaccgccttccccatgttgtaatgggggatcgatcaggcaacattagatggtgggatgttacaagtggcctttcttcttcttttagcactcacagggaaggcatcaggaggataaagttttctcctgttgttcatggtgatcgaagcagagggcgcatcgctgtgcttttctatgataatacattttcgatatttgacttggatagtccagatcccttggcaaatgcccttcttcagccgcagtctcctggtacccttgtcttggagcttgattggttgtcaacccgaacaaggaaggatgaaccacttatgttatgcattgccggagctgatagtagcttccgactgattgaggttaacattgatgctaagggcagttctatttcgaagccagtagctacgaaagagaggtttaggccaatgccattttgtttgccagtattatttccaacggcccatgctttggctttgcgaatgatacttcaacttggggtgaagccttcttggtttgaatgcaatagtagtgataaattaactggggacagctttaaggtagcaccaacatttggagatcttcgtagttacatgattgagacaacactccctcctattggtgacgccgttgtggctgaattgctccttaaagtgttggaaccatacagaaaggagggttgcattcttgatgatggaagagccagcctatattcagctatagtgaacaagggagcttgtgcaagatttgcatttgctgctgcgatttttggtgatttccaagaagcacttttctggctacagctgcctcaagctcttcgccacttcctgggtaaatccacaagtagatcaagagagaagatctcacaatcaagtttacatcctgattctgaacaaagctccagatttaatcggatagcttcaagagagagatctgcttctgaaaagttcacgaaaaatgctgcgaattatgggcaattaagctcaatggcatttaatcaagagcaactatggttcaatgcaagtgaaaggataccttggcatgacaagctcgatggtgaagatgctttgcaaaagcatgttcatgagcttgtctctctcgggaacttagaggctgcggtttcattgttactttcaacgccacctgaaggatcaaatttttacccaaatgcattaagagcagttgtgctgtcatctgcagtctcacaatccttgcatgaacttgcagtgaaggttgttgcagccaatatggttagaacggacaaatcgctatctggcacacatcttctatgtgctgttggaagatatcaggaagcatgttcacagcttcaagatgctgggtgttggaatgatgcagctactttggccgcaagccatttgcatggatctgactacgcaagggtgctgcagaggtgggccgattatgttcttcgtggtgagcacaatatgtggagagctcttatcctatacgttgctgctggagcactgccagaggctttggatacacttcgcaagagccagcgcccagataccgcagccatgttcttgctagcttgccacgagacctactcacaagccttatcagaatcagagcccgaggacgacacttccgtgttagcactgacgccgacgccggagcagacggagaagctccggttcccttccaagaatgtggccgacgaggacctgatcgcagtcagtgaggtcttcgggcagtaccagcagaagctggttcatctctgcatggacgccgaaccgacgtctgactgaatcgcacgccttgtcgcatggcagactgatgcgggcgtggattctccgtttttgaagcttattattatcaacaggttgcaaattccttccaagtttctgcgaagctttttgttctgtctgttggtaggtaccagacgtccagacatgacatcgggactgctgatgtggcagaatctgatggcaggaggcaggaacagacatgcagtgctgtatcgtaggtgccaatggttggcactgtttatacatacgtaagcatttgtatttggtacaagctatgttttttttttctttggtgcgcaaagagcgagtgcgcagcgaacttctcttgtggccgagatgagatgagaacagatgccatcgaggcagcagcagacgatatacttacacctgtacacccatgacagtttttgtctgaagattggttattatatgcttatctgcaaatgcatcgcttcaggccctggagacatcgctgtcactggatccatcgtcattgccgatccgtgcagacattgttttggaggtccgaaagctacgttcttgtcgcattcaagccctccatgattatggatgatggataatgataacaggtccagaatctcattgaacgttgccttcagctatatatgaaccagaaagaagtggtggacaccctatctttccaggcaaaaatagaacctagtttcactgagcttgtctggcagaagctcgaggaagagaatcgtgatttttcaaggcatactatgtaaggctgatgcttatgaatcaaataacggccttcaataagctccttgagcagcagtatgagattatgactaaagatcatccttctgggatgccatctgtacctcctgctgctcctaatggctcaaactctaacacattgaaccaaaacatgccctttctgcctgacactatccccagtactgcactgcaagataactcgttgcgcaatggaggttctagtagtatagttaatggtgctccatccgatgaccaatttatgtatactggtaaagttgttcatggccttcctggtggcatggatgcttcatcaagcctgctaacagcacacaatcctgctgttgggcagtttaatggacacaatggagcaacaataaagacagaatttggctactcaagcaactcagattttggattcagcaatgaggccgtgttcctagagcagtcagttggagatgtatcagattcctcgtaatttcagcttttcagatttgacagaggatttcagccaaagcgcagaaatattagagaattatggtcgatcccctttcatcccttccgatgcaaataacttcccagaatctactgctggagaacatactgaaataggaaataggcggctagatacaatatctgagggcattcattttgaagattttggaagtgattaatgaaacctttgatgacactgcacatggttgaggagtgatccatttgtacagactattttgggcagctaaatatctacaattgtggtcgtggaactagctgatttggtggccactgtttcttcttccgtgttaggttttgtgctcttagagtagaagcatggatggcttattattatgatcaaataatccgtattgaagggtggcccaaacaatccgtcttctttgtatcttctctgagggtgatgtggtagcaaatgtattcgttcagttggctatagtggaagctttacgattatgtcaaagttctcctttctgcccccctgttgcacaaggttacgtctgcagtttttcttgtttgtcgcatttcctggttccgttttggttgcgtttcctgactcagatcagtacatatctgcatgatctgcgaccatttgtatttaactatttgtatgatctatggccatagaattaatcaactattgtttagcggaattcaggaaccagaagtgcatcttgcattacctgcctattactctctcacccaagcatccaaattgtacaggttatagttttactaatctgaagttgcatgtgttcaaaaactggaaattggcaaaggattacatccagtttgtagcagggtaacaaacacaaacactcaacattcacccccctgaaaaaagaagtctagttcttggggatgttcttgccgacgatcttggccggcgttatgcggaggaggttcccgggcttccctggcacggcccccttgatcatgagcacccggaggttgttgtcgatcttgacgatcttgagcttcctgatcttggtcttggttcctcccatcctcccgggcatcttcttccccttgtacacgcggcccggcgtcgtcccggctccgatggaacccagctgccggtggctcttggaaccgtgcgtcatcagcccgcgcttgaagttgtgcctcttgatgccacctgcgcagtgccacaagtaaaaccgcgcgcgagcggatcaagaacgttgcaagctaggagattgcacaagtggcatagcaatcgcaaatgcaaacctttgaaactacagctacagcaaatgctgctaaaacttcactctccatgaaacggaacaatgacacatacaaccgaggctggcagatcattagcagaattgctgttgctggcaatgcaatcgcactattggatggaggcgcgagaatcggtgtactaccttggaaccccttgccgatggagttgccggagacgtcgatgaggtcgccctccttgaagaggtcggcgaagtcgaggggctggccgggctcgaaggcgtcgacggcggtgagccggaactcctgcaggtggcgcagcggcggggcgccggccttgcccaggtggcccagctccgggcgggtgagcttgtcctcgcgcacgccgtggtacccgacctggacggcgtcgtacccgtccgtggcggccgtcttcacctgcgtcaccacgttgccgccctcccggaacccgaccacggtcaccggcaccggcttccccgtctccggatcgaagtaggtcatcatccccaccttggtcgccatcacgcccaccccggcctcgtacgacgcgcgcaccgccacgggcgcccgccgccgcccgccgctccaggggacggcgccctggcggcgctgcgggaggaggaacgccactgcgccgcccacgcccacggccgccatggccatgcttgcttcgatttgactgggattagcagaggggagtggcgctctcgttcaatttgactgggatttatgcggatgcggataggccgctcttcctcgcgcctatccccttatccaaggaggacgtctgctcggaagcgactcaaatagatacgcctttctacaaagaaagcgtatatacagttgcttagaaatttgcatggcaagacctccatccattctcctattgtcacgtact

SEQ ID NO: 49441 - DNA, 5145 bp, Zea Mays
tagcattgtgtttcttttataaggtaatgggggatcgatcaggcaacattagatggtgggatgttacaagtggcctttcttcttcttttagcactcacagggaaggcatcaggaggataaagttttctcctgttgttcatggtgatcgaagcagagggcgcatcgctgtgcttttctatgataatacattttcgatatttgacttggatagtccagatcccttggcaaatgcccttcttcagccgcagtctcctggtacccttgtcttggagcttgattggttgtcaacccgaacaaggaaggatgaaccacttatgttatgcattgccggagctgatagtagcttccgactgattgaggttaacattgatgctaagggcagttctatttcgaagccagtagctacgaaagagaggtttaggccaatgccattttgtttgccagtattatttccaacggcccatgctttggctttgcgaatgatacttcaacttggggtgaagccttcttggtttgaatgcaatagtagtgataaattaactggggacagctttaaggtagcaccaacatttggagatcttcgtagttacatgattgagacaacactccctcctattggtgacgccgttgtggctgaattgctccttaaagtgttggaaccatacagaaaggagggttgcattcttgatgatggaagagccagcctatattcagctatagtgaacaagggagcttgtgcaagatttgcatttgctgctgcgatttttggtgatttccaagaagcacttttctggctacagctgcctcaagctcttcgccacttcctgggtaaatccacaagtagatcaagagagaagatctcacaatcaagtttacatcctgattctgaacaaagctccagatttaatcggatagcttcaagagagagatctgcttctgaaaaaagttcaatctttgtgcagaattatgggcaattaagctcaatggcatttaatcaagagcaactatggttcaatgcaagtgaaaggataccttggcatgacaagctcgatggtgaagatgctttgcaaaagcatgttcatgagcttgtctctctcgggaacttagaggctgcggtttcattgttactttcaacgccacctgaaggatcaaatttttacccaaatgcattaagagcagttgtgctgtcatctgcagtctcacaatccttgcatgaacttgcagtgaaggttgttgcagccaatatggttagaacggacaaatcgctatctggcacacatcttctatgtgctgttggaagatatcaggaagcatgttcacagcttcaagatgctgggtgttggaatgatgcagctactttggccgcaagccatttgcatggatctgactacgcaagggtgctgcagaggtgggccgattatgttcttcgtggtgagcacaatatgtggagagctcttatcctatacgttgctgctggagcactgccagaggctttggatacacttcgcaagagccagcgcccagataccgcagccatgttcttgctagcttgccacgagacctactcacaagccttatcagaatcagagcccgaggacgacacttccgtgttagcactgacgccgacgccggagcagacggagaagctccggttcccttccaagaatgtggccgacgaggacctgatcgcagtcagtgaggtcttcgggcagtaccagcagaagctggttcatctctgcatggacgccgaaccgacgtctgactgaatcgcacgccttgtcgcatggcagactgatgcgggcgtggattctccgtttttgaagcttattattatcaacaggttgcaaattccttccaagtttctgcgaagctttttgttctgtctgttggtaggtaccagacgtccagacatgacatcgggactgctgatgtggcagaatctgatggcaggaggcaggaacagacatgcagtgctgtatcgtaggtgccaatggttggcactgtttatacatacgtaagcatttgtatttggtacaagctatgttttttttttctttggtgcgcaaagagcgagtgcgcagcgaacttctcttgtggccgagatgagatgagaacagatgccatcgaggcagcagcagacgatatacttacacctgtacacccatgacagtttttgtctgaagattggttattatatgcttatctgcaaatgcatcgcttcaggccctggagacatcgctgtcactggatccatcgtcattgccgatccgtgcagacattgttttggaggtccgaaagctacgttcttgtcgcattcaagccctccatgattatggatgatggataatgataacaggtccagaatctcattgaacgttgccttcagctatatatgaaccagaaagaagtggtggacaccctatctttccaggcaaaaatagaacctagtttcactgagcttgtctggcagaagctcgaggaagagaatcgtgatttttcaaggcatactatgtaaggctgatgcttatgaatcaaataacggccttcaataagctccttgagcagcagtatgagattatgactaaagatcatccttctgggatgccatctgtacctcctgctgctcctaatggctcaaactctaacacattgaaccaaaacatgccctttctgcctgacactatccccagtactgcactgcaagataactcgttgcgcaatggaggttctagtagtatagttaatggtgctccatccgatgaccaatttatgtatactggtaaagttgttcatggccttcctggtggcatggatgcttcatcaagcctgctaacagcacacaatcctgctgttgggcagtttaatggacacaatggagcaacaataaagacagaatttggctactcaagcaactcagattttggattcagcaatgaggccgtgttcctagagcagtcagttggagatgtatcagattcctcgtaatttcagcttttcagatttgacagaggatttcagccaaagcgcagaaatattagagaattatggtcgatcccctttcatcccttccgatgcaaataacttcccagaatctactgctggagaacatactgaaataggaaataggcggctagatacaatatctgagggcattcattttgaagattttggaagtgattaatgaaacctttgatgacactgcacatggttgaggagtgatccatttgtacagactattttgggcagctaaatatctacaattgtggtcgtggaactagctgatttggtggccactgtttcttcttccgtgttaggttttgtgctcttagagtagaagcatggatggcttattattatgatcaaataatccgtattgaagggtggcccaaacaatccgtcttctttgtatcttctctgagggtgatgtggtagcaaatgtattcgttcagttggctatagtggaagctttacgattatgtcaaagttctcctttctgcccccctgttgcacaaggttacgtctgcagtttttcttgtttgtcgcatttcctggttccgttttggttgcgtttcctgactcagatcagtacatatctgcatgatctgcgaccatttgtatttaactatttgtatgatctatggccatagaattaatcaactattgtttagcggaattcaggaaccagaagtgcatcttgcattacctgcctattactctctcacccaagcatccaaattgtacaggttatagttttactaatctgaagttgcatgtgttcaaaaactggaaattggcaaaggattacatccagtttgtagcagggtaacaaacacaaacactcaacattcacccccctgaaaaaagaagtctagttcttggggatgttcttgccgacgatcttggccggcgttatgcggaggaggttcccgggcttccctggcacggcccccttgatcatgagcacccggaggttgttgtcgatcttgacgatcttgagcttcctgatcttggtcttggttcctcccatcctcccgggcatcttcttccccttgtacacgcggcccggcgtcgtcccggctccgatggaacccagctgccggtggctcttggaaccgtgcgtcatcagcccgcgcttgaagttgtgcctcttgatgccacctgcgcagtgccacaagtaaaaccgcgcgcgagcggatcaagaacgttgcaagctaggagattgcacaagtggcatagcaatcgcaaatgcaaacctttgaaactacagctacagcaaatgctgctaaaacttcactctccatgaaacggaacaatgacacatacaaccgaggctggcagatcattagcagaattgctgttgctggcaatgcaatcgcactattggatggaggcgcgagaatcggtgtactaccttggaaccccttgccgatggagttgccggagacgtcgatgaggtcgccctccttgaagaggtcggcgaagtcgaggggctggccgggctcgaaggcgtcgacggcggtgagccggaactcctgcaggtggcgcagcggcggggcgccggccttgcccaggtggcccagctccgggcgggtgagcttgtcctcgcgcacgccgtggtacccgacctggacggcgtcgtacccgtccgtggcggccgtcttcacctgcgtcaccacgttgccgccctcccggaacccgaccacggtcaccggcaccggcttccccgtctccggatcgaagtaggtcatcatccccaccttggtcgccatcacgcccaccccggcctcgtacgacgcgcgcaccgccacgggcgcccgccgccgcccgccgctccaggggacggcgccctggcggcgctgcgggaggaggaacgccactgcgccgcccacgcccacggccgccatggccatgcttgcttcgatttgactgggattagcagaggggagtggcgctctcgttcaatttgactgggatttatgcggatgcggataggccgctcttcctcgcgcctatccccttatccaaggaggacgtctgctcggaagcgactcaaatagatacgcctttctacaaagaaagcgtatatacagttgcttagaaatttgcatggcaagacctccatccattctcctattgtcacgtact

SEQ ID NO: 49442 - DNA, 4822 bp, Zea Mays
gtaagaattatggggaagaattttgagcactaaactgaaactaatgatgctaagggcagttctatttcgaagccagtagctacgaaagagaggtttaggccaatgccattttgtttgccagtattatttccaacggcccatgctttggctttgcgaatgatacttcaacttggggtgaagccttcttggtttgaatgcaatagtagtgataaattaactggggacagctttaaggtagcaccaacatttggagatcttcgtagttacatgattgagacaacactccctcctattggtgacgccgttgtggctgaattgctccttaaagtgttggaaccatacagaaaggagggttgcattcttgatgatggaagagccagcctatattcagctatagtgaacaagggagcttgtgcaagatttgcatttgctgctgcgatttttggtgatttccaagaagcacttttctggctacagctgcctcaagctcttcgccacttcctgggtaaatccacaagtagatcaagagagaagatctcacaatcaagtttacatcctgattctgaacaaagctccagatttaatcggatagcttcaagagagagatctgcttctgaaaagttcacgaaaaatgctgcgaattatgggcaattaagctcaatggcatttaatcaagagcaactatggttcaatgcaagtgaaaggataccttggcatgacaagctcgatggtgaagatgctttgcaaaagcatgttcatgagcttgtctctctcgggaacttagaggctgcggtttcattgttactttcaacgccacctgaaggatcaaatttttacccaaatgcattaagagcagttgtgctgtcatctgcagtctcacaatccttgcatgaacttgcagtgaaggttgttgcagccaatatggttagaacggacaaatcgctatctggcacacatcttctatgtgctgttggaagatatcaggaagcatgttcacagcttcaagatgctgggtgttggaatgatgcagctactttggccgcaagccatttgcatggatctgactacgcaagggtgctgcagaggtgggccgattatgttcttcgtggtgagcacaatatgtggagagctcttatcctatacgttgctgctggagcactgccagaggctttggatacacttcgcaagagccagcgcccagataccgcagccatgttcttgctagcttgccacgagacctactcacaagccttatcagaatcagagcccgaggacgacacttccgtgttagcactgacgccgacgccggagcagacggagaagctccggttcccttccaagaatgtggccgacgaggacctgatcgcagtcagtgaggtcttcgggcagtaccagcagaagctggttcatctctgcatggacgccgaaccgacgtctgactgaatcgcacgccttgtcgcatggcagactgatgcgggcgtggattctccgtttttgaagcttattattatcaacaggttgcaaattccttccaagtttctgcgaagctttttgttctgtctgttggtaggtaccagacgtccagacatgacatcgggactgctgatgtggcagaatctgatggcaggaggcaggaacagacatgcagtgctgtatcgtaggtgccaatggttggcactgtttatacatacgtaagcatttgtatttggtacaagctatgttttttttttctttggtgcgcaaagagcgagtgcgcagcgaacttctcttgtggccgagatgagatgagaacagatgccatcgaggcagcagcagacgatatacttacacctgtacacccatgacagtttttgtctgaagattggttattatatgcttatctgcaaatgcatcgcttcaggccctggagacatcgctgtcactggatccatcgtcattgccgatccgtgcagacattgttttggaggtccgaaagctacgttcttgtcgcattcaagccctccatgattatggatgatggataatgataacaggtccagaatctcattgaacgttgccttcagctatatatgaaccagaaagaagtggtggacaccctatctttccaggcaaaaatagaacctagtttcactgagcttgtctggcagaagctcgaggaagagaatcgtgatttttcaaggcatactatgtaaggctgatgcttatgaatcaaataacggccttcaataagctccttgagcagcagtatgagattatgactaaagatcatccttctgggatgccatctgtacctcctgctgctcctaatggctcaaactctaacacattgaaccaaaacatgccctttctgcctgacactatccccagtactgcactgcaagataactcgttgcgcaatggaggttctagtagtatagttaatggtgctccatccgatgaccaatttatgtatactggtaaagttgttcatggccttcctggtggcatggatgcttcatcaagcctgctaacagcacacaatcctgctgttgggcagtttaatggacacaatggagcaacaataaagacagaatttggctactcaagcaactcagattttggattcagcaatgaggccgtgttcctagagcagtcagttggagatgtatcagattcctcgtaatttcagcttttcagatttgacagaggatttcagccaaagcgcagaaatattagagaattatggtcgatcccctttcatcccttccgatgcaaataacttcccagaatctactgctggagaacatactgaaataggaaataggcggctagatacaatatctgagggcattcattttgaagattttggaagtgattaatgaaacctttgatgacactgcacatggttgaggagtgatccatttgtacagactattttgggcagctaaatatctacaattgtggtcgtggaactagctgatttggtggccactgtttcttcttccgtgttaggttttgtgctcttagagtagaagcatggatggcttattattatgatcaaataatccgtattgaagggtggcccaaacaatccgtcttctttgtatcttctctgagggtgatgtggtagcaaatgtattcgttcagttggctatagtggaagctttacgattatgtcaaagttctcctttctgcccccctgttgcacaaggttacgtctgcagtttttcttgtttgtcgcatttcctggttccgttttggttgcgtttcctgactcagatcagtacatatctgcatgatctgcgaccatttgtatttaactatttgtatgatctatggccatagaattaatcaactattgtttagcggaattcaggaaccagaagtgcatcttgcattacctgcctattactctctcacccaagcatccaaattgtacaggttatagttttactaatctgaagttgcatgtgttcaaaaactggaaattggcaaaggattacatccagtttgtagcagggtaacaaacacaaacactcaacattcacccccctgaaaaaagaagtctagttcttggggatgttcttgccgacgatcttggccggcgttatgcggaggaggttcccgggcttccctggcacggcccccttgatcatgagcacccggaggttgttgtcgatcttgacgatcttgagcttcctgatcttggtcttggttcctcccatcctcccgggcatcttcttccccttgtacacgcggcccggcgtcgtcccggctccgatggaacccagctgccggtggctcttggaaccgtgcgtcatcagcccgcgcttgaagttgtgcctcttgatgccacctgcgcagtgccacaagtaaaaccgcgcgcgagcggatcaagaacgttgcaagctaggagattgcacaagtggcatagcaatcgcaaatgcaaacctttgaaactacagctacagcaaatgctgctaaaacttcactctccatgaaacggaacaatgacacatacaaccgaggctggcagatcattagcagaattgctgttgctggcaatgcaatcgcactattggatggaggcgcgagaatcggtgtactaccttggaaccccttgccgatggagttgccggagacgtcgatgaggtcgccctccttgaagaggtcggcgaagtcgaggggctggccgggctcgaaggcgtcgacggcggtgagccggaactcctgcaggtggcgcagcggcggggcgccggccttgcccaggtggcccagctccgggcgggtgagcttgtcctcgcgcacgccgtggtacccgacctggacggcgtcgtacccgtccgtggcggccgtcttcacctgcgtcaccacgttgccgccctcccggaacccgaccacggtcaccggcaccggcttccccgtctccggatcgaagtaggtcatcatccccaccttggtcgccatcacgcccaccccggcctcgtacgacgcgcgcaccgccacgggcgcccgccgccgcccgccgctccaggggacggcgccctggcggcgctgcgggaggaggaacgccactgcgccgcccacgcccacggccgccatggccatgcttgcttcgatttgactgggattagcagaggggagtggcgctctcgttcaatttgactgggatttatgcggatgcggataggccgctcttcctcgcgcctatccccttatccaaggaggacgtctgctcggaagcgactcaaatagatacgcctttctacaaagaaagcgtatatacagttgcttagaaatttgcatggcaagacctccatccattctcctattgtcacgtact

SEQ ID NO: 49443 - DNA, 4268 bp, Zea Mays
gtccgatttgataagccgcagagtttcccactgttcgagctccgcccgcccgttctaaaaccctagatctctctcccctcacccccgtccctcgacccgccgccgagtcgccggaggaggcgggggcctcgccgcagaagccatgtacctctacagcctgacgctacagcgcgcgacgggcgcggtgtgcgccgtcatcggcagcttcagcgggcgggactcgaagaagtccgccgcctccgggtccggctccacgcaagagatcgccgtggcccggggcagcacgctcgacctcctccgcccggacccggagacgggccgcctccgcacgctcctctccgtcgacgtcttcggcgccatccgctcgctcgcgcagttccgcctcaccggcgccaacaaggattacctcgtcgtcggctccgactcgggccgcctcgtcatcctcgagtactcccccgaccgcaaccgcctcgacaaggtccaccaggagacctttggcaagtcgggctgccgccgtatcgtccccggccagctcctcgccgtcgacccaaagggccgcgcgctctgcatcgccgcgctcgagaagcagaagctcgtctacgtcctcaatcgcgacgccgccgcgcgcctcaccatctcgtccccgctcgaggcgcacaagtccaacactctcaccttcgccctcgccgcgctcgactgtgggttcgacaaccccgtcttcgccgccatcgagctcgagtacgccgagtctgaccgcgaccccacggggcaggccgccaaccaggcgcagaagctcctcaccttctacgagcttgacctggggctcaaccatgtctcccgcaaggtctctgagccgattgataatggtgccaatcttctcgtgactgtaccgggtggtggtgacggtcccagcggtgttctcgtgtgctgtgataacttcgtgctgtaccggaaccagggccacccagagattcgtgctgttattccacgccgtgctgacctccctgctgagcgtggcgtcctcattgtcgcagccgccacacacaaacaaaagagtatgttcttcttcctgctacagactgagtatggtgacatattcaaggttgacctcgatcataatggggatgctgttagtgagctcaggatcaagtactttgacaccataccagtgacatcggctgtctgtgtgctgcgctccggtttcctctttgctgcttctgagtttggcaaccatgcactttaccagttccgtgatattggtagagaagccgatgttgagtcatcttctgcaacactgatggagacagaggagggattccagccagttttctttcagccaagggcactgaagaacctcatgcgcatagatgagattgagagcctcatgccagtcatggacatgcgtgtcgcgaatttattcgatgaggaaacaccccagttgttcactgcctgtggccgtggtccacgctccacgttgcgcatcctgaggcctggccttgccatcagtgagatggcccgatcaatgctgcctgctgagcctattgctgtgtggactgtcaagaagaacatcaatgacatgtttgatgcttacattgtagtgtcctttactaatgtcacgcttgtgctctctattggtgagactattgaagaagtcagcgacagccagttcctggacacgactcactcccttgcagtcacgctccttggtgaggactctctaatgcaggtccatccaaatggcatcaggcacatcagggaagatggccgtgtcaatgagtggaggacgcctggaaagaaaactattacgaaggttggatcaaaccgtctccaggtggtaattgctcttagtggtggagagctcatctattttgagatggatatgactggtcagctcatggaggtagagaagcaggacatgtctggtgatgttgcgtgcctggccattgcaccggtccctgaggggaggcaaaggtccagatttcttgccgtaggatcctatgataacaccattcgtatcctctcattggatcctgatgattgcctgcagcctctaagcgtccagagtgtatcatcggcaccagagtcactcctattcttggaggtccaggcatcagttggtggtgaggatggtgcagattatccagccaaccttttcctcaatgctggtttgcagaatggtgttcttttccgtaccaacgtcgacatggttacgggtcagctatctgacacacgttctcgattcctaggcctgagacctccaaagctgttcccttgtatagttagccacaggcaagcaatgctctgcctgtccagccgtccttggctgggttacatacatcaaggccattttctcttgacaccactgtcctgtgatacactcgaatctgcagcatcattttcttctgatcagtgttcagaaggtgtagttgctgttgcgggagatgccttacgtattttcaccattgaacgcctgggagagactttcaatgagacggcaatccctctgcggtacaccccaaggaagtttgtgattctaccaaagaaaaaatacattgctgtcattgagagtgacaaaggtgcattcagcgcagaagagcgagaagctgctaagaaagagtgccttgatgcttctggtgcagcggagaatggaaatgcgaataatggcgatcctatggagaatggtgatggtcaagatggtgccgaggagggcaacacatttcctgatgaacaatatggttatccaaaagctgaatctgagaggtgggtttcctgcattaggatcttggatccaaggagtagggacacaacctgtctgctggaattgcaggacaatgaggctgctgtcagtatctgcactgtgaatttccatgataaggagcatggaactctactggctattggcactgccaagggtttgcagttctggccaaggaggacccttgctggtggattcatccacgtatataagtttgtggatgaagggaggtcacttgaacttctacacaagacacaggtggaggaagtacctcttgcattgtgccaattccaggggcgattacttgcaggtgttggttcagtgctcagactatatgatctgggtaaaagaaaattgctcagaaaatgtgaaaacaagctttttccgaggacattagtatctattcatacctaccgtgatagaatctatgttggcgatatgcaagagtgttcccaggtggcttacaacagcacaacacatagattttgacactatggctggagcagataagtttgggaatatatattttgctcgtcttcctcaggatatctcagatgagattgaagaagacccaactggaggcaagattaagtgggagcaagggaagttaaatggtgcccctaacaaagttgaggagattgtgcagtttcatgtgggtgatgttgtaacgtgtttgcagaaggcctctttgattcctggtggaggtgaatgtcttatttatgggactgtgatgggcagtgtgggagcactgcttgcatttacctccagggaagatgttgatttcttctctcacttggagatgcatctgcgtcaggagcatccaccattgtgtggaagagatcacatggcttacagatctgcctattttccagtgaaggatgtgatagatggtgatctctgcgagcagtatccctccctcccagctgatatgcagaggaagattgctgatgagctggacagaactccgggtgaaatcctgaagaagctagaagacatcaggaacaaaatcatctaaaacagcggcttagtgtgaagaaactaggcagggcagtgccggtgctctttgctttaagactgtatccagttcgagctgttgccgcacttcaagatgtgacagcagcgcatccaacaagtttggagcacgctgatctgtacgatctttcctgatgctatctggtccagtcggcgatttattgctgagatagagcatgtacggcaccagaatgagtttttttgtatctcgtagaagtgatttagctgatgtcgttgactgtttacttggcttgatgtaattgagtgaagttattcatgttggattattcgtgtagtacggggttaccttggtaatgtactaccacaagggcttggttgctaggaagggaattggagggttccaattaagccttcaatcctctctaatttcctcccaaacaagccctaacagatttttgaagcgcagatgcgttgctgtcattgccttttcagattgttcagctgatggaatcctcagttg

SEQ ID NO: 49444 - DNA, 5749 bp, Zea Mays
gccgaaatcaacgccgccggctccgcatcctcgacccgctcccgcctccgttcggctgccgtacggaatctcaggtaccccgtcgccgaggccgccccctgtctctcgcggccccgccgggattctagggtttcggtcgggccggcccaagggagtctgcaaacagcgcgggtcaggctcccccgcgccgatcgccgcgagctgcccccgcgcgggcggccgtgggcaccgcttccactcgctagccttcctggtacatgcggccgctgccacactggtgctcctgctcaatcgggaagccccgcgcctcggattccgtgcagggtagacaatttcctgctaccgcgctgctgcgtgtgggatgacctgagcctccgcctgccgccaagatgaatgtggggcaggctgcccacctgtccgggcagatgtctgggcagacagcgcagatgaatcaggtccctgccaccggtgtcggcattggcgttggcactgccgatgggctaccgcagcaccagccaatgcaggagatggcggcgttctcgggaacggaccagcagtttgtcatgtttcggaccacaatgcgcgaaaagatatttaactatataggaaggaaacagtcatcggctgagtggcggaagcggttgccagaactggcaaagcgacttgaggagatcttgtacagaaaattcccaaacaagactgactactacaatatgatgaagggaccagttgagccgcaattgcagtttgctattaagaccttgagcgctcagaaccaacacaatcaacaaaacccacaaatggcaaggcaaatagcatcatcctctagctatggtactatgattcctacccctggtatgacgcaaggcaccaatgcaagttctaggattccttatgtcacagaaaacaatggcctttcatcgtctggtgcaggcatggttcctcagaatgctaacatgggtgcctcgatgcaaggtccaatgtctaatggcttccaacatttaaatgccagcattccacaaaattctaccacaaataacatacaatctacaatgggttcagttggtgtccagcgacaactacctcatatgattccaactccaggatttagtaatcaacagaatgtaccttcaaatcctgactattcaaatggaactggatatttcaatggtgagccagctgtggcatcacatatgcagcaccagaaccaatttcctagcaaccaaattcagcatattgggggccacaataattctggaatacattcaagcatgctggacagctcatctgcatacggtttatcagatggacacatgaatggtggaataggagtgcatgggtcaaatatgcagctaacaaacaggaccacggcaccacaaacatatatgaacatatccccttacggcaattcgtccaaaccgatgcagcagcaattcaatcagcatcctcagcagagaataccaacatcagttgaaatgactggttctggcagcttctatgctactggctctacccctttaaccacagcaaatagtcagagcatgaatgttgcaaatttgcagtctagatcaagaatgaatcagatgttggtttccaatcagttaaacattcagtccattcagcaacagccccagataaaaaatgaggttttggatcaaacagaaaaggtgaattttcagtcaccacagttgactcatgatcaactactacgccaacacccaatgccgcaacatcaggtgcaacctaattcccagtttgttcaaaatcagtatcatataaatcaacagcagccaaattcacagcatcagcaggctatgctaaggaacaattcctttaaacagtctcaaatggcttccacccattcaatgcaactggcagaacaggggtcactgctacacactgaactggtatcttcacaaactagtgatcctgctgatcttccaagcttccagggtcaataccagcaaagaaatgctcttgacaatgttaaaggagggcagatgcttggtcatctatctagctctcaaaattttcatccttctgtctcacatggttctcagcaattgttgccctctaaccagcagcttgatgacggttctaatgctgtaagctatgtgctgaaaggatcgcaggcagagcaaatgctgcgtcctcaatggcagccacaaacaatggaaaaggctcctgttactactaattcaacactcgaaaagcaaatacaagaagatttttgtcaaagagcaatgtcgcaagatggagcacagcaaccattttcatcagattggcgtctttctaattgcactgcagcttctattgatcctgcattgccgaagcctgcagctggagggtttgaacaggtcaatggaaatatacattacctccgtcagataaagtggttgctgctactgtttcatgcaaaaacatgcacataccctgttggaagttgtaagttccatggttgtgttcaggtgcaggagcttttgaagcattttcagaactgccaaagtaaagattgttcatacaggagctgcagtaagtcaaaaatgatgtctcaccattataaaacttgtgtcgatgaacaatgtcctgtgtgcagcgttgtaaggaagtttttgcgccaatcaactgaacaggcatctaagcaaaaagctctcgagtctagaaaacttgctcaacaaaatgtgcctcagagaatcatgaacgggatagaaggtgatagaatggatgttgacccaatgtcagttgaagcatttgatgatcaaccattcgttccaaaacgcttgaagacgcatcctccatcacccagtggcctagagaatgatatctctgtagtctccaattatcatgtaaactcaggctttgcattgcaggaaacacagcctgagcagcttgaccacaataacaggacatcatatctgaaacgagaggtagatgcaaaggctgacatgcgagctcctcaaaagcccataaaaattagttatggtattgatggaaatgtgactgcatcaaggcataatgtgattcctggtgttcccagtgagattaattctcatatcaagcaagaaaacttgttggttgacaaagagacaagtgaaaccgcccttgaggttaagaatgaaacaaatgatccaactgatgcgactgtgtctaaatcaggaaaaccaaaaataaaaggtgtttcaatgacggaattattcactccagaacaaataatggaacatattgacagtctaaggctgtgggttggtcagagcaaggctaaagctgaaaagaatcaagctattggtcattctgagaacgagaactcttgccagctctgtagagtagagaaacttacttttgaacctccaccaatatattgttctccttgtggagctcggataaagcgaaacgcgccatactacactgtgggtactggtgatacacgtcattatttctgtatcccttgttacaatgagtctcgtggtgagactattgaggttgaaggtcaaacatttccgaaggcaaggttagagaaaaaaagaaatgatgaggaaacggaagaatggtgggttcaatgtgacaaatgtgaatgttggcaacatcaaatttgtgctttatttaatggaagaaggaacgatggaggacaagctgaatatacttgccccaattgctatgttgaggaggtcaaatgtgggctacgcaaacctttaccacagagtgctgttcttggggcaaaagatttgccgagaactgttcttagtgatcatatagaagatcggctatttaaacgacttaagcaggagaaacaggaccgtgcagctgctgctggcaaaaatattgatgagattcctggagcggaaggacttgttgtcagagttgtttcatcagtggataagaagctggaggttaaaccacgttttttagaaatttttcaagaagacaactaccctacagagttcccttacaagtccaaggctgttctcttgttccagaaaatagaaggtgtggaagtatgtctatttggaatgtatgttcaagaatttggtgctgaatgctctttcccgaaccagcgtcgtgtttatttgtcatacttggattctgttaagtacttcagacctgagattaaaacagtatctggagaagccttgcgtacatttgtgtatcatgaaattctgataggatatcttgaatactgtaaactgcggggattcacaagttgttacatatgggcttgtccacctttgaagggtgaagattacatcttatattgccatcctgagattcaaaagactccgaaatctgataaactgcgtgagtggtatctatctatgcttcggaaagcttctaaggaggaaattgttgttgagctcacaaatctatatgaccatttcttccttactatgggggaatgcaaggctaaggtgactgcttctcgcttgccatatttcgatggagattattggccaggagctgcagaagatatgatcaatcaactccgacaagaagaagacgaccgcaaactccagaaaaagagtaaaacaaagaagattattacaaaaagagctcttaaagctgctggccacaccgatctcagcgggaatgcttccaaggatgctatgttgatgcaaaagcttggtgaaaccatatatcctatgaaggaagatttcattatggtccatttacagtattcgtgtagtcactgttgtacccttatggtgtctggaagacgttgggtttgtcatcaatgcagaagcttttacatctgcgacaagtgttatgatgcagaacagcaacttgacgacagggagaggcacccgagtaataatagagacacacatatgctccatccggttgatattcttggggtgcccaaagataccaaagatagagatgacatcttggaaagtgagttctttgacaccagacaggcattccttagtctttgccaaggaaatcattatcagtatgacacacttcgacgcgcaaagcattcatcaatgatggtgttgtaccacctacacaatccaactgcaccagcatttgtcactacgtgcaatgtctgcagtcatgatattgaaactggtcaaggctggcggtgcgagatttgtccagattttgatgtgtgcaactcttgtttccaaaaaggagtggttactcatcctcacaagttaacgaaccatccatcagctgctgaccgtgatgctcaaaacgcagaagctcggcaaatgcgtgtccagcagctaagaaagatgcttgatcttctggtacatgcgtcgacatgccgctctggtagttgccagtatcccaactgccgaaaagtcaaggggctattccgtcatgggatgcagtgcaaaacgcgtgcttcaggagggtgtgtcctttgcaagaaaatgtggtacatgcttcaactccatgcccgagcttgcaaggattcagactgcaatgtgccgcggtgcagggatctgaaggagcatcttagaaggttgcaacagcagtctgattccaggaggagggctgctgtgaatgaaatgatgaggcaaagagcggcggaggtcgctgcaaacgaatagttgcctctgtacagcactgttgctccatagattttctttctagtgcgggtggcacaggagggcgacaagttgtggtatgtatactcttctgctatcagtttttctggtttttttgacgaaacgaatggattttggttcggtcgtccggaggatggaggatgcagttgaaagggatgtgttgatcctgtttgtattag

SEQ ID NO: 49445 - DNA, 6718 bp, Zea Mays
gccgaaatcaacgccgccggctccgcatcctcgacccgctcccgcctccgttcggctgccgtacggaatctcaggtaccccgtcgccgaggccgccccctgtctctcgcggccccgccgggattctagggtttcggtcgggccggcccaagggagtctgcaaacagcgcgggtcaggctcccccgcgccgatcgccgcgagctgcccccgcgcgggcggccgtgggcaccgcttccactcgctagccttcctggtacatgcggccgctgccacactggtgctcctgctcaatcgggaagccccgcgcctcggattccgtgcagggtagacaatttcctgctaccgcgctgctgcgtgtgggatgacctgagcctccgcctgccgccaagatgaatgtggggcaggctgcccacctgtccgggcagatgtctgggcagacagcgcagatgaatcaggtccctgccaccggtgtcggcattggcgttggcactgccgatgggctaccgcagcaccagccaatgcaggagatggcggcgttctcgggaacggaccagcagtttgtcatgtttcggaccacaatgcgcgaaaagatatttaactatataggaaggaaacagtcatcggctgagtggcggaagcggttgccagaactggcaaagcgacttgaggagatcttgtacagaaaattcccaaacaagactgactactacaatatgatgaagggaccagttgagccgcaattgcagtttgctattaagaccttgagcgctcagaaccaacacaatcaacaaaacccacaaatggcaaggcaaatagcatcatcctctagctatggtactatgattcctacccctggtatgacgcaaggcaccaatgcaagttctaggattccttatgtcacagaaaacaatggcctttcatcgtctggtgcaggcatggttcctcagaatgctaacatgggtgcctcgatgcaaggtccaatgtctaatggcttccaacatttaaatgccagcattccacaaaattctaccacaaataacatacaatctacaatgggttcagttggtgtccagcgacaactacctcatatgattccaactccaggatttagtaatcaacagaatgtaccttcaaatcctgactattcaaatggaactggatatttcaatggtgagccagctgtggcatcacatatgcagcaccagaaccaatttcctagcaaccaaattcagcatattgggggccacaataattctggaatacattcaagcatgctggacagctcatctgcatacggtttatcagatggacacatgaatggtggaataggagtgcatgggtcaaatatgcagctaacaaacaggaccacggcaccacaaacatatatgaacatatccccttacggcaattcgtccaaaccgatgcagcagcaattcaatcagcatcctcagcagagaataccaacatcagttgaaatgactggttctggcagcttctatgctactggctctacccctttaaccacagcaaatagtcagagcatgaatgttgcaaatttgcagtctagatcaagaatgaatcagatgttggtttccaatcagttaaacattcagtccattcagcaacagccccagataaaaaatgaggttttggatcaaacagaaaaggtgaattttcagtcaccacagttgactcatgatcaactactacgccaacacccaatgccgcaacatcaggtgcaacctaattcccagtttgttcaaaatcagtatcatataaatcaacagcagccaaattcacagcatcagcaggctatgctaaggaacaattcctttaaacagtctcaaatggcttccacccattcaatgcaactggcagaacaggggtcactgctacacactgaactggtatcttcacaaactagtgatcctgctgatcttccaagcttccagggtcaataccagcaaagaaatgctcttgacaatgttaaaggagggcagatgcttggtcatctatctagctctcaaaattttcatccttctgtctcacatggttctcagcaattgttgccctctaaccagcagcttgatgacggttctaatgctgtaagctatgtgctgaaaggatcgcaggcagagcaaatgctgcgtcctcaatggcagccacaaacaatggaaaaggctcctgttactactaattcaacactcgaaaagcaaatacaagaagatttttgtcaaagagcaatgtcgcaagatggagcacagcaaccattttcatcagattggcgtctttctaattgcactgcagcttctattgatcctgcattgccgaagcctgcagctggagggtttgaacaggtcaatggaaatatacattacctccgtcagataaagtggttgctgctactgtttcatgcaaaaacatgcacataccctgttggaagttgtaagttccatggttgtgttcaggtgcaggagcttttgaagcattttcagaactgccaaagtaaagattgttcatacaggagctgcagtaagtcaaaaatgatgtctcaccattataaaacttgtgtcgatgaacaatgtcctgtgtgcagcgttgtaaggaagtttttgcgccaatcaactgaacaggcatctaagcaaaaagctctcgagtctagaaaacttgctcaacaaaatgtgcctcagagaatcatgaacgggatagaaggtgatagaatggatgttgacccaatgtcagttgaagcatttgatgatcaaccattcgttccaaaacgcttgaagacgcatcctccatcacccagtggcctagagaatgatatctctgtagtctccaattatcatgtaaactcaggctttgcattgcaggaaacacagcctgagcagcttgaccacaataacaggacatcatatctgaaacgagaggtagatgcaaaggctgacatgcgagctcctcaaaagcccataaaaattagttatggtattgatggaaatgtgactgcatcaaggcataatgtgattcctggtgttcccagtgagattaattctcatatcaagcaagaaaacttgttggttgacaaagagacaagtgaaaccgcccttgaggttaagaatgaaacaaatgatccaactgatgcgactgtgtctaaatcaggaaaaccaaaaataaaaggtgtttcaatgacggaattattcactccagaacaaataatggaacatattgacagtctaaggctgtgggttggtcagagcaaggctaaagctgaaaagaatcaagctattggtcattctgagaacgagaactcttgccagctctgtagagtagagaaacttacttttgaacctccaccaatatattgttctccttgtggagctcggataaagcgaaacgcgccatactacactgtgggtactggtgatacacgtcattatttctgtatcccttgttacaatgagtctcgtggtgagactattgaggttgaaggtcaaacatttccgaaggcaaggttagagaaaaaaagaaatgatgaggaaacggaagaatggtgggttcaatgtgacaaatgtgaatgttggcaacatcaaatttgtgctttatttaatggaagaaggaacgatggaggacaagctgaatatacttgccccaattgctatgttgaggaggtcaaatgtgggctacgcaaacctttaccacagagtgctgttcttggggcaaaagatttgccgagaactgttcttagtgatcatatagaagatcggctatttaaacgacttaagcaggagaaacaggaccgtgcagctgctgctggcaaaaatattgatgagattcctggagcggaaggacttgttgtcagagttgtttcatcagtggataagaagctggaggttaaaccacgttttttagaaatttttcaagaagacaactaccctacagagttcccttacaagtccaaggctgttctcttgttccagaaaatagaaggtgtggaagtatgtctatttggaatgtatgttcaagaatttggtgctgaatgctctttcccgaaccagcgtcgtgtttatttgtcatacttggattctgttaagtacttcagacctgagattaaaacagtatctggagaagccttgcgtacatttgtgtatcatgaaattctgataggatatcttgaatactgtaaactgcggggattcacaagttgttacatatgggcttgtccacctttgaagggtgaagattacatcttatattgccatcctgagattcaaaagactccgaaatctgataaactgcgtgagtggtatctatctatgcttcggaaagcttctaaggaggaaattgttgttgagctcacaaatctatatgaccatttcttccttactatgggggaatgcaaggctaaggtgactgcttctcgcttgccatatttcgatggagattattggccaggagctgcagaagatatgatcaatcaactccgacaagaagaagacgaccgcaaactccagaaaaagagtaaaacaaagaagattattacaaaaagagctcttaaagctgctggccacaccgatctcagcgggaatgcttccaaggatgctatgttgatgcaaaagcttggtgaaaccatatatcctatgaaggaagatttcattatggtccatttacagtattcgtgtagtcactgttgtacccttatggtgtctggaagacgttgggtttgtcatcaatgcagaagcttttacatctgcgacaagtgttatgatgcagaacagcaacttgacgacagggagaggcacccgagtaataatagagacacacatatgctccatccggttgatattcttggggtgcccaaagataccaaagatagagatgacatcttggaaagtgagttctttgacaccagacaggcattccttagtctttgccaaggaaatcattatcagtatgacacacttcgacgcgcaaagcattcatcaatgatggtgttgtaccacctacacaatccaactgcaccagcatttgtcactacgtgcaatgtctgcagtcatgatattgaaactggtcaaggctggcggtgcgagatttgtccagattttgatgtgtgcaactcttgtttccaaaaaggagtggttactcatcctcacaagttaacgaaccatccatcagctgctgaccgtgatgctcaaaacgcagaagctcggcaaatgcgtgtccagcagctaagaaagatgcttgatcttctggtacatgcgtcgacatgccgctctggtagttgccagtatcccaactgccgaaaagtcaaggggctattccgtcatgggatgcagtgcaaaacgcgtgcttcaggagggtgtgtcctttgcaagaaaatgtggtacatgcttcaactccatgcccgagcttgcaaggattcagactgcaatgtgccgcggtgcagggatctgaaggagcatcttagaaggttgcaacagcagtctgattccaggaggagggctgctgtgaatgaaatgatgaggcaaagagcggcggaggtcgctgcaaacgaatagttgcctctgtacaggtatactttgtggaaagaggataggaagaagtatgcatgcagggttgcactcctcacccccacaccaaggagaaagcttgggatggttgataaattataggattggtaggtaaagatcagccgcttcacatggatttcttacgacgaagatctcggccatccttcgcctatggttaacaacatataggctcgctgaagcagcagggtgcgccaccgtaggctgtctgtaactgtcgcttgcaccccctccagtgctgaccagctacaccctgcgtgccgcaccgatgctgtcgtcgactggggcgcattgcaactcctgggtgtggtgaattctttgatttgacctgtactagctgaactgatcttctctgttgctgcttgctgatgatggtgtataataggtgtctctggacagttgtcagtcgtgcattgctgaagatttggtgtagctgttgtttgtcccccccctctccattgtcttcttgtctccaggccaggagaggggtataggttaaaaaagggtaaaaagggatgggcgttattggacaagtatttcttttatttctgccccccattttgtaggactcatctttgttaaagtataaagcaaagtaaatcctccatgtcttctcttgtagcactgttgctccatagattttctttctagtgcgggtggcacaggagggcgacaagttgtgaccctccaccatcagaaaaggctagaaaggcaactagggtttgctacgtcgcccacaccatctccaccaaggaccgccgccctcatccatctcccgtctccccatcttcctcgccctcgtctacctcgccctcgtcagaaaaagcagctcagtttcatcacaagtttgttttgggatctgtcgcctcaagtttcatctagctacctccaacaaatccttcaatctccatggctacatcggtacttctcctatttcaccttgtgccactactagtagtgtttttattcttgagtagagcattttgctttcaactagcatgtctaattgcatataaattacatattctagatatcaaatcaatatactaacgaggaggaaattaaaaggaagagaaagaagcgaaagagagttgttgtattagttgtgtctattatggctataattgcaaatcggt

SEQ ID NO: 49446 - DNA, 5985 bp, Zea Mays
cctgagcctccgcctgccgccaagatgaatgtggggcaggctgcccacctgtccgggcagatgtctgggcagacagcgcagatgaatcaggtccctgccaccggtgtcggcattggcgttggcactgccgatgggctaccgcagcaccagccaatgcaggagatggcggcgttctcgggaacggaccagcagtttgtcatgtttcggaccacaatgcgcgaaaagatatttaactatataggaaggaaacagtcatcggctgagtggcggaagcggttgccagaactggcaaagcgacttgaggagatcttgtacagaaaattcccaaacaagactgactactacaatatgatgaagggaccagttgagccgcaattgcagtttgctattaagaccttgagcgctcagaaccaacacaatcaacaaaacccacaaatggcaaggcaaatagcatcatcctctagctatggtactatgattcctacccctggtatgacgcaaggcaccaatgcaagttctaggattccttatgtcacagaaaacaatggcctttcatcgtctggtgcaggcatggttcctcagaatgctaacatgggtgcctcgatgcaagcattccacaaaattctaccacaaataacatacaatctacaatgggttcagttggtgtccagcgacaactacctcatatgattccaactccaggatttagtaatcaacagaatgtaccttcaaatcctgactattcaaatggaactggatatttcaatggtgagccagctgtggcatcacatatgcagcaccagaaccaatttcctagcaaccaaattcagcatattgggggccacaataattctggaatacattcaagcatgctggacagctcatctgcatacggtttatcagatggacacatgaatggtggaataggagtgcatgggtcaaatatgcagctaacaaacaggaccacggcaccacaaacatatatgaacatatccccttacggcaattcgtccaaaccgatgcagcagcaattcaatcagcatcctcagcagagaataccaacatcagttgaaatgactggttctggcagcttctatgctactggctctacccctttaaccacagcaaatagtcagagcatgaatgttgcaaatttgcagtctagatcaagaatgaatcagatgttggtttccaatcagttaaacattcagtccattcagcaacagccccagataaaaaatgaggttttggatcaaacagaaaaggtgaattttcagtcaccacagttgactcatgatcaactactacgccaacacccaatgccgcaacatcaggtgcaacctaattcccagtttgttcaaaatcagtatcatataaatcaacagcagccaaattcacagcatcagcaggctatgctaaggaacaattcctttaaacagtctcaaatggcttccacccattcaatgcaactggcagaacaggggtcactgctacacactgaactggtatcttcacaaactagtgatcctgctgatcttccaagcttccagggtcaataccagcaaagaaatgctcttgacaatgttaaaggagggcagatgcttggtcatctatctagctctcaaaattttcatccttctgtctcacatggttctcagcaattgttgccctctaaccagcagcttgatgacggttctaatgctgtaagctatgtgctgaaaggatcgcaggcagagcaaatgctgcgtcctcaatggcagccacaaacaatggaaaaggctcctgttactactaattcaacactcgaaaagcaaatacaagaagatttttgtcaaagagcaatgtcgcaagatggagcacagcaaccattttcatcagattggcgtctttctaattgcactgcagcttctattgatcctgcattgccgaagcctgcagctggagggtttgaacaggtcaatggaaatatacattacctccgtcagataaagtggttgctgctactgtttcatgcaaaaacatgcacataccctgttggaagttgtaagttccatggttgtgttcaggtgcaggagcttttgaagcattttcagaactgccaaagtaaagattgttcatacaggagctgcagtaagtcaaaaatgatgtctcaccattataaaacttgtgtcgatgaacaatgtcctgtgtgcagcgttgtaaggaagtttttgcgccaatcaactgaacaggcatctaagcaaaaagctctcgagtctagaaaacttgctcaacaaaatgtgcctcagagaatcatgaacgggatagaaggtgatagaatggatgttgacccaatgtcagttgaagcatttgatgatcaaccattcgttccaaaacgcttgaagacgcatcctccatcacccagtggcctagagaatgatatctctgtagtctccaattatcatgtaaactcaggctttgcattgcaggaaacacagcctgagcagcttgaccacaataacaggacatcatatctgaaacgagaggtagatgcaaaggctgacatgcgagctcctcaaaagcccataaaaattagttatggtattgatggaaatgtgactgcatcaaggcataatgtgattcctggtgttcccagtgagattaattctcatatcaagcaagaaaacttgttggttgacaaagagacaagtgaaaccgcccttgaggttaagaatgaaacaaatgatccaactgatgcgactgtgtctaaatcaggaaaaccaaaaataaaaggtgtttcaatgacggaattattcactccagaacaaataatggaacatattgacagtctaaggctgtgggttggtcagagcaaggctaaagctgaaaagaatcaagctattggtcattctgagaacgagaactcttgccagctctgtagagtagagaaacttacttttgaacctccaccaatatattgttctccttgtggagctcggataaagcgaaacgcgccatactacactgtgggtactggtgatacacgtcattatttctgtatcccttgttacaatgagtctcgtggtgagactattgaggttgaaggtcaaacatttccgaaggcaaggttagagaaaaaaagaaatgatgaggaaacggaagaatggtgggttcaatgtgacaaatgtgaatgttggcaacatcaaatttgtgctttatttaatggaagaaggaacgatggaggacaagctgaatatacttgccccaattgctatgttgaggaggtcaaatgtgggctacgcaaacctttaccacagagtgctgttcttggggcaaaagatttgccgagaactgttcttagtgatcatatagaagatcggctatttaaacgacttaagcaggagaaacaggaccgtgcagctgctgctggcaaaaatattgatgagattcctggagcggaaggacttgttgtcagagttgtttcatcagtggataagaagctggaggttaaaccacgttttttagaaatttttcaagaagacaactaccctacagagttcccttacaagtccaaggctgttctcttgttccagaaaatagaaggtgtggaagtatgtctatttggaatgtatgttcaagaatttggtgctgaatgctctttcccgaaccagcgtcgtgtttatttgtcatacttggattctgttaagtacttcagacctgagattaaaacagtatctggagaagccttgcgtacatttgtgtatcatgaaattctgataggatatcttgaatactgtaaactgcggggattcacaagttgttacatatgggcttgtccacctttgaagggtgaagattacatcttatattgccatcctgagattcaaaagactccgaaatctgataaactgcgtgagtggtatctatctatgcttcggaaagcttctaaggaggaaattgttgttgagctcacaaatctatatgaccatttcttccttactatgggggaatgcaaggctaaggtgactgcttctcgcttgccatatttcgatggagattattggccaggagctgcagaagatatgatcaatcaactccgacaagaagaagacgaccgcaaactccagaaaaagagtaaaacaaagaagattattacaaaaagagctcttaaagctgctggccacaccgatctcagcgggaatgcttccaaggatgctatgttgatgcaaaagcttggtgaaaccatatatcctatgaaggaagatttcattatggtccatttacagtattcgtgtagtcactgttgtacccttatggtgtctggaagacgttgggtttgtcatcaatgcagaagcttttacatctgcgacaagtgttatgatgcagaacagcaacttgacgacagggagaggcacccgagtaataatagagacacacatatgctccatccggttgatattcttggggtgcccaaagataccaaagatagagatgacatcttggaaagtgagttctttgacaccagacaggcattccttagtctttgccaaggaaatcattatcagtatgacacacttcgacgcgcaaagcattcatcaatgatggtgttgtaccacctacacaatccaactgcaccagcatttgtcactacgtgcaatgtctgcagtcatgatattgaaactggtcaaggctggcggtgcgagatttgtccagattttgatgtgtgcaactcttgtttccaaaaaggagtggttactcatcctcacaagttaacgaaccatccatcagctgctgaccgtgatgctcaaaacgcagaagctcggcaaatgcgtgtccagcagctaagaaagatgcttgatcttctggtacatgcgtcgacatgccgctctggtagttgccagtatcccaactgccgaaaagtcaaggggctattccgtcatgggatgcagtgcaaaacgcgtgcttcaggagggtgtgtcctttgcaagaaaatgtggtacatgcttcaactccatgcccgagcttgcaaggattcagactgcaatgtgccgcggtgcagggatctgaaggagcatcttagaaggttgcaacagcagtctgattccaggaggagggctgctgtgaatgaaatgatgaggcaaagagcggcggaggtcgctgcaaacgaatagttgcctctgtacaggtatactttgtggaaagaggataggaagaagtatgcatgcagggttgcactcctcacccccacaccaaggagaaagcttgggatggttgataaattataggattggtaggtaaagatcagccgcttcacatggatttcttacgacgaagatctcggccatccttcgcctatggttaacaacatataggctcgctgaagcagcagggtgcgccaccgtaggctgtctgtaactgtcgcttgcaccccctccagtgctgaccagctacaccctgcgtgccgcaccgatgctgtcgtcgactggggcgcattgcaactcctgggtgtggtgaattctttgatttgacctgtactagctgaactgatcttctctgttgctgcttgctgatgatggtgtataataggtgtctctggacagttgtcagtcgtgcattgctgaagatttggtgtagctgttgtttgtcccccccctctccattgtcttcttgtctccaggccaggagaggggtataggttaaaaaagggtaaaaagggatgggcgttattggacaagtatttcttttatttctgccccccattttgtaggactcatctttgttaaagtataaagcaaagtaaatcctccatgtcttctcttgtagcactgttgctccatagattttctttctagtgcgggtggcacaggagggcgacaagttgtggtatgtatactcttctgctatcagtttttctggtttttttgacgaaacgaatggattttggttcggtcgtccggaggatggaggatgcagttgaaagggatgtgttgatcctgtttgtattag

SEQ ID NO: 49447 - DNA, 2012 bp, Zea Mays
cagcgcacggccaccctgccgcgctcccggtccctgcgcgtgtttatccacgcctcacgccgcgctcgcttcggccacggcggtaatggcggcggcccgacgcctcttctccttccacctccaagcgcgtcctctcgccgccggtgttgccgtcgcgaccccgcactgccacggaaagcatgacgcggtctcgtgcaaggccacggggaaaaccaagcccaaggcgaaggcgggcaagggcggcgagcggcagcataggcgggcgctggaggagcatctcaagcggcgcacccgttccgcagctgccttcgatgccgacctgtacggtcggcgcgcccacgagcaccatatccccgtcttgcttggcgaggtcctcgccgccttccgcaggccccgcccgctccgctccttcgtcgactgcaccctcggcgccgcaggacactccctcgccatgatggaggcgcacccggagttggagttgtacattggcatggacgtcgacccctccgctctggggattggccatgggcacattgaggccttccttgctggtagggaaagggaagcgaatggaggggaagacgatgccttgcttgggacgctgcgtgcctacactcatgtcaagaacttcaagtacatcaagcaagttctcagtagcgtcgatgagagtctagtggttggatcttctggagttgatggtatcctcattgaccttggcatgtcatccatgcaggtgaataaatctaataggggattcagtgtactccaggatggtcctcttgatatgcgcatggaccctaagacaggcaactttaagagcagaggacattttgaattcttggccggagcttgaacttgggcgtatcctgcgtgaatatggggaggaaagcaactggcaatccgtccagaagcaaattgttaaagcccggtctgtgggcggtttacactctactggggatcttgtcaaactaatccaaaggatgtgtaccatatcaagcgggcggcagggctggatcaagacttcaacaagagtgtttcaggccctcaggattgcagtcaatgatgagctccgggttctagaagattcactccattcatgctttgactgtctggcgacaggtggtcggcttgctgtaatctcattccacagtctggaggatagaattgtgaagaaaactttcttggagctcatccatgggggtgaagcaaatgaagaagacgacaaagacgaccaggcactcactgatatcgaagacggagatgaaccatggtctggccagagagtgcaaggaaggaatggaaccgtcctcacaaaaagaccaataaccccctcgcaagaggaggaaaaactaaaccagaggtgcagaagcgcaaagcttagagtcattcagaagacctgaataatttcggataaattttgaaggattcctgggcacatcggcgtgtagttgtttatagccagagaaatgtgaatgggattctcacttgcgtgcacagccagctgcagtctggatcaccagaaattttacatcagccggatgtggtggtgctatttatcctcgacaagaaatctagaggcttaggttagtcgaaaaaaaactcactgtatctgcatcagtttctgaacttcgttcatgtatatcgcctcatgaactctgtaaacctttcacttgcaagacacgataatcagtttaggccctgtttgggaacaaagtttttgaaaactacagtttttgaaatactatactatactttagttatgacaataccgtagtttataataccgcagttttgaaaactgaggtccagagctaagtttagaatgccttaaaacaactatagtatttgcaatacttcagttttgaaaacagagattttacccagcttgccaaacaccattatgtatataatactgcagtatttgagaatactgcagtattcttccaaaactgcagaaaaactttgttcccaaacacccccttagggttttcgagccctccttcactcctggt

SEQ ID NO: 49448 - DNA, 2000 bp, Zea Mays
cagcgcacggccaccctgccgcgctcccggtccctgcgcgtgtttatccacgcctcacgccgcgctcgcttcggccacggcggtaatggcggcggcccgacgcctcttctccttccacctccaagcgcgtcctctcgccgccggtgttgccgtcgcgaccccgcactgccacggaaagcatgacgcggtctcgtgcaaggccacggggaaaaccaagcccaaggcgaaggcgggcaagggcggcgagcggcagcataggcgggcgctggaggagcatctcaagcggcgcacccgttccgcagctgccttcgatgccgacctgtacggtcggcgcgcccacgagcaccatatccccgtcttgcttggcgaggtcctcgccgccttccgcaggccccgcccgctccgctccttcgtcgactgcaccctcggcgccgcaggacactccctcgccatgatggaggcgcacccggagttggagttgtacattggcatggacgtcgacccctccgctctggggattggccatgggcacattgaggccttccttgctggtagggaaagggaagcgaatggaggggaagacgatgccttgcttgggacgctgcgtgcctacactcatgtcaagaacttcaagtacatcaagcaagttctcagtagcgtcgatgagagtctagtggttggatcttctggagttgatggtatcctcattgaccttggcatgtcatccatgcaggtgaataaatctaataggggattcagtgtactccaggatggtcctcttgatatgcgcatggaccctaaggcaactttaagagcagaggacattttgaattcttggccggagcttgaacttgggcgtatcctgcgtgaatatggggaggaaagcaactggcaatccgtccagaagcaaattgttaaagcccggtctgtgggcggtttacactctactggggatcttgtcaaactaatccaaaggatgtgtaccatatcaagcgggctggatcaagacttcaacaagagtgtttcaggccctcaggattgcagtcaatgatgagctccgggttctagaagattcactccattcatgctttgactgtctggcgacaggtggtcggcttgctgtaatctcattccacagtctggaggatagaattgtgaagaaaactttcttggagctcatccatgggggtgaagcaaatgaagaagacgacaaagacgaccaggcactcactgatatcgaagacggagatgaaccatggtctggccagagagtgcaaggaaggaatggaaccgtcctcacaaaaagaccaataaccccctcgcaagaggaggaaaaactaaaccagaggtgcagaagcgcaaagcttagagtcattcagaagacctgaataatttcggataaattttgaaggattcctgggcacatcggcgtgtagttgtttatagccagagaaatgtgaatgggattctcacttgcgtgcacagccagctgcagtctggatcaccagaaattttacatcagccggatgtggtggtgctatttatcctcgacaagaaatctagaggcttaggttagtcgaaaaaaaactcactgtatctgcatcagtttctgaacttcgttcatgtatatcgcctcatgaactctgtaaacctttcacttgcaagacacgataatcagtttaggccctgtttgggaacaaagtttttgaaaactacagtttttgaaatactatactatactttagttatgacaataccgtagtttataataccgcagttttgaaaactgaggtccagagctaagtttagaatgccttaaaacaactatagtatttgcaatacttcagttttgaaaacagagattttacccagcttgccaaacaccattatgtatataatactgcagtatttgagaatactgcagtattcttccaaaactgcagaaaaactttgttcccaaacacccccttagggttttcgagccctccttcactcctggt

SEQ ID NO: 49449 - DNA, 1528 bp, Zea Mays
cagcgcacggccaccctgccgcgctcccggtccctgcgcgtgtttatccacgcctcacgccgcgctcgcttcggccacggcggtaatggcggcggcccgacgcctcttctccttccacctccaagcgcgtcctctcgccgccggtgttgccgtcgcgaccccgcactgccacggaaagcatgacgcggtctcgtgcaaggccacggggaaaaccaagcccaaggcgaaggcgggcaagggcggcgagcggcagcataggcgggcgctggaggagcatctcaagcggcgcacccgttccgcagctgccttcgatgccgacctgtacggtcggcgcgcccacgagcaccatatccccgtcttgcttggcgaggtcctcgccgccttccgcaggccccgcccgctccgctccttcgtcgactgcaccctcggcgccgcaggacactccctcgccatgatggaggcgcacccggagttggagttgtacattggcatggacgtcgacccctccgctctggggattggccatgggcacattgaggccttccttgctggtagggaaagggaagcgaatggaggggaagacgatgccttgcttgggacgctgcgtgcctacactcatgtcaagaacttcaagtacatcaagcaagttctcagtagcgtcgatgagagtctagtggttggatcttctggagttgatggtatcctcattgaccttggcatgtcatccatgcaggtgaataaatctaataggggattcagtgtactccaggatggtcctcttgatatgcgcatggaccctaaggcaactttaagagcagaggacattttgaattcttggccggagcttgaacttgggcgtatcctgcgtgaatatggggaggaaagcaactggcaatccgtccagaagcaaattgttaaagcccggtctgtgggcggtttacactctactggggatcttgtcaaactaatccaaaggatgtgtaccatatcaagcgggcggcagggctggatcaagacttcaacaagagtgtttcaggccctcaggattgcagtcaatgatgagctccgggttctagaagattcactccattcatgctttgactgtctggcgacaggtggtcggcttgctgtaatctcattccacagtctggaggatagaattgtgaagaaaactttcttggagctcatccatgggggtgaagcaaatgaagaagacgacaaagacgaccaggcactcactgatatcgaagacggagatgaaccatggtctggccagagagtgcaaggaaggaatggaaccttttttttttttttgagagaatcattgtgtatgtagtaatccctaacgaggccgaacatcgatgcatccacatcaaggcctggttgttgtgtttcctagagattctgactcactaggtcggattcctgatggtcatgcgatctcgctgttctttcttcaaacgtgaagaataacattgtctttgaaaagtttcaaaaaaaggagaatcagattgaacgttgttatgtg

SEQ ID NO: 49450 - DNA, 2165 bp, Zea Mays
gctcgatttgttatgcgtttttttttgtgcctctatgcaagcaagcagaaggaggggaataccttgctggcttgctgtctagtgctgcagtgggaaactgtaaatggaggacgacccaggtagcggtggaggcaaaacactttattcacctatatatatctttactgtatgaagtgcaggaagccgattgtgaagctaccacaaaaaaaaaagtcagcaagatatgcattagaaaatgcttgatatgcatgtgcgatgatacaagatcagcaagcggaaatgcttagaaaaaaaactgttcttatcgatcctcactgcaccagagtaactcgattggaaaggaaacatttgaaagaaattgccagtactcgccatttgcacctatctgctgtcactctgtctacagaaacacagggccttttcttctggatgtggagggccatctggaacttgttagcgaggcttcgtcttgtagggtggtggttttgatttcccatcatgttctttgatcagtctggcgtctagagatatgcggtggttagatacttttgaatatctgctgtttctttgcacaagatgagcagaacactaatctaaaaaaacattactctaatcaactgatcgtttgagtttaaaaggaatattaatgatcaatacttggtgctgactatttgcgttacttgtttagagatttttagaggacacgggacatccgaatttatcatgtgccagttttttttaaaaaaaaacatcaaaaagtcatgtatgtagtacacagacttaaatatagctaaggataagatcaagcagagctggcactacaacaatgccctagatgtcgagagtcaaaattagcaagcagtggtactaatcatatgttcatagtacaaagttgaataaaaactgaagagatgatcaagtcgaggaagtggatcaatttggtggctttgatttttttccctagagtacatggagttgtaaattgaagctggttttagggtagcacttcatcatagatgaatatgagattagacttttgaaggtctatttaacttaatgtgtactacatacatggttttttgaggtctgcaacacacttttttttataacaaggtttgcccacacgttgggttgactttattttggctaaagaaggtgcactaaccctaaccctatagtacattgtactacctcccttctcgaatatttggcgccagctggtttgtttttgaacttaaacgcgacgaataaaaaagaacggagggagtactattttgttactagcaaacgtgcccatgcgtcgcaacggaacaccataagtgtaggaatatcgtcgctagatgtcggttgttctaactcgtataaacggaagggtcatgagtctagttcacatacaagatacatagggcatgggccaatatgtattagaaccggacttcgtattcatcagcgctagatggagtcctaactaatatgagtatatgcatcataagtcggcgtcagcgtcatatatgaaggaaacacttcactgtcgggtagttaggggaaggtggacgaaaaaaaaatgggcggggtgaaattttgcctctttaatattaggtatatagacatagattggaaccctacgttttgtgtcccaaacattagcatgacacgtgatttacttccgcatgaactggttttgcatcctggtagtattaagtgtagaactagtgctgtgaaatctcaccggactggccggagctggtatttgggtgaaagttatattgaatatttatgtgactcgatacagatgggagtacacagaatcacagtagtttggctttcgtctgttgttgcgctgcccctttctgtctttttacaaaaccaaaagaaactggattggattcgaaggcgcggaacttgatcttcggttctgtaccatctgtagtgtatggccgtatccttcagaatgtagggtgcagtggaaaccataactctaactagtacctacatcgtacatagtccctgtggaatgatccattgtgcgactgctatggaataacatatatttttttgtatttggcaacaaagtgctaccttgttgttgttgttgttgttgttgttgttgttgttgttgttgttgttttctgtgaaggcaaagttctgctaatttcaatagatac

SEQ ID NO: 49451 - DNA, 2865 bp, Zea Mays
gccggtagtactcacatcctcctcctctcctttccatcgcgtgcatctttccattcgtcggtgtgctttccgcagcactgttgaggctagcgacggtttcgttgtttaagtacacacaggacgtttcgttgtgctgtcaggctgggcgctgccgcctgccgctgtgggctgtggcctggccgaggaagctgtcgctcagccgcactggccgagccgccaagggcgctacctgccttgccttgccttgcttgacgatgagagagagagaagaaccggccactggtgctgttcgccgacctgagcgcgccgtgcgacgccctggtgctgttcgccggtagtactaatcatgttgtcaccctagattgctacctgtagatctttgcatcgatgtggccggccactggagtacgcccaagtggtaggcaactcgtcgatctggttggggccggagtagctgatggtgttcggatctgagaataatttggcatgatagcacatgtttggatctctgttatctttaattaaatatatggtaggaataaaggcatgatgtgtgtataatagttttgggtctggccggggaagaccacgggtaaaccaaaatgtatgatcgataattcgttatgctgaaaggataatacgtataaattattcgagcatgcctagctaagctagatgattgaccactaacgtatcgaacggtttgacaaataactgcaacctttctcctagtctcctctttgcaacatgttggcaaaaatattctatcaaaataaggcgagacgagtgattaaagtttcattttatctagatgtatttctaacaaaaacctattatatttctagattatccctgcaccagttcgagttggagaagacgaacttccaccgtcttgggaccctataccctctcctttagttcaaacatagtaagggagaagaagcgaaggcatacatcaaaattaagtggcgaagaacatgttcaggagttgcttcaaggtcatttgaagaactgtcgggtagcgttcaggatggagcctgaaattttcaaatcgttggcaagttatcttagaagggaggggttggttcgtgatacaaggattaaggtcgaggaaaagctagcattcttcttatacatgctcagccataatgcctcgtttgaagacctaatagaagaatttgggcatagtggtgatacatatcatcgtcacataaagcatttctttgacctagttgttcctaccctctctaagcaattcctgaagccaccaaatcctaatcatgtccatcaaaaaattgaaaggaatcctaggttttatccctacttcaagatggagatgaaagcaatgatcaaggcagtgaacaaggcaacaatcttagagacacaattgcacaacaaatggaaaacaagagcaaattggaattctatgttagagaagacccttgttgacttgttgcatgaacacaatacacctgaatataagggtaacaatggttggacacccgatgcatggaacaagattgccaaggaatttcaagagagggaaagatatgcaggtttctcaaaagttcaaatccaagaaaaggaaaaggagttaaagagagattacaggatgttgaaagatgcgaggaaacagagcggagtttcttgggatgagaaaaggtgtatgattcaagctgatccaccgatatgggacaacataatcaaagtaagtttatttccatgtttctataaacttgagatctttttgtgtgttctcagttcttagcttggcatttacattaatatttaagtgttgtttgttttatttatctcacatttagtttcttactttattgtgcagtcatttccaagggctaaaaaattccgcaacaaatcttttcctctgtttgaagctttgggagagctacatgatggtaatactgctgaagggacctacaacttcacttctactcaaccaaatggtccagatctcacacaaattgggtttggagatgttcctatcaatgtagaagaccgtgaagatgtgggagaccctttggcagatcacagacaaaatgaagtagaagacagagtgtatgaagttgaaggagttgatgtaaatgctgataggcatgatgaaaggtcaaaaaggacttctgctatttcaaggaatgaagaaggaaaagaaccaaagaggccgaagaagagttccaacatagaagtattgatggagaggtacctagacattagaagcaaacaagctgaagatgaagcgacacaattggcaagagaaagggaggcaagaggaggtgatgatttctcaattaagaattgcatagcagttctaaatacattggaagtcacaaaagaggagaaggtcaaagcatataaggtgttcaaggatcctgacaatcgacagatattcttgagtgcatgcaatgatgatagagaggctgcattgatgtggttgagggatgagatggcttagcaggtatacctaaggttaactacatattttaacttggttttgcatacctttcattattaagaggccatgtatgctattatcaacgtcttagattcttaggatcagtacagtagtaatcctttggtcattttgcctaacttgttgtcctagtaaaaagtagctacattaattaatgatacaaatatccggttattcctatccaattccaacattttcagctaccccagcaatttgatgttggatatttgacagttttttcagctacattaactaatgattgcagactatgttgctgacagtttttgcctttaacctgcaatgtatagactcttacatatgattcttgcatttgatttactatcaatcgctttaacctgcaatgtatagactcttac

SEQ ID NO: 49452 - DNA, 1971 bp, Zea Mays
tttaaatctaggattagttggtgtgcaaaaataagaatcgtggagtaaattagatattgcttggtggaggaaaagagaatgaagatatttcttcgattttaacctcaaccaccacaccctttattgttctgagcatcagacacgtttgttctctggaaaccaccgtagctcatccactcagccatacgcagcatgcccaggatgcaaagcttatcagccacgtcccaaccaaactcctacacgccatcttcttcctaggccgacggccttagcctccacgccggctgtccttgctctggtttctccccggctccagctcgccagccgcgccctccctgctcgcccagccatctcctcgcctccatggccgctgcaccagccgagtccctccccatgtcagctgcaagcacgccgtgcttccttcccatggccgtctgcagcttctcccatggtgagctccctccagtgccctaggtttccatggccgcccctccctcatcttcctccccaagctgagctcgcccagcccctctctgctccctggtttctccccacgccagcagccatggcacctccttcccctgctcgccctccctctgtgcccagcctcctctctgttcttccgtggagcagtagccctcctctaattctgcagcagcagcttcccctttttcttttgttctccatgaatgaaagcccaagcgccagccccctcccttttgtcaagtgattggaagagagttctagggaaaatcaatggagaagaaaccgtgtttcagttcgacgcgctctaggtgtttgatggaatggatgaaccgaagatccttgttgctcttgcgaaatctgagtctatttagtgttggtacgctagctgaaaatcgtgcgaagcgaagggtgtggatcaaaacaacccacaagacgatgtcggccaatgagcctgaagatggatggactaagcggatgtcaaaacgaaagttgatcgtcaagtggccttcatctaacaacactaacatagtgtttatttcaggtacgctagctgaaaatcgtgcgaagcgaagggtgtggatcaaaacaacccacaagacgatgtcggccaatgagcctgaagatggatggactaagcggatgtcaaaacgaaagttgatcgtcaagtggccttcatctaacaacactaacatagtgtttatttcaggcaagccccggtgcatttgccacctccttgttgttttaaaacttttatcacttatatgctgcattaggtgataggagttgagtgatgaaacagttgatgcattgccattccttggaatttgattatcctccttgatacctgttttacaaaaagaactaatgaggcttagccctgcctagagaattaaaacttgtttctttttaaaagaatgatgtgtgacactgggtatgggtttgttttatgaaaaaggacttgtaatggtgagcgcatcatctgcagtgatgaattcatcattcaagtatggtacctctgtcaggtacatggtttgggtgttaaataataagatgagactagacgttgagcaggaaaggtcgcccgtctgtgtcgcttaaggacagttctgattgttggcctgctgatctaggaccctttaactggccacatgcctcatcatgggtaagctttgcctcggtcggaccaataccagaacagctcgcacgcactgggagtggagagatggcgagagtagcttgtaccctccgtggcaagagactggaaggtggggtgctgtactctcagaaacatggcgggcaccatggcgagagtaacgtgtaccaaccaggccaatggctggatggtggagtgctgtgctctcgggtcgcgtgaacccgttctggtcttgagaaacccgtgggcgagttgacatatgcaagggttaagtgctacatatatcgtgtggttggagatcctcagctgagtattaatcgattcggatcgcc

SEQ ID NO: 49453 - DNA, 1613 bp, Zea Mays
tgcccaggatgcaaagcttatcagccacgtcccaaccaaactcctacacgccatcttcttcctaggccgacggccttagcctccacgccggctgtccttgctctggtttctccccggctccagctcgccagccgcgccctccctgctcgcccagccatctcctcgcctccatggccgctgcaccagccgagtccctccccatgtcagctgcaagcacgccgtgcttccttcccatggccgtctgcagcttctcccatggtgagctccctccagtgccctaggtttccatggccgcccctccctcatcttcctccccaagctgagctcgcccagcccctctctgctccctggtttctccccacgccagcagccatggcacctccttcccctgctcgccctccctctgtgcccagcctcctctctgttcttccgtggagcagtagccctcctctaattctgcagcagcagcttcccctttttcttttgttctccatgaatgaaagcccaagcgccagccccctcccttttgtcaagtgattggaagagagttctagggaaaatcaatggagaagaaaccgtgtttcagttcgacgcgctctaggtgtttgatggaatggatgaaccgaagatccttgttgctcttgcgaaatctgagtctatttagtgttggtacgctagctgaaaatcgtgcgaagcgaagggtgtggatcaaaacaacccacaagacgatgtcggccaatgagcctgaagatggatggactaagcggatgtcaaaacgaaagttgatcgtcaagtggccttcatctaacaacactaacatagtgtttatttcaggcaagccccggtgcatttgccacctccttgttgttttaaaacttttatcacttatatgctgcattaggtgataggagttgagtgatgaaacagttgatgcattgccattccttggaatttgattatcctccttgatacctgttttacaaaaagaactaatgaggcttagccctgcctagagaattaaaacttgtttctttttaaaagaatgatgtgtgacactgggtatgggtttgttttatgaaaaaggacttgtaatggtgagcgcatcatctgcagtgatgaattcatcattcaagtatggtacctctgtcaggtacatggtttgggtgttaaataataagatgagactagacgttgagcaggaaaggtcgcccgtctgtgtcgcttaaggacagttctgattgttggcctgctgatctaggaccctttaactggccacatgcctcatcatgggtaagctttgcctcggtcggaccaataccagaacagctcgcacgcactgggagtggagagatggcgagagtagcttgtaccctccgtggcaagagactggaaggtggggtgctgtactctcagaaacatggcgggcaccatggcgagagtaacgtgtaccaaccaggccaatggctggatggtggagtgctgtgctctcgggtcgcgtgaacccgttctggtcttgagaaacccgtgggcgagttgacatatgcaagggttaagtgctacatatatcgtgtggttggagatcctcagctgagtattaatcgattcggatcgcc

SEQ ID NO: 49454 - DNA, 536 bp, Zea Mays
ccaaactcctacacgccatcttcttcctaggccgacggccttagcctccacgccggctgtccttgctctggtttctccccggctccagctcgccagccgcgccctccctgctcgcccagccatctcctcgcctccatggccgctgcaccagccgagtccctccccatgtcagctgcaagcacgccgtgcttccttcccatggccgtctgcagcttctcccatggtgagctccctccagtgccctaggtttccatggccgcccctccctcatcttcctccccaagctgagctcgcccagcccctctctgctccctggtttctccccacgccagcagccatggcacctccttcccctgctcgccctccctctgtgcccagcctcctctctgttcttccgtggagcagtagccctcctctaattctgcagcagcagcttcccctttttcttttgttctccatgaatgaaagcccaagcgccagccccctcccttttgtcaagtggtacgctagctgaaaatcgtgcgaagcgaagggtg

SEQ ID NO: 49455 - DNA, 1848 bp, Zea Mays
caaaactttggtagtttaaattcaaatcgagttgtgccatagtcttaagatttaaatctaggattagttggtgtgcaaaaataagaatcgtggagtaaattagatattgcttggtggaggaaaagagaatgaagatatttcttcgattttaacctcaaccaccacaccctttattgttctgagcatcagacacgtttgttccctggaaaccaccgtagctcatccactcagccatacgcagcatgcccaggatgcaaagcttatcagccacgtcccaaccaaactcctacacgccatcttcttcccaggccgacggccttagcctccacgccggctgtccttgctctggtttctccccggctccagctcgccagccgcgccctccctgctcgcccagccatctcctcgcctccatggccgctgcaccagccgagtccctccccatgtcagctgcaagcacgccgtgcttccttcccatggccgtctgcagcttcttccatggtgagctccctccactgccctaggtttccatggccgcccctccctcatcttcctccccaaactgagctcgcccagcccctctctgctccctggtttctccccacgccagcagccatggcacctccttcccctgctcgccctccctctgtgcccagcctcctctctgttcttccgtggagcagtagccctcctctaattctgcagcagcagcttcccctttttcttttgttctccatgaatgaaagcccaagcgccagccccctccctttcgtcaagtgagagttctagggaaaatcaatggagaagaaaccgtgtttcagttcgacgcgctctaggtgtttgatggaatggatgaaccgaagatccttgttgctcttgcgaaatctgagtctatttagtgttggtacgctagctgaaaatcgtgcgaagcgaagggtgtggatcaaaacaacccacaagacgatgtcggccaatgagcctgaagatggatggactaagcggatgtcaaaacgaaagttgatcgtcaagtggccttcatctaacaacactaacatagtgtttatttcaggcaagccccggtgcatttgccacctccttgttgttttaaaacttttatcacttatatgctgcattaggtgataggagttgagtgatgaaacagttgatgcattgccattccttggaatttgattatcctccttgatacctgttttacaaaaagaactaatgaggcttagccctgcctagagaattaaaacttgtttctttttaaaagaatgatgtgtgacactgggtatgggtttgttttatgaaaaaggacttgtaatggtgagcgcatcatctgcagtgatgaattcatcattcaagtatggtacctctgtcaggtacatggtttgggtgttaaataataagatgagactagacgttgagcaggaaaggtcgcccgtctgtgtcgcttaaggacagttctgattgttggcctgctgatctaggaccctttaactggccacatgcctcatcatgggtaagctttgcctcggtcggaccaataccagaacagctcgcacgcactgggagtggagagatggcgagagtagcttgtaccctccgtggcaagagactggaaggtggggtgctgtactctcagaaacatggcgggcaccatggcgagagtaacgtgtaccaaccaggccaatggctggatggtggagtgctgtgctctcgggtcgcgtgaacccgttctggtcttgagaaacccgtgggcgagttgacatatgcaagggttaagtgctacatatatcgtgtggttggagatcctcagctgagtattaatcgattcggatcgcc

SEQ ID NO: 49456 - DNA, 1644 bp, Zea Mays
aataagaatcgtggagtaaattagatattgcttggtggaggaaaagagaatgaagatatttcttcgattttaacctcaaccaccacaccctttattgttctgagcatcagacacgtttgttccctggaaaccaccgtagctcatccactcagccatacgcagcatgcccaggatgcaaagcttatcagccacgtcccaaccaaactcctacacgccatcttcttcccaggccgacggccttagcctccacgccggctgtccttgctctggtttctccccggctccagctcgccagccgcgccctccctgctcgcccagccatctcctcgcctccatggccgctgcaccagccgagtccctccccatgtcagctgcaagcacgccgtgcttccttcccatggccgtctgcagcttcttccatggtgagctccctccactgccctaggtttccatggccgcccctccctcatcttcctccccaaactgagctcgcccagcccctctctgctccctggtttctccccacgccagcagccatggcacctccttcccctgctcgccctccctctgtgcccagcctcctctctgttcttccgtggagcagtagccctcctctaattctgcagcagcagcttcccctttttcttttgttctccatgaatgaaagcccaagcgccagccccctccctttcgtcaagtggtacgctagctgaaaatcgtgcgaagcgaagggtgtggatcaaaacaacccacaagacgatgtcggccaatgagcctgaagatggatggactaagcggatgtcaaaacgaaagttgatcgtcaagtggccttcatctaacaacactaacatagtgtttatttcaggcaagccccggtgcatttgccacctccttgttgttttaaaacttttatcacttatatgctgcattaggtgataggagttgagtgatgaaacagttgatgcattgccattccttggaatttgattatcctccttgatacctgttttacaaaaagaactaatgaggcttagccctgcctagagaattaaaacttgtttctttttaaaagaatgatgtgtgacactgggtatgggtttgttttatgaaaaaggacttgtaatggtgagcgcatcatctgcagtgatgaattcatcattcaagtatggtacctctgtcaggtacatggtttgggtgttaaataataagatgagactagacgttgagcaggaaaggtcgcccgtctgtgtcgcttaaggacagttctgattgttggcctgctgatctaggaccctttaactggccacatgcctcatcatgggtaagctttgcctcggtcggaccaataccagaacagctcgcacgcactgggagtggagagatggcgagagtagcttgtaccctccgtggcaagagactggaaggtggggtgctgtactctcagaaacatggcgggcaccatggcgagagtaacgtgtaccaaccaggccaatggctggatggtggagtgctgtgctctcgggtcgcgtgaacccgttctggtcttgagaaacccgtgggcgagttgacatatgcaagggttaagtgctacatatatcgtgtggttggagatcctcagctgagtattaatcgattcggatcgcc

SEQ ID NO: 49457 - DNA, 1000 bp, Zea Mays
ctcgaagacataaaaatcacaagcggccgaaaccatacatgagctaatgaccatgagattgagtatggacaggagtaggagggcagctagcaatttgcaggctgtggagaggccacgtcagcgcgcgcctcgtgaggctgtctcggcttcctcagcagcaggcagcagctcccatcttctccgctcctgccgcggcaacgtgcggccatccaaaagatgcggccgccgccgaagcccgccagcggcggcggggcgacccagctggccagcaggccaactagcaataggcccggcggcggcgtcctgaggctgcggctgcggctgctgcaggcgccggcggtggtcgcgctggcggcggcgctggcggtgtcgtccgccgctactcctcctcccgcgccggcgccggcgccgctgtgcaacctcccgccgacgctgtcgggctcggacggcggcgggcggcagggcgaggcgaaccggatccggcaccccaagtcggagcgcgcggcgcgctgcacgtccaagtgcgtcagcacctgcgtcctcggcggctacggcgcgccgggcgtcgccggccccttcaacatccggaggcccctggtggtgttcaaggacaccttccgaagccggcagtactggacggcgaagatgaccagtgatcgagaaggggtacagtgagtggacacaacgcacaatgcaagaagacgtacacggcatcgccgccttgacgacatgccatgcgagctataggcggcatggaggaacgtgtttgctctagcgctacacacaattaggaagaaaccgagtggcggcaaaagagtcctgtgtgctttgcgtcatggaggaacatacgtactatacgtatttgctctctctcgccgtatgtgtatagtctgtcatgtagagaagctgaatctagtgagctgctttcgacattttagcgttgtacgtgacctctaaatttatataacacacacacaaagctcaatttccaaacgcagca

SEQ ID NO: 49458 - DNA, 2317 bp, Zea Mays
aaaatgtacctgctggctcacagagatggtattaggccgggacaagttcattctgataatcccaagctcctcgatcatagaaatatatggatataaggcgcgatttccatatggccgaaggggaaggtgaatggagctactccaagaactgtaggcgtcaagtgatattctatcccttttcttattagaatatgactatattttatgtaacatgcatgtctttcgtattcaacttatcctagctagcttactgcaaatgcatacccatcgagttggtttcattcttctcatggaaagatagatgggaaactatctttatgactagtttgggatcaaggacattggagtggattaaggtggttaaaatttctttcaattcaaaattacacaataagagggttttagcctatctccaagagattctttatttttactctttattttactctgtatttatctttttataaagtttacactttatatataacatctcactccaatagaccatctatttagtttgactagtcagaggctaaatttaactagtgagtgagccaatttaaagaatcggatagcttgacgagttaaatagtatgtctgttgaagagttattttgctattgggtagttaaaatttggcttcacgagccatttggctagtctcttgtacatgtttttttagataatggaaaccaggttctggctttgtcctccacaaaaggagtgtacagccttacatataaactgacatcaaaagaccagcactctcaacatagagtgcaatcttacaccacaaacagatatactaaaacctcaaaacgtctgttcataaaacttcaaccaaaataagaaaacagttgcatagatatgctttcgatccgtcgacacgtctccttgatttgcttttaatctcctctaatttacttgctcccagactaacccttactgatttgattccttgttcttgcatcgacgcatcctatcagcaaatagctgtccgcgagactaagccaatggtcgagactgctgtcaaacaggtgtacgcagctctcctccccagaaccatggtcgtggccgacctcggatgctctgcagggccgaacacgctgctcttcatctctagcgtcctgagcagcatcgctgctgcggctgctgctgaacggtgcaagccgccgagcggcggcggagacgatgacgaccatcacgtggagcttcagttcgtcctgaacgacctccccggcaacgacttcaaccacctgtttcggtcagtcgaggaggagttcagaagggcagcaggttgtgaaaggggtcctcctcctcctccctactatgtcatggggctaccggagtcctattacaacaggctgtttcctcgtcagagtgtgcatctgttccactcctcctactgcctccactggcgctcccaggaacctgagggactagaggcgtggagaaaaccttgtctaaacgaggacaacatctacatcgcaaggacgacggcaccttcggtggcgaaactgttccaggagcagttccagaaggacttctccctcttcctcaagctgcgccatgaagaactcgtgcatggagggcggatggtccttatatttctcggcaggaagaacgaggatgtgtacagtggcgacctcaaccagctcttcgcactggtcgcaacagcgttgcagtctcttgtttcgaagggcctcgtggagaaggaaaagctagagtctttcaacctgccgatctacgggccgtcggtgggagaagtgaaggatctggtcacgtagagcggtctgttcagcatggatctgatcaaacagttcgagacgaactgggaccctctcgacgactcggagggtggcgacgtcgtcgaggacagtgctcgcagtagcatgaatgtcgccaagttcatcagacccgcgctgaagtcttcaattgtctaccattttggagaagccataattgacgcatggtttgccgagttcaggcgccttgtcgctgagcaccttgagaaggagaagaccaagttcaccaccttcgccatgtgcttgaagaaagaataatatggttaagtatatatagatctatttggatgcgtgtgtgcgcatatggatcgtatatatgtgtattatattgctcacatggtatatgtgtattattattactcatagggtgtagctagctactcgcatgtgtattatatttctagctttagagtgtatatgggacaatagagtatatgcacgtatattcattatacgatcgatcatactaaaccagaatgcatactacgcataatatacaagtaatatataata

SEQ ID NO: 49459 - DNA, 1643 bp, Zea Mays
tggcattgagccgggacaagtaattcattttgatacatataatcccaagctcctctatcatagggatatatggatataagacgtgatttccatatggccgaaggggaaggagaatggagctactccaagaattgtaggcgccagctgtccgcgagaccaggccaatggtcgagactgccgtcaagcaggtgtacgcagctcctccccagaaccatggtcgtcgccgacctcggatgctctgcagggccgaacacgctgctcttcatctctagcgtcctgagcagcatcgctgctgcggctgctgctgaacggtgcaagccgccgagcggcggcggagacgatgacgaccatcacgtggagcttcagttcgtcctgaacgacctccccggcaacgacttcaaccacctgtttcggtcagtcgaggaggagttcagaagggcagcaggttgtgaaagggctcctcatcctccctactatgtcatggggctaccggagtcctattacaacaggctgtttcctcgtcagagtgtgcatctgttccactcctcctactgcctccaatggcgctcccaggaacctgagggactagaggcgtggagaaagccttgcctgaacgaggacaacatctacatcgcaaggaccacgacaccttctgtggcgaaactgttccaggagcagttccagaaggacttctccctcttcctcaagctgcgccatgaagaactcgtgcatggaggacggatggtccttatatttctcggcaggaagaacgaggatgtgtacagtggcgacctcaaccagctcttcgcactggtcgcaacagcgttgcagtctcttgttttgaagggccttgtggagaaggaaaagctagagtctttcaacctaccggtgtacgggccgtcggtgggagaagtggaggagctggtgacgcgtagcggcctgcagttcagcatggatctgatcaagcagttcgagatgaactgggacccgttcgacgactcagagggtgacaacgacgtcgcgtcgtcgtcgaggacagcgctcgcagtagcgtgaatgtcgctaagctcatcagatccgtgctgaaggctctggttgtccgccattttggagaagccgtgctcgacgcgtgcttcgccgagttcaggcgcctcgtcgctgagcaccttgggaaggagaagaccaagttcaccaccatcgccatgtgcttgaagaaagagtgatatatatacgtatatgtgtattgtatttcgtacggtagttaatagcctaatactcatatgtgttatcatgtgtatttcatgggacgacgtacaataattgagtatatgtgtgcatgcattatacggtacggtcgtactaaaaccagttggcatgcatagtagtatgtgtactgcagtatacgtatactggtatacaattattatacatggattacgtggttatgtttattttatatatactactgtgatggcctaggtacccaacgctattaggtagagaagattatctgtggcgcattgacaattaataaagggtacgtagtttcagctatgggtcactaggattatattagcactatttattaggaacatgatgacgaacattgttattatcaaactaaaatttgacaccaaaacaag

SEQ ID NO: 49460 - DNA, 2004 bp, Zea Mays
attcgattaagtcctagatctgcattttggaagagccttttggatcaggagatggcgacggacagtgccgacgcccagaggctcttgctcgggcgccagaactcgcatcagcaggctgacggagcagacgggttcgaggacaacgaccttgccgcaccgccggagcccttgtcccgcgacaatggagcgagtttccggaggaatccaagctctgcagattcgtcgtcgggcgtgttcgggagcctgaaggccgtgctgctcaaatccaagctcaatttgcttataccgtgtgggttcttggcggtcctggtggactgtctcagccagaacaaggcctgggtgtttcctctgagcctgctgggcatcattcctctggccgagcgcctgggtttcgctaccgagcagctagggctctacactggccgaacagctgggggcctgctgaacgccacgttcggcaacgccacggagctggtcatctccatccacgcgctgcggagcgggaagctgcgggtggtgcagcagtcgctgctcggctcgatcctgtccaacacgctgctggtcctcggctgcgcgttcttcggcggcgggctcacctgcggcaggaccgagcaggtgttcagaaaggaagacgcggtgctcaactccgggctgctcctgatggccgtgatggggctggtctcccccgccatgctgtactacacgcacaccgaggccaacctgggcgagtcggcgctggcgctgtcgaggttcagcagctgcgtcatgctcttcgcctacgccgcgttcgtcttcttcgagctgtccaacagtcgccgccgagacgaatctaccgagggaggaggaggaggtggtggtggtggtgaccaggcggacgacgactgcgagtacgcgttccctgagatcaccaagtgggaggccattgcctggctcgcgatcttcactgcctggatctcagtgttctctgactttctagtcggtgcaatcgagggggctgccaaggcttggaagataccggtcgcgttcatcagcactgtcttgctcccgatcgtagggaatgctgcagaacatgccagcgctgttatgtttgcgatgaaagacaaactggacctttcgcttggagtcgccatcgggtcttcgacgcagatatccatgtttgtgataccgttcagtgtagtggcaggatggatgatgggccagccaatggacttgaacttccatctgtttgaaaccgccagcctcttgataaccgtgctggttgtagcacttctgctgcaggatgggacctcgaactgtttcaaagggctgatgctgattctctgctacctgatagtggctgccagtttttatgtgtatgctgatccaaatatcgatggtgtttagcctcttcgaaactagcaccttcaatgatgggatgggactatacttctagttctccaaagaaacctcttcgaagagggcaagaggagctcctgcgattcactgaagaagaaaacagaagtggctggcctattcagcattcctcacctgaaggggccattcaagcacacccactgctgtagaggacttcatgtcttcatcgagcatgcaaaagaaccaacaagcaagttcatcagggcgaatttccaacacaaagcgatggccagcacttaattaaagataggcatgaattgcaactttaagcttctgaaaatgtaccttcttttgtctccggaagatacttggcaaaacgatacttctgcattccaggacaaaatggacgacagtccatcagaattcagaaacgatggctgttttatactatacaggaggaaagtgaagaaactccacccaaaatacctgcaaatggctcttcacatgatagatggtcaagccttctaccttcataagcctcaacacgcccttaggagttgcctctgcaagatttggttttgtaccacccatacattaacagtttgcttggacaccaaaactgtgtggatctatttaaatcggagtacaaag

SEQ ID NO: 49461 - DNA, 1914 bp, Zea Mays
attcgattaagtcctagatctgcattttggaagagccttttggatcaggagatggcgacggacagtgccgacgcccagaggctcttgctcgggcgccagaactcgcatcagcaggctgacggagcagacgggttcgaggacaacgaccttgccgcaccgccggagcccttgtcccgcgacaatggagcgagtttccggaggaatccaagctctgcagattcgtcgtcgggcgtgttcgggagcctgaaggccgtgctgctcaaatccaagctcaatttgcttataccgtgtgggttcttggcggtcctggtggactgtctcagccagaacaaggcctgggtgtttcctctgagcctgctgggcatcattcctctggccgagcgcctgggtttcgctaccgagcagctagggctctacactggccgaacagctgggggcctgctgaacgccacgttcggcaacgccacggagctggtcatctccatccacgcgctgcggagcgggaagctgcgggtggtgcagcagtcgctgctcggctcgatcctgtccaacacgctgctggtcctcggctgcgcgttcttcggcggcgggctcacctgcggcaggaccgagcaggtgttcagaaaggaagacgcggtgctcaactccgggctgctcctgatggccgtgatggggctggtctcccccgccatgctgtactacacgcacaccgaggccaacctgggcgagtcggcgctggcgctgtcgaggttcagcagctgcgtcatgctcttcgcctacgccgcgttcgtcttcttcgagctgtccaacagtcgccgccgagacgaatctaccgagggaggaggaggaggtggtggtggtggtgaccaggcggacgacgactgcgagtacgcgttccctgagatcaccaagtgggaggccattgcctggctcgcgatcttcactgcctggatctcagtgttctctgactttctagtcggtgcaatcgagggggctgccaaggcttggaagataccggtcgcgttcatcagcactgtcttgctcccgatcgtagggaatgctgcagaacatgccagcgctgttatgtttgcgatgaaagacaaactggacctttcgcttggagtcgccatcgggtcttcgacgcagatatccatgtttgtgataccgttcagtgtagtggcaggatggatgatgggccagccaatggacttgaacttccatctgtttgaaaccgccagcctcttgataaccgtgctggttgtagcacttctgctgcaggatgggacctcgaactgtttcaaagggctgatgctgattctctgctacctgatagtggctgccagtttttatgtgtatgctgatccaaatatcgatggtgtttagcctcttcgaaactagcaccttcaatgatgggatgggactatacttctagttctccaaagaaacctcttcgaagagggcaagaggagctcctgcgattcactgaagaagaaaacagaagtggctggcctattcagcattcctcacctgaaggggccattcaagcacacccactgctaggacttcatgtcttcatcgagcatgcaaaagaaccaacaagcaagttcatcagggcgaatttccaacacaaagcgatggccagcacttaattaaagataggacaaaatggacgacagtccatcagaattcagaaacgatggctgttttatactatacaggaggaaagtgaagaaactccacccaaaatacctgcaaatggctcttcacatgatagatggtcaagccttctaccttcataagcctcaacacgcccttaggagttgcctctgcaagatttggttttgtaccacccatacattaacagtttgcttggacaccaaaactgtgtggatctatttaaatcggagtacaaag

SEQ ID NO: 49462 - DNA, 2384 bp, Zea Mays
caacagttcacttgcggccagaggcacgtgccttctgccttggttgttgtgggcttgtggctagccgtgcagaatacagagcgaaagagagagatggctaatattgggaatcttgttatctgttctccttttcaagctgctctccctaggcttttgggtttgtgaggcgttggctcccttccccactgcttcctcccccactgccggtcgctgtgcaagagctgccacgagacagcagattccccatcatccaaagcgaggctgagggggaggagaggaagcaggaatagcctaacaggggtatagatctcaggaagctccatgcgggtgagcttgtgcccaagcctgtgtcccggtgcgcgaggctgagcttcttgcccgttgcccgtggcgcccccgagctcaccgatgcgccgccgccgccacggcttgagctccatggctgtccagcgcgctggtgcggattgacaggcaggttgtcctgcccgttcttttttctgcgaggtagctgcttgggcagacaagtaggagcagcggctcaaacttcggatctcggcatgggctcctttgggatggactggaaccagaaggcctccgtgttgtgggactgggagaacttgccgcccgtagccgtaggcgcgagcgggagcgagaaccccaggatggctgctgcgcctcaggctttgcattctgcctgtggcaccatctcttccagctcagagatggggtatggctcatccaagagctccgtatccgcgtcggctgatgattcttcacccaaggccaaggggaaaagcatggagctcaacttcgcacctgacaaagtgcctgacaagaacactgattcagggaaggttgacgacgccaggacctctccgtcgtcgccggtgattgccatcagcagtgcagagcccgtgcttagcctgaagcttggcaagagaacgtatttcgaagatgtctgtggagggcagagcgtcaagagtttgccgtcggatacgagtgcagtgactcctcctcctgcttctccgaagaagacgaaggtgactccaaacaagaaatcttactgtcaggttgaaggctgcaaggttgatctctcttctgctaaagagtaccatcggaagcacagagtctgtgaacctcattctaaggctcccaaggtggttgttgctggtctggagcggcgcttttgtcaacagtgtagccggttccatggattagctgagtttgaccagaagaagaaaagctgccgcaggcgcctcaatgatcacaatgcccgcagacggaaaccacaacctgaagcactttcttttgggtcatcaaggctgtcggcaatgttctatgacacaagacaacacacaagccttctgtttggtcaaggtccttatggtcaaatgagaagttgtgcaagttcttcatgggataaccctggaggtggcttcaaatttgcagagacaaaaggtccctggttaagagctggtggtgttgatgggttgcatcaaccaagtcagcaggtgtggaacaactttatgccacatggtgtccatcaagattttgatgggttcacagctttcaaaggaaccaatgcaaaggtccttcatcaaggcgttgaagcttctgcggtcgcctccaaccagaacggcgccccacaaccggaccttcatcgtgctctctctcttctgtcaaacagctgggctggtggtggtaccggtaccggtaccgaccagcacccgacggcccagctgcgccacgctgccctgagcagcagcctcgccgccagctccgtctccgtggcgcaggcctcgccagcagggctgtggcaggacggcggcgcggccctgggccaccacgactacgcccacgcgttccaggctatcaacacgccgggcggcggcggcgccgccgctcccattgcagtgggtcaggagctgcttcagctcccgcgtccgccgtccctgtacgacgacggctcctcgtcccgctacgacctgatgcgctgaaccttggggcttctggtggagcgcggggtttcgatttttgaacgaactctggatggaactcggagttttgaacgaactgctgtatgcttgctatcaaggtctgctggctcgggctcggacgctcgtgggatcgccagcagctccgtgtgcttgaataaatccacagtttttttttgtgtgacgctagctatttatttatttcacttgtgtaatgtgatgcgagtatgcgactccctcatttgcttcggaagagcggtgacatgctttaccgccgcaggcatgcatgtactccaatcaccgattggatttgcctctaccaaatgcaacatcccatgtcgagagatttttgccattatcaaacatggggcgttaggcttcgttcaaaac

SEQ ID NO: 49463 - DNA, 2233 bp, Zea Mays
gggcttgtggctagccgtgcagaatacagagcgaaagagagagatggctaatattgggaatcttgttatctgttctccttttcaagctgctctccctaggcttttgggtttgtgaggcgttggctcccttccccactgcttcctcccccactgccggtcgctgtgcaagagctgccacgagacagcagattccccatcatccaaagcgaggctgagggggaggagaggaagcaggaatagcctaacaggggtatagatctcaggaagctccatgcgggtgagcttgtgcccaagcctgtgtcccggtgcgcgaggctgagcttcttgcccgttgcccgtggcgcccccgagctcaccgatgcgccgccgccgccacggcttgagctccatggctgtccagcgcgctggtgcggattgacaggcaggttgtcctgcccgttcttttttctggtgagtgcgaggtagctgcttgggcagacaagtaggagcagcggctcaaacttcggatctcggcatgggctcctttgggatggactggaaccagaaggcctccgtgttgtgggactgggagaacttgccgcccgtagccgtaggcgcgagcgggagcgagaaccccaggatggctgctgcgcctcaggctttgcattctgcctgtggcaccatctcttccagctcagagatggggtatggctcatccaagagctccgtatccgcgtcggctgatgattcttcacccaaggccaaggggaaaagcatggagctcaacttcgcacctgacaaagtgcctgacaagaacactgattcagggaaggttgacgacgccaggacctctccgtcgtcgccggtgattgccatcagcagtgcagagcccgtgcttagcctgaagcttggcaagagaacgtatttcgaagatgtctgtggagggcagagcgtcaagagtttgccgtcggatacgagtgcagtgactcctcctcctgcttctccgaagaagacgaaggtgactccaaacaagaaatcttactgtcaggttgaaggctgcaaggttgatctctcttctgctaaagagtaccatcggaagcacagagtctgtgaacctcattctaaggctcccaaggtggttgttgctggtctggagcggcgcttttgtcaacagtgtagccggttccatggattagctgagtttgaccagaagaagaaaagctgccgcaggcgcctcaatgatcacaatgcccgcagacggaaaccacaacctgaagcactttcttttgggtcatcaaggctgtcggcaatgttctatgagacaaaaggtccctggttaagagctggtggtgttgatgggttgcatcaaccaagtcagcaggtgtggaacaactttatgccacatggtgtccatcaagattttgatgggttcacagctttcaaaggaaccaatgcaaaggtccttcatcaaggcgttgaagcttctgcggtcgcctccaaccagaacggcgccccacaaccggaccttcatcgtgctctctctcttctgtcaaacagctgggctggtggtggtaccggtaccggtaccgaccagcacccgacggcccagctgcgccacgctgccctgagcagcagcctcgccgccagctccgtctccgtggcgcaggcctcgccagcagggctgtggcaggacggcggcgcggccctgggccaccacgactacgcccacgcgttccaggctatcaacacgccgggcggcggcggcgccgccgctcccattgcagtgggtcaggagctgcttcagctcccgcgtccgccgtccctgtacgacgacggctcctcgtcccgctacgacctgatgcgctgaaccttggggcttctggtggagcgcggggtttcgatttttgaacgaactctggatggaactcggagttttgaacgaactgctgtatgcttgctatcaaggtctgctggctcgggctcggacgctcgtgggatcgccagcagctccgtgtgcttgaataaatccacagtttttttttgtgtgacgctagctatttatttatttcacttgtgtaatgtgatgcgagtatgcgactccctcatttgcttcggaagagcggtgacatgctttaccgccgcaggcatgcatgtactccaatcaccgattggatttgcctctaccaaatgcaacatcccatgtcgagagatttttgccattatcaaacatggggcgttaggcttcgttcaaaac

SEQ ID NO: 49464 - DNA, 2603 bp, Zea Mays
gggcttgtggctagccgtgcagaatacagagcgaaagagagagatggctaatattgggaatcttgttatctgttctccttttcaagctgctctccctaggcttttgggtttgtgaggcgttggctcccttccccactgcttcctcccccactgccggtcgctgtgcaagagctgccacgagacagcagattccccatcatccaaagcgaggctgagggggaggagaggaagcaggaatagcctaacaggggtatagatctcaggaagctccatgcgggtgagcttgtgcccaagcctgtgtcccggtgcgcgaggctgagcttcttgcccgttgcccgtggcgcccccgagctcaccgatgcgccgccgccgccacggcttgagctccatggctgtccagcgcgctggtgcggattgacaggcaggttgtcctgcccgttcttttttctgactagagtatgatggtggagccgctgttctgttcttgccatgattgacgatttctctgttaaaagttcaactgctctccggaacattccatccgcttccgttctgatatcagtatcaccttgcgcacttctctgtgaatttgatgacgatgatgatgcatacttgagtgcccagacatgctcctgcaaatccgtccagttcctgcagcttccacgacccgaactctttcagttcttaacctttttctctctaccattttgttgcttcagcgaggtagctgcttgggcagacaagtaggagcagcggctcaaacttcggatctcggcatgggctcctttgggatggactggaaccagaaggcctccgtgttgtgggactgggagaacttgccgcccgtagccgtaggcgcgagcgggagcgagaaccccaggatggctgctgcgcctcaggctttgcattctgcctgtggcaccatctcttccagctcagagatggggtatggctcatccaagagctccgtatccgcgtcggctgatgattcttcacccaaggccaaggggaaaagcatggagctcaacttcgcacctgacaaagtgcctgacaagaacactgattcagggaaggttgacgacgccaggacctctccgtcgtcgccggtgattgccatcagcagtgcagagcccgtgcttagcctgaagcttggcaagagaacgtatttcgaagatgtctgtggagggcagagcgtcaagagtttgccgtcggatacgagtgcagtgactcctcctcctgcttctccgaagaagacgaaggtgactccaaacaagaaatcttactgtcaggttgaaggctgcaaggttgatctctcttctgctaaagagtaccatcggaagcacagagtctgtgaacctcattctaaggctcccaaggtggttgttgctggtctggagcggcgcttttgtcaacagtgtagccggttccatggattagctgagtttgaccagaagaagaaaagctgccgcaggcgcctcaatgatcacaatgcccgcagacggaaaccacaacctgaagcactttcttttgggtcatcaaggctgtcggcaatgttctatgacacaagacaacacacaagccttctgtttggtcaaggtccttatggtcaaatgagaagttgtgcaagttcttcatgggataaccctggaggtggcttcaaatttgcagagacaaaaggtccctggttaagagctggtggtgttgatgggttgcatcaaccaagtcagcaggtgtggaacaactttatgccacatggtgtccatcaagattttgatgggttcacagctttcaaaggaaccaatgcaaaggtccttcatcaaggcgttgaagcttctgcggtcgcctccaaccagaacggcgccccacaaccggaccttcatcgtgctctctctcttctgtcaaacagctgggctggtggtggtaccggtaccggtaccgaccagcacccgacggcccagctgcgccacgctgccctgagcagcagcctcgccgccagctccgtctccgtggcgcaggcctcgccagcagggctgtggcaggacggcggcgcggccctgggccaccacgactacgcccacgcgttccaggctatcaacacgccgggcggcggcggcgccgccgctcccattgcagtgggtcaggagctgcttcagctcccgcgtccgccgtccctgtacgacgacggctcctcgtcccgctacgacctgatgcgctgaaccttggggcttctggtggagcgcggggtttcgatttttgaacgaactctggatggaactcggagttttgaacgaactgctgtatgcttgctatcaaggtctgctggctcgggctcggacgctcgtgggatcgccagcagctccgtgtgcttgaataaatccacagtttttttttgtgtgacgctagctatttatttatttcacttgtgtaatgtgatgcgagtatgcgactccctcatttgcttcggaagagcggtgacatgctttaccgccgcaggcatgcatgtactccaatcaccgattggatttgcctctaccaaatgcaacatcccatgtcgagagatttttgccattatcaaacatggggcgttaggcttcgttcaaaac

SEQ ID NO: 49465 - DNA, 1069 bp, Zea Mays
gttggttgccttgtcattttgtgaagacacaagacaacacacaagccttctgtttggtcaaggtccttatggtcaaatgagaagttgtgcaagttcttcatgggataaccctggaggtggcttcaaatttgcagagacaaaaggtccctggttaagagctggtggtgttgatgggttgcatcaaccaagtcagcaggtgtggaacaactttatgccacatggtgtccatcaagattttgatgggttcacagctttcaaaggaaccaatgcaaaggtccttcatcaaggcgttgaagcttctgcggtcgcctccaaccagaacggcgccccacaaccggaccttcatcgtgctctctctcttctgtcaaacagctgggctggtggtggtaccggtaccggtaccgaccagcacccgacggcccagctgcgccacgctgccctgagcagcagcctcgccgccagctccgtctccgtggcgcaggcctcgccagcagggctgtggcaggacggcggcgcggccctgggccaccacgactacgcccacgcgttccaggctatcaacacgccgggcggcggcggcgccgccgctcccattgcagtgggtcaggagctgcttcagctcccgcgtccgccgtccctgtacgacgacggctcctcgtcccgctacgacctgatgcgctgaaccttggggcttctggtggagcgcggggtttcgatttttgaacgaactctggatggaactcggagttttgaacgaactgctgtatgcttgctatcaaggtctgctggctcgggctcggacgctcgtgggatcgccagcagctccgtgtgcttgaataaatccacagtttttttttgtgtgacgctagctatttatttatttcacttgtgtaatgtgatgcgagtatgcgactccctcatttgcttcggaagagcggtgacatgctttaccgccgcaggcatgcatgtactccaatcaccgattggatttgcctctaccaaatgcaacatcccatgtcgagagatttttgccattatcaaacatggggcgttaggcttcgttcaaaac

SEQ ID NO: 49466 - DNA, 770 bp, Zea Mays
gtccgctcagccgccgctgcacactgttcatcttcctcaaaccgccactccctcacgtcttgcgcgcagccgccgcaccacatcctcgcctcgcggcatctcgcctcaccttgctgcatctcgcgctcgcctcgccctctctgcgctcgtcgtcctgcagagaagccccacgtgcatgtcctctggccgagctcccagcaccctccgcaaaagccccatggaggcgtgcgattagagccctcgcccatcccctacgtgttgctgtgcccggacgccgccgcagccgcgtagccatggccgtcgtcatgccctgcgcacacgtcacttccgccatacgcccactgctccgacgatcttgttggcatgtgtggtcgctacatctcgcgttgccaagactgcgatccaactccgaacttcgaggaatcgacgatcaagcttcggcgaccaaatgacccagctcttcgagttccacgaagttaaagaccctgagcatctgtttggtgaagattaccttttgggctactatggttagattcatgctattgctttactttaatcaatgaacatgatgtgaacacttatgatacgatgttgtcattatgattatggtgttggactggtgatactttagggggctcgagcggtttctcgattgcctctccgtaaggacctgttcgttggatgaccacccgggaaaacagtgcaaccttgagggtggaatgggatgcccttagctgactaattagaggaactggggtatagtttgcttc

SEQ ID NO: 49467 - DNA, 2778 bp, Zea Mays
gccgtcgttgacaccagctagtagcagccagcactagtcgctactagctagatagccatatcaccagcatgtggaggctgacggtggccgagggcggcggcccgtggctgcgctcgacgaacggcttcgtggggcgggcggtgtgggagttcgaccctgacctcggtacgccggaggagcgcgacgaggtagagagggtacgccaggagttctccgaccaccgcttccagaggagagagtcggccgacctcctcatgcgcatgcagtgcgcaaagcagaacagatctcaacgtcgtgatctgccacgcatcaagcttggggaggatgagcacgtcactgaagaaattgtactgagctccttgaggtcggctctggaccagttctcttcactgcaagccagcgatgggcactggcctggtgatttcagcgggattatgttcatcatgcctggtttgatatttgccttgtatgtcactggatcactgaatgttgtcatatcaccagaacatcggcatgagatttgccgctacatctacaaccaccagaacgaagatggtggatggggcacacttatcctgggttcgagcaccatgtttggcacatgctcaaactacatcaccttgaggcttctcggtgaggagccatacgccaacaacagtgtgttggctaaagggcgtgcttggattctatcccatggtggtgcaaccttgattcctcagtggggaaaaatatggctttcggtacttggattgtttgattggtcaggaaataatccaattttccctgaactatggtccattccccagtttcttccatttcatccaggaggacctcatctgtccacgcacactgttgcagaatgttatttggacttcactttataggtgtgtggaaccagtattgagcagttggcctatcaacaagctgagagagagagctctgggaaacatcatggagcatatccattatgaagatgagaacacacaatacctatgcatatgtcctgtgaataaggctctaaacatggtctgctgctgggtagaagatccaaattcagatgcattcaagcgtcaccttgcaaggataccagacttcttgtggatttcagaagatggcatgaaggcacaggtatatgatggctgccagagctgggagacatcattcataattcaagcattttgcgctacagatcttgttaatgactatggttcaactcttcagagagcctatgagtttatgaaaaattcacaggtcatgaggaaccatcctggtgaccaacgttattggcatcgccatagatcgaagggttcatggacactttcatctgcagacaatggatgggctgtatctgacactacaggagaagcacttaaggctgtactgttgctgtcaaagatctcaaacaaaaacaaccttgttggggatccaatagaaagagaaaggttgcatgacgctattgattgccttctatcttttgcgaacaaagatggcaccttttctacatatgagtgcaaaagaacttattcttggttagagattctaagtccttgtgagactttcccaaacattgttgtcgattacccttacccagaatgcacttcatcagtgctccaagctctgatattgttcaaagacttatatcctggttaccgcacagaagagatagaagcattagttagaagtgcagcaacgtttattgagaccaaacaacaagaagacggttcatggttaggtaattggggtatatgtttcacctacggggccttcttttcgattaaaggtttagtcgcttctggaagaacgtacaagaacagcccttgcatacggaaagcatgccacttcatattgtcgaagcagctcagtactggtggatggggagaaagtcatatcgctattgaaactcaggtgtatgtaaatctcaaaggtgaccgtgctcacgctgtgaataccgcctgggcaatgctcgctttaatttatgctggacagtttgaacgagatccaacgccattacatcgtgctgcaaaggaattgatcaacatgcaactggagacaggagagtttcctcagcaagagcatgtaggatgcttcaactgcagcctctacttcaattacccaagctaccgcaacttgttccccatctgggctctcggtgagtaccatcgtggccttcgtgcaaagaaagacaattgagtccgtgtgtgtatatatatagtacgtatagcattgtgaggaataaaacaggttgcgtcggtggtgagtgcgcaaaaacaagatgtgcttttatgtaggtgtaccacagtgtacaatgttggtcgttgttagactgtaaggctatcatgacgtgtatattgtaatatatatactacgtgattggtgtcctgtatggtcacggccatactcgctgcgtgcgtagagcgcatgattggcttcctgcgcgcgtagaagctaggctgccacgcgccggtgcgatgtaggatattttttcattcatttgctgcatccatggagaagccagggagggacgtttcccacgggccaggatggcgcgcgcctggcgacggtgagcgcgcgaaccaatcacacgttatagtgttccatatgtttcaaattatataagacgttttatcttctctaatgaacgagcagtctcctttcccaaaatatgttggtgagcataccaaattcagagcacgtggtacgctaaatcgcgatcatacgccagttcatcatcttcgtgtggagtgcagctgggaccatcacacaggtcgaacgttccat

SEQ ID NO: 49468 - DNA, 2747 bp, Zea Mays
gtcgttgacaccagctagtagcagccagcactagtcgctactagctagatagccatatcaccagcatgtggaggctgacggtggccgagggcggcggcccgtggctgcgctcgacgaacggcttcgtggggcgggcggtgtgggagttcgaccctgacctcggtacgccggaggagcgcgacgaggtagagagggtacgccaggagttctccgaccaccgcttccagaggagagagtcggccgacctcctcatgcgcatgcagtgcgcaaagcagaacagatctcaacgtcgtgatctgccacgcatcaagcttggggaggatgagcacgtcactgaagaaattgtactgagctccttgaggtcggctctggaccagttctcttcactgcaagccagcgatgggcactggcctggtgatttcagcgggattatgttcatcatgcctggtttgatatttgccttgtatgtcactggatcactgaatgttgtcatatcaccagaacatcggcatgagatttgccgctacatctacaaccaccaggtacttggattgtttgattggtcaggaaataatccaattttccctgaactatggtccattccccagtttcttccatttcatccagggaaattctggtgctttgcccgtatggtatatctaccaatggcttatctttatggcaagaaatttgttggaccaattacaccaactatattggcactaagagaggaaatctatgacactccttatggaaagattgactggagtgatgctcgtagtaaatgcgcaaaggaggacctcatctgtccacgcacactgttgcagaatgttatttggacttcactttataggtgtgtggaaccagtattgagcagttggcctatcaacaagctgagagagagagctctgggaaacatcatggagcatatccattatgaagatgagaacacacaatacctatgcatatgtcctgtgaataaggctctaaacatggtctgctgctgggtagaagatccaaattcagatgcattcaagcgtcaccttgcaaggataccagacttcttgtggatttcagaagatggcatgaaggcacaggtatatgatggctgccagagctgggagacatcattcataattcaagcattttgcgctacagatcttgttaatgactatggttcaactcttcagagagcctatgagtttatgaaaaattcacaggtcatgaggaaccatcctggtgaccaacgttattggcatcgccatagatcgaagggttcatggacactttcatctgcagacaatggatgggctgtatctgacactacaggagaagcacttaaggctgtactgttgctgtcaaagatctcaaacaaaaacaaccttgttggggatccaatagaaagagaaaggttgcatgacgctattgattgccttctatcttttgcgaacaaagatggcaccttttctacatatgagtgcaaaagaacttattcttggttagagattctaagtccttgtgagactttcccaaacattgttgtcgattacccttacccagaatgcacttcatcagtgctccaagctctgatattgttcaaagacttatatcctggttaccgcacagaagagatagaagcattagttagaagtgcagcaacgtttattgagaccaaacaacaagaagacggttcatggttaggtaattggggtatatgtttcacctacggggccttcttttcgattaaaggtttagtcgcttctggaagaacgtacaagaacagcccttgcatacggaaagcatgccacttcatattgtcgaagcagctcagtactggtggatggggagaaagtcatatcgctattgaaactcaggtgtatgtaaatctcaaaggtgaccgtgctcacgctgtgaataccgcctgggcaatgctcgctttaatttatgctggacagtttgaacgagatccaacgccattacatcgtgctgcaaaggaattgatcaacatgcaactggagacaggagagtttcctcagcaagagcatgtaggatgcttcaactgcagcctctacttcaattacccaagctaccgcaacttgttccccatctgggctctcggtgagtaccatcgtggccttcgtgcaaagaaagacaattgagtccgtgtgtgtatatatatagtacgtatagcattgtgaggaataaaacaggttgcgtcggtggtgagtgcgcaaaaacaagatgtgcttttatgtaggtgtaccacagtgtacaatgttggtcgttgttagactgtaaggctatcatgacgtgtatattgtaatatatatactacgtgattggtgtcctgtatggtcacggccatactcgctgcgtgcgtagagcgcatgattggcttcctgcgcgcgtagaagctaggctgccacgcgccggtgcgatgtaggatattttttcattcatttgctgcatccatggagaagccagggagggacgtttcccacgggccaggatggcgcgcgcctggcgacggtgagcgcgcgaaccaatcacacgttatagtgttccatatgtttcaaattatataagacgttttatcttctctaatgaacgagcagtctcctttcccaaaatatgttggtgagcataccaaattcagagcacgtggtacgctaaatcgcgatcatacgccagttcatcatcttcgtgtggagtgcagctgggaccatcacacaggtcgaacgttccat

SEQ ID NO: 49469 - DNA, 2922 bp, Zea Mays
cgttgacaccagctagtagcagccagcactagtcgctactagctagatagccatatcaccagcatgtggaggctgacggtggccgagggcggcggcccgtggctgcgctcgacgaacggcttcgtggggcgggcggtgtgggagttcgaccctgacctcggtacgccggaggagcgcgacgaggtagagagggtacgccaggagttctccgaccaccgcttccagaggagagagtcggccgacctcctcatgcgcatgcagtgcgcaaagcagaacagatctcaacgtcgtgatctgccacgcatcaagcttggggaggatgagcacgtcactgaagaaattgtactgagctccttgaggtcggctctggaccagttctcttcactgcaagccagcgatgggcactggcctggtgatttcagcgggattatgttcatcatgcctggtttgatatttgccttgtatgtcactggatcactgaatgttgtcatatcaccagaacatcggcatgagatttgccgctacatctacaaccaccagaacgaagatggtggatggggcacacttatcctgggttcgagcaccatgtttggcacatgctcaaactacatcaccttgaggcttctcggtgaggagccatacgccaacaacagtgtgttggctaaagggcgtgcttggattctatcccatggtggtgcaaccttgattcctcagtggggaaaaatatggctttcggtacttggattgtttgattggtcaggaaataatccaattttccctgaactatggtccattccccagtttcttccatttcatccagggaaattctggtgctttgcccgtatggtatatctaccaatggcttatctttatggcaagaaatttgttggaccaattacaccaactatattggcactaagagaggaaatctatgacactccttatggaaagattgactggagtgatgctcgtagtaaatgcgcaaaggaggacctcatctgtccacgcacactgttgcagaatgttatttggacttcactttataggtgtgtggaaccagtattgagcagttggcctatcaacaagctgagagagagagctctgggaaacatcatggagcatatccattatgaagatgagaacacacaatacctatgcatatgtcctgtgaataaggctctaaacatggtctgctgctgggtagaagatccaaattcagatgcattcaagcgtcaccttgcaaggataccagacttcttgtggatttcagaagatggcatgaaggcacagagctgggagacatcattcataattcaagcattttgcgctacagatcttgttaatgactatggttcaactcttcagagagcctatgagtttatgaaaaattcacaggtcatgaggaaccatcctggtgaccaacgttattggcatcgccatagatcgaagggttcatggacactttcatctgcagacaatggatgggctgtatctgacactacaggagaagcacttaaggctgtactgttgctgtcaaagatctcaaacaaaaacaaccttgttggggatccaatagaaagagaaaggttgcatgacgctattgattgccttctatcttttgcgaacaaagatggcaccttttctacatatgagtgcaaaagaacttattcttggttagagattctaagtccttgtgagactttcccaaacattgttgtcgattacccttacccagaatgcacttcatcagtgctccaagctctgatattgttcaaagacttatatcctggttaccgcacagaagagatagaagcattagttagaagtgcagcaacgtttattgagaccaaacaacaagaagacggttcatggttaggtaattggggtatatgtttcacctacggggccttcttttcgattaaaggtttagtcgcttctggaagaacgtacaagaacagcccttgcatacggaaagcatgccacttcatattgtcgaagcagctcagtactggtggatggggagaaagtcatatcgctattgaaactcaggtgtatgtaaatctcaaaggtgaccgtgctcacgctgtgaataccgcctgggcaatgctcgctttaatttatgctggacagtttgaacgagatccaacgccattacatcgtgctgcaaaggaattgatcaacatgcaactggagacaggagagtttcctcagcaagagcatgtaggatgcttcaactgcagcctctacttcaattacccaagctaccgcaacttgttccccatctgggctctcggtgagtaccatcgtggccttcgtgcaaagaaagacaattgagtccgtgtgtgtatatatatagtacgtatagcattgtgaggaataaaacaggttgcgtcggtggtgagtgcgcaaaaacaagatgtgcttttatgtaggtgtaccacagtgtacaatgttggtcgttgttagactgtaaggctatcatgacgtgtatattgtaatatatatactacgtgattggtgtcctgtatggtcacggccatactcgctgcgtgcgtagagcgcatgattggcttcctgcgcgcgtagaagctaggctgccacgcgccggtgcgatgtaggatattttttcattcatttgctgcatccatggagaagccagggagggacgtttcccacgggccaggatggcgcgcgcctggcgacggtgagcgcgcgaaccaatcacacgttatagtgttccatatgtttcaaattatataagacgttttatcttctctaatgaacgagcagtctcctttcccaaaatatgttggtgagcataccaaattcagagcacgtggtacgctaaatcgcgatcatacgccagttcatcatcttcgtgtggagtgcagctgggaccatcacacaggtcgaacgttccat

SEQ ID NO: 49470 - DNA, 3019 bp, Zea Mays
gcactagtcgctactagctagatagccatatcaccagcatgtggaggctgacggtggccgagggcggcggcccgtggctgcgctcgacgaacggcttcgtggggcgggcggtgtgggagttcgaccctgacctcggtacgccggaggagcgcgacgaggtagagagggtacgccaggagttctccgaccaccgcttccagaggagagagtcggccgacctcctcatgcgcatgcagtgcgcaaagcagaacagatctcaacgtcgtgatctgccacgcatcaagcttggggaggatgagcacgtcactgaagaaattgtactgagctccttgaggtcggctctggaccagttctcttcactgcaagccagcgatgggcactggcctggtgatttcagcgggattatgttcatcatgcctggtttgatatttgccttgtatgtcactggatcactgaatgttgtcatatcaccagaacatcggcatgagatttgccgctacatctacaaccaccagaacgaagatggtggatggggcacacttatcctgggttcgagcaccatgtttggcacatgctcaaactacatcaccttgaggcttctcggtgaggagccatacgccaacaacagtgtgttggctaaagggcgtgcttggattctatcccatggtggtgcaaccttgattcctcagtggggaaaaatatggctttcggtacttggattgtttgattggtcaggaaataatccaattttccctgaactatggtccattccccagtttcttccatttcatccagggaaattctggtgctttgcccgtatggtatatctaccaatggcttatctttatggcaagaaatttgttggaccaattacaccaactatattggcactaagagaggaaatctatgacactccttatggaaagattgactggagtgatgctcgtagtaaatgcgcaaaggaggacctcatctgtccacgcacactgttgcagaatgttatttggacttcactttataggtgtgtggaaccagtattgagcagttggcctatcaacaagctgagagagagagctctgggaaacatcatggagcatatccattatgaagatgagaacacacaatacctatgcatatgtcctgtgaataaggctctaaacatggtctgctgctgggtagaagatccaaattcagatgcattcaagcgtcaccttgcaaggataccagacttcttgtggatttcagaagatggcatgaaggcacaggtatatgatggctgccagagctgggagacatcattcataattcaagcattttgcgctacagatcttgttaatgactatggttcaactcttcagagagcctatgagtttatgaaaaattcacaggtcatgaggaaccatcctggtgaccaacgttattggcatcgccatagatcgaagggttcatggacactttcatctgcagacaatggatgggctgtatctgacactacaggagaagcacttaaggtcagctaccctttactatttttgtcaaacacgcagaggagctgcgtatcattatattaagaaagctactgatcatcattatattgagaagaaatgaaactaaggctgtactgttgctgtcaaagatctcaaacaaaaacaaccttgttggggatccaatagaaagagaaaggttgcatgacgctattgattgccttctatcttttgcgaacaaagatggcaccttttctacatatgagtgcaaaagaacttattcttggttagagattctaagtccttgtgagactttcccaaacattgttgtcgattacccttacccagaatgcacttcatcagtgctccaagctctgatattgttcaaagacttatatcctggttaccgcacagaagagatagaagcattagttagaagtgcagcaacgtttattgagaccaaacaacaagaagacggttcatggttaggtaattggggtatatgtttcacctacggggccttcttttcgattaaaggtttagtcgcttctggaagaacgtacaagaacagcccttgcatacggaaagcatgccacttcatattgtcgaagcagctcagtactggtggatggggagaaagtcatatcgctattgaaactcaggtgtatgtaaatctcaaaggtgaccgtgctcacgctgtgaataccgcctgggcaatgctcgctttaatttatgctggacagtttgaacgagatccaacgccattacatcgtgctgcaaaggaattgatcaacatgcaactggagacaggagagtttcctcagcaagagcatgtaggatgcttcaactgcagcctctacttcaattacccaagctaccgcaacttgttccccatctgggctctcggtgagtaccatcgtggccttcgtgcaaagaaagacaattgagtccgtgtgtgtatatatatagtacgtatagcattgtgaggaataaaacaggttgcgtcggtggtgagtgcgcaaaaacaagatgtgcttttatgtaggtgtaccacagtgtacaatgttggtcgttgttagactgtaaggctatcatgacgtgtatattgtaatatatatactacgtgattggtgtcctgtatggtcacggccatactcgctgcgtgcgtagagcgcatgattggcttcctgcgcgcgtagaagctaggctgccacgcgccggtgcgatgtaggatattttttcattcatttgctgcatccatggagaagccagggagggacgtttcccacgggccaggatggcgcgcgcctggcgacggtgagcgcgcgaaccaatcacacgttatagtgttccatatgtttcaaattatataagacgttttatcttctctaatgaacgagcagtctcctttcccaaaatatgttggtgagcataccaaattcagagcacgtggtacgctaaatcgcgatcatacgccagttcatcatcttcgtgtggagtgcagctgggaccatcacacaggtcgaacgttccat

SEQ ID NO: 49471 - DNA, 2274 bp, Zea Mays
gcactagtcgctactagctagatagccatatcaccagcatgtggaggctgacggtggccgagggcggcggcccgtggctgcgctcgacgaacggcttcgtggggcgggcggtgtgggagttcgaccctgacctcggtacgccggaggagcgcgacgaggtagagagggtacgccaggagttctccgaccaccgcttccagaggagagagtcggccgacctcctcatgcgcatgcaggtacttggattgtttgattggtcaggaaataatccaattttccctgaactatggtccattccccagtttcttccatttcatccaggaggacctcatctgtccacgcacactgttgcagaatgttatttggacttcactttataggtgtgtggaaccagtattgagcagttggcctatcaacaagctgagagagagagctctgggaaacatcatggagcatatccattatgaagatgagaacacacaatacctatgcatatgtcctgtgaataaggctctaaacatggtctgctgctgggtagaagatccaaattcagatgcattcaagcgtcaccttgcaaggataccagacttcttgtggatttcagaagatggcatgaaggcacaggtatatgatggctgccagagctgggagacatcattcataattcaagcattttgcgctacagatcttgttaatgactatggttcaactcttcagagagcctatgagtttatgaaaaattcacaggtcatgaggaaccatcctggtgaccaacgttattggcatcgccatagatcgaagggttcatggacactttcatctgcagacaatggatgggctgtatctgacactacaggagaagcacttaaggctgtactgttgctgtcaaagatctcaaacaaaaacaaccttgttggggatccaatagaaagagaaaggttgcatgacgctattgattgccttctatcttttgcgaacaaagatggcaccttttctacatatgagtgcaaaagaacttattcttggttagagattctaagtccttgtgagactttcccaaacattgttgtcgattacccttacccagaatgcacttcatcagtgctccaagctctgatattgttcaaagacttatatcctggttaccgcacagaagagatagaagcattagttagaagtgcagcaacgtttattgagaccaaacaacaagaagacggttcatggttaggtaattggggtatatgtttcacctacggggccttcttttcgattaaaggtttagtcgcttctggaagaacgtacaagaacagcccttgcatacggaaagcatgccacttcatattgtcgaagcagctcagtactggtggatggggagaaagtcatatcgctattgaaactcaggtgtatgtaaatctcaaaggtgaccgtgctcacgctgtgaataccgcctgggcaatgctcgctttaatttatgctggacagtttgaacgagatccaacgccattacatcgtgctgcaaaggaattgatcaacatgcaactggagacaggagagtttcctcagcaagagcatgtaggatgcttcaactgcagcctctacttcaattacccaagctaccgcaacttgttccccatctgggctctcggtgagtaccatcgtggccttcgtgcaaagaaagacaattgagtccgtgtgtgtatatatatagtacgtatagcattgtgaggaataaaacaggttgcgtcggtggtgagtgcgcaaaaacaagatgtgcttttatgtaggtgtaccacagtgtacaatgttggtcgttgttagactgtaaggctatcatgacgtgtatattgtaatatatatactacgtgattggtgtcctgtatggtcacggccatactcgctgcgtgcgtagagcgcatgattggcttcctgcgcgcgtagaagctaggctgccacgcgccggtgcgatgtaggatattttttcattcatttgctgcatccatggagaagccagggagggacgtttcccacgggccaggatggcgcgcgcctggcgacggtgagcgcgcgaaccaatcacacgttatagtgttccatatgtttcaaattatataagacgttttatcttctctaatgaacgagcagtctcctttcccaaaatatgttggtgagcataccaaattcagagcacgtggtacgctaaatcgcgatcatacgccagttcatcatcttcgtgtggagtgcagctgggaccatcacacaggtcgaacgttccat

SEQ ID NO: 49472 - DNA, 2788 bp, Zea Mays
gccttgctgcgagcctgcgacagaggagacagcgttggcgatggcgtccacagtggcgggagcttcctggaagtggatggatgagagcgcaggaagttgaaaggccgattgcgcaaagcagaacagatctcaacgtcgtgatctgccacgcatcaagcttggggaggatgagcacgtcactgaagaaattgtactgagctccttgaggtcggctctggaccagttctcttcactgcaagccagcgatgggcactggcctggtgatttcagcgggattatgttcatcatgcctggtttgatatttgccttgtatgtcactggatcactgaatgttgtcatatcaccagaacatcggcatgagatttgccgctacatctacaaccaccagaacgaagatggtggatggggcacacttatcctgggttcgagcaccatgtttggcacatgctcaaactacatcaccttgaggcttctcggtgaggagccatacgccaacaacagtgtgttggctaaagggcgtgcttggattctatcccatggtggtgcaaccttgattcctcagtggggaaaaatatggctttcggtacttggattgtttgattggtcaggaaataatccaattttccctgaactatggtccattccccagtttcttccatttcatccagggaaattctggtgctttgcccgtatggtatatctaccaatggcttatctttatggcaagaaatttgttggaccaattacaccaactatattggcactaagagaggaaatctatgacactccttatggaaagattgactggagtgatgctcgtagtaaatgcgcaaaggaggacctcatctgtccacgcacactgttgcagaatgttatttggacttcactttataggtgtgtggaaccagtattgagcagttggcctatcaacaagctgagagagagagctctgggaaacatcatggagcatatccattatgaagatgagaacacacaatacctatgcatatgtcctgtgaataaggctctaaacatggtctgctgctgggtagaagatccaaattcagatgcattcaagcgtcaccttgcaaggataccagacttcttgtggatttcagaagatggcatgaaggcacaggtatatgatggctgccagagctgggagacatcattcataattcaagcattttgcgctacagatcttgttaatgactatggttcaactcttcagagagcctatgagtttatgaaaaattcacaggtcatgaggaaccatcctggtgaccaacgttattggcatcgccatagatcgaagggttcatggacactttcatctgcagacaatggatgggctgtatctgacactacaggagaagcacttaaggctgtactgttgctgtcaaagatctcaaacaaaaacaaccttgttggggatccaatagaaagagaaaggttgcatgacgctattgattgccttctatcttttgcgaacaaagatggcaccttttctacatatgagtgcaaaagaacttattcttggttagagattctaagtccttgtgagactttcccaaacattgttgtcgattacccttacccagaatgcacttcatcagtgctccaagctctgatattgttcaaagacttatatcctggttaccgcacagaagagatagaagcattagttagaagtgcagcaacgtttattgagaccaaacaacaagaagacggttcatggttaggtaattggggtatatgtttcacctacggggccttcttttcgattaaaggtttagtcgcttctggaagaacgtacaagaacagcccttgcatacggaaagcatgccacttcatattgtcgaagcagctcagtactggtggatggggagaaagtcatatcgctattgaaactcaggtgtatgtaaatctcaaaggtgaccgtgctcacgctgtgaataccgcctgggcaatgctcgctttaatttatgctggacagtttgaacgagatccaacgccattacatcgtgctgcaaaggaattgatcaacatgcaactggagacaggagagtttcctcagcaagagcatgtaggatgcttcaactgcagcctctacttcaattacccaagctaccgcaacttgttccccatctgggctctcggtgagtaccatcgtggccttcgtgcaaagaaagacaattgagtccgtgtgtgtatatatatagtacgtatagcattgtgaggaataaaacaggttgcgtcggtggtgagtgcgcaaaaacaagatgtgcttttatgtaggtgtaccacagtgtacaatgttggtcgttgttagactgtaaggctatcatgacgtgtatattgtaatatatatactacgtgattggtgtcctgtatggtcacggccatactcgctgcgtgcgtagagcgcatgattggcttcctgcgcgcgtagaagctaggctgccacgcgccggtgcgatgtaggatattttttcattcatttgctgcatccatggagaagccagggagggacgtttcccacgggccaggatggcgcgcgcctggcgacggtgagcgcgcgaaccaatcacacgttatagtgttccatatgtttcaaattatataagacgttttatcttctctaatgaacgagcagtctcctttcccaaaatatgttggtgagcataccaaattcagagcacgtggtacgctaaatcgcgatcatacgccagttcatcatcttcgtgtggagtgcagctgggaccatcacacaggtcgaacgttccat

SEQ ID NO: 49473 - DNA, 743 bp, Zea Mays
acggcagcctgtcgctgtcaccgtcgtcatcttcctcctgtgatcgccccgctccgcttctgcaggccacggctgggcgacaccctgatggcgtcgcctcctcccgtggcgaccgcggggcctcacagcgtcttcgtgtacggcacgctgatggaagaggaggtggtgcgtgtgctcctgggccgcgccccgccctcctcctcccccgcgctcctccccgaccaccgcaggttcagcctcaggggccgcgtctacccggccatcctccccgcccgcgcccacgcggttatccaggggctcaccgacagggaactccatgtgttcgacatgttcgaggacgaggagtatgtgaagacaaccgtcgaggtctcactgactgatgcatcggagaaatcactcgcctacgcctacatatggggtaaccagggtgatcctgacctctacggggaatgggattttgaggagtggaggaaggtgcatttgaagtactaccttgagatgactcgggaattcatgctggaactcgggcaattttaaacacttctctggtttgtaactacacaggagtcagaggatccttgcaaaactaccatagaataatttgtgtcttgtgctcgacgagttcttgctactatgctgctttgggaacatacacatgttatttgagccatttagtcatttggatgtgaacaaatcgattcttctcttctgccctgttttcgctgtgctgccctgcgtctaca

SEQ ID NO: 49474 - DNA, 3205 bp, Zea Mays
ccacactccatctcgccgcccaaaacccactctctccaaaaaggcaaaacccctccttcccgcggcggccgccggcgtagccgacgacgccgacgacgaggcagccatggccgcccccgccgcccggagaatagttggcgctgaggttcccatacccggctcggacaagctgcggtggatcgacctcaccatcccctcgtcctccgccgctgcgccggcgagcccctccgatcccttcgtctgcgtgcccccgcgtgctgcctcggggtgccacatcatcccttcgggcgattctcagtattacctctcgtggaggattcacgaggaacacccaaatgtgctggaggtcattgaacttagtccctccaaggagttccctagctttggactgcgtcttgccttccaggaggcgctatctccattcgcctttctatgtgaacgagagggtcgcaggcaaggggagcttgtatatatgctatatgtgcttaccgtttctggagttgctcttttgtgccacctacgcagcccattttcctacgtatctggttcagtgctgcatcaggatgatatagctgagtttaatctccaaactcaagctcagagcgcaaaggttacagcggtaacagcgaagccaggatgtattgtgattggtcggcaagatgggtccatctgttcttacagtcttggcaaattagccccaaactcaccaggtttctcgaatgaactacgagatgatgctgggattggacgtttatggactctcatgtcaagaacaaagactgtgggtcctgtgcaggacatagtagcaactgttgtaaatgaaagggacctgttatttgttcttcatttggatggacacttgcgcatatgggataatcacatgaaacttctcaactataatgtccactcaaatgacattgaaggccatccgtccaggctatgggttggtaaggctgatgatgatcaggagttgatatctttggcgattctgcatcaaaacactgtggttcaaggttgtgattatgttgctgtatatggcttcggtttttctgctgcggaaaggttcatgttctcttctgaaccttcaatttctactatacctttgctagaggggaagcttgcggacttgaaaatagccacatataagctttggatacttaaagaatttggctccatgctctatgaaatattacagtatgacattgacaccgaaactgcaaaatgttgtagtgagaaggtttgctgttatgtgctacaagaagatgctatcagtgaacagttgtttcaaagttctgacaatgcattggatgatttggtttggacagctgattcaatgttctcctccttgaaggaacaggcttttactttgatttcatccatgtttctgcggaggctacttcaaccaggagtaaaccactgttctgccctacgtgaaaccttactagagcataaaaggttcctatcagattctgagttccagtcacttacagcaaatgggctacgaaaagagatattatctattatagaacaagagggaagttcacagacagcaagtgctacagcttatcactggaaacaattctctgcacggtacctccacaattggtgctggcacaataagccctatggattgtttcttgatactacaaatgaagtgtttggtttagtaagaaagggttcattttctctattccgttgtttggagggtctggagatgcttatttatggttatgaccatggggtgaacttactcgacgatgtgtctgattttgaactcctcaatgaggtcctcagatgcatgggcaatatacaccatttgctggggagatcttccacagcagcatattatgaatccttaattagttctattatatcatctgatgaaattgtttcacatatagtaaagattctagagactggttttagtcatcagtcatcctcatccctcagtacattactaggaatggatacttatgtagaaagaaggcaggcagctcacaaaagtcaaaggaagttttctgttgagatgttacgatcttttcatacgttgcaatcaagatcagcatcctggtcggcagtattcgatgtgattgagaagtttatgaagtgtttgaacacaaacatgaacgtacaatcgtatggatcaaagagagtttgtaatgtaaattctgtgttactagttcaagctacttcacaggttgccagaacaatgtttgagtgtgcatttgatctgtttctgttccttagctatctggttggtgttggtgggcaggtttctttgttgcaaaatgatgttgccagaataaaactgaagctgttcccaatgattcaagacatattgggacaatggattgttctccattttgtaggaacctcaccaacctcaccaccaaccattgacgattttagctatcaactttcttctcttcagcttgatctggcgcaattgtgtgaagcctttccactgagccaaaggtcttgagttcgacgtagcctctctgcaaaatgcaggggtaaatcagatgaactgtctttgcacagaaagcttggctgctctgattttacattggcttctttacttgattttccaaaatctcctgaaggggacgttatgtcaccttgttttctcggtccagcggaaataataaatctagtaaggaggtttagtagtttgattatgcatggaggaaattttgaatgtgtacacactttcttgggatgcacaattaatctatcagctgttctcatcagacatagtcagtatgaagctgctcagaatctgctgggaattctggaaacatacttgaacaatggaaaagtatcgcatactggtcaagatgcagacactgcatgttcagcatatcttcatctcaatggattttgccttctgatgattgcacatgatgaagcaaatattattttgagagaatccaaggttcatgatgctatccgatgctttttcagggctgcatccgggtatgaagctccaaaggctttggagaacttttcattggaaacagggtttcaagtttctggggaatctagatctatttctttgtggagacttaactactatgagtgggcaatgcaaatttttgagcaacactccatgagcgagggggcgtaccaatttgctcttgctgcactagaactagttcttctcgacgggatagataatggaattgaagctgagggtctccagaga

SEQ ID NO: 49475 - DNA, 3127 bp, Zea Mays
ccacactccatctcgccgcccaaaacccactctctccaaaaaggcaaaacccctccttcccgcggcggccgccggcgtagccgacgacgccgacgacgaggcagccatggccgcccccgccgcccggagaatagttggcgctgaggttcccatacccggctcggacaagctgcggtggatcgacctcaccatcccctcgtcctccgccgctgcgccggcgagcccctccgatcccttcgtctgcgtgcccccgcgtgctgcctcggggtgccacatcatcccttcgggcgattctcagtattacctctcgtggaggattcacgaggaacacccaaatgtgctggaggtcattgaacttagtccctccaaggagttccctagctttggactgcgtcttgccttccaggaggcgctatctccattcgcctttctatgtgaacgagagggtcgcaggcaaggggagcttgtatatatgctatatgtgcttaccgtttctggagttgctcttttgtgccacctacgcagcccattttcctacgtatctggttcagtgctgcatcaggatgatatagctgagtttaatctccaaactcaagctcagagcgcaaaggttacagcggtaacagcgaagccaggatgtattgtgattggtcggcaagatgggtccatctgttcttacagtcttggcaaattagccccaaactcaccaggtttctcgaatgaactacgagatgatgctgggattggacgtttatggactctcatgtcaagaacaaagactgtgggtcctgtgcaggacatagtagcaactgttgtaaatgaaagggacctgttatttgttcttcatttggatggacacttgcgcatatgggataatcacatgaaacttctcaactataatgtccactcaaatgacattgaaggccatccgtccaggctatgggttggtaaggctgatgatgatcaggagttgatatctttggcgattctgcatcaaaacactgtggttcaaggttgtgattatgttgctgtatatggcttcggtttttctgctgcggaaaggttcatgttctcttctgaaccttcaatttctactatacctttgctagaggggaagcttgcggacttgaaaatagccacatataagctttggatacttaaagaatttggctccatgctctatgaaatattacagtatgacattgacaccgaaactgcaaaatgttgtagtgagaaggtttgctgttatgtgctacaagaagatgctatcagtgaacagttgtttcaaagttctgacaatgcattggatgatttggtttggacagctgattcaatgttctcctccttgaaggaacaggcttttactttgatttcatccatgtttctgcggaggctacttcaaccaggagtaaaccactgttctgccctacgtgaaaccttactagagcataaaaggttcctatcagattctgagttccagtcacttacagcaaatgggctacgaaaagagatattatctattatagaacaagagggaagttcacagacagcaagtgctacagcttatcactggaaacaattctctgcacggtacctccacaattggtgctggcacaataagccctatggattgtttcttgatactacaaatgaagtgtttggtttagtaagaaagggttcattttctctattccgttgtttggagggtctggagatgcttatttatggttatgaccatggggtgaacttactcgacgatgtgtctgattttgaactcctcaatgaggtcctcagatgcatgggcaatatacaccatttgctggggagatcttccacagcagcatattatgaatccttaattagttctattatatcatctgatgaaattgtttcacatatagtaaagattctagagactggttttagtcatcagtcatcctcatccctcagtacattactaggaatggatacttatgtagaaagaaggcaggcagctcacaaaagtcaaaggaagttttctgttgagatgttacgatcttttcatacgttgcaatcaagatcagcatcctggtcggcagtattcgatgtgattgagaagtttatgaagtgtttgaacacaaacatgaacgtacaatcgtatggatcaaagagagtttgtaatgtaaattctgtgttactagttcaagctacttcacaggttgccagaacaatgtttgagtgtgcatttgatctgtttctgttccttagctatctggttggtgttggtgggcaggtttctttgttgcaaaatgatgttgccagaataaaactgaagctgttcccaatgattcaagacatattgggacaatggattgttctccattttgtaggaacctcaccaacctcaccaccaaccattgacgattttagctatcaactttcttctcttcagcttggtaaatcagatgaactgtctttgcacagaaagcttggctgctctgattttacattggcttctttacttgattttccaaaatctcctgaaggggacgttatgtcaccttgttttctcggtccagcggaaataataaatctagtaaggaggtttagtagtttgattatgcatggaggaaattttgaatgtgtacacactttcttgggatgcacaattaatctatcagctgttctcatcagacatagtcagtatgaagctgctcagaatctgctgggaattctggaaacatacttgaacaatggaaaagtatcgcatactggtcaagatgcagacactgcatgttcagcatatcttcatctcaatggattttgccttctgatgattgcacatgatgaagcaaatattattttgagagaatccaaggttcatgatgctatccgatgctttttcagggctgcatccgggtatgaagctccaaaggctttggagaacttttcattggaaacagggtttcaagtttctggggaatctagatctatttctttgtggagacttaactactatgagtgggcaatgcaaatttttgagcaacactccatgagcgagggggcgtaccaatttgctcttgctgcactagaactagttcttctcgacgggatagataatggaattgaagctgagggtctccagaga

SEQ ID NO: 49476 - DNA, 3215 bp, Zea Mays
actccatctcgccgcccaaaacccactctctccaaaaaggcaaaacccctccttcccgcggcggccgccggcgtagccgacgacgccgacgacgaggcagccatggccgcccccgccgcccggagaatagttggcgctgaggttcccatacccggctcggacaagctgcggtggatcgacctcaccatcccctcgtcctccgccgctgcgccggcgagcccctccgatcccttcgtctgcgtgcccccgcgtgctgcctcggggtgccacatcatcccttcgggcgattctcagtattacctctcgtggaggattcacgaggaacacccaaatgtgctggaggtcattgaacttagtccctccaaggagttccctagctttggactgcgtcttgccttccaggaggcgctatctccattcgcctttctatgtgaacgagagggtcgcaggcaaggggagcttgtatatatgctatatgtgcttaccgtttctggagttgctcttttgtgccacctacgcagcccattttcctacgtatctggttcagtgctgcatcaggatgatatagctgagtttaatctccaaactcaagctcagagcgcaaaggttacagcggtaacagcgaagccaggatgtattgtgattggtcggcaagatgggtccatctgttcttacagtcttggcaaattagccccaaactcaccaggtttctcgaatgaactacgagatgatgctgggattggacgtttatggactctcatgtcaagaacaaagactgtgggtcctgtgcaggacatagtagcaactgttgtaaatgaaagggacctgttatttgttcttcatttggatggacacttgcgcatatgggataatcacatgaaacttctcaactataatgtccactcaaatgacattgaaggccatccgtccaggctatgggttggtaaggctgatgatgatcaggagttgatatctttggcgattctgcatcaaaacactgtggttcaaggttgtgattatgttgctgtatatggcttcggtttttctgctgcggaaaggttcatgttctcttctgaaccttcaatttctactatacctttgctagaggggaagcttgcggacttgaaaatagccacatataagctttggatacttaaagaatttggctccatgctctatgaaatattacagtatgacattgacaccgaaactgcaaaatgttgtagtgagaaggtttgctgttatgtgctacaagaagatgctatcagtgaacagttgtttcaaagttctgacaatgcattggatgatttggtttggacagctgattcaatgttctcctccttgaaggaacaggcttttactttgatttcatccatgtttctgcggaggctacttcaaccaggagtaaaccactgttctgccctacgtgaaaccttactagagcataaaaggttcctatcagattctgagttccagtcacttacagcaaatgggctacgaaaagagatattatctattatagaacaagagggaagttcacagacagcaagtgctacagcttatcactggaaacaattctctgcacggtacctccacaattggtgctggcacaataagccctatggattgtttcttgatactacaaatgaagtgtttggtttagtaagaaagggttcattttctctattccgttgtttggagggtctggagatgcttatttatggttatgaccatggggtgaacttactcgacgatgtgtctgattttgaactcctcaatgaggtcctcagatgcatgggcaatatacaccatttgctggggagatcttccacagcagcatattatgaatccttaattagttctattatatcatctgatgaaattgtttcacatatagtaaagattctagagactggttttagtcatcagtcatcctcatccctcagtacattactaggaatggatacttatgtagaaagaaggcaggcagctcacaaaagtcaaaggaagttttctgttgagatgttacgatcttttcatacgttgcaatcaagatcagcatcctggtcggcagtattcgatgtgattgagaagtttatgaagtgtttgaacacaaacatgaacgtacaatcgtatggatcaaagagagtttgtaatgtaaattctgtgttactagttcaagctacttcacaggttgccagaacaatgtttgagtgtgcatttgatctgtttctgttccttagctatctggttggtgttggtgggcaggtacgctataacttttgatttttgctatttctttctgctgtgtactggaacttcaactttgcttcttcgaccatgtactcatatagcttaaggtttctttgttgcaaaatgatgttgccagaataaaactgaagctgttcccaatgattcaagacatattgggacaatggattgttctccattttgtaggaacctcaccaacctcaccaccaaccattgacgattttagctatcaactttcttctcttcagcttggtaaatcagatgaactgtctttgcacagaaagcttggctgctctgattttacattggcttctttacttgattttccaaaatctcctgaaggggacgttatgtcaccttgttttctcggtccagcggaaataataaatctagtaaggaggtttagtagtttgattatgcatggaggaaattttgaatgtgtacacactttcttgggatgcacaattaatctatcagctgttctcatcagacatagtcagtatgaagctgctcagaatctgctgggaattctggaaacatacttgaacaatggaaaagtatcgcatactggtcaagatgcagacactgcatgttcagcatatcttcatctcaatggattttgccttctgatgattgcacatgatgaagcaaatattattttgagagaatccaaggttcatgatgctatccgatgctttttcagggctgcatccgggtatgaagctccaaaggctttggagaacttttcattggaaacagggtttcaagtttctggggaatctagatctatttctttgtggagacttaactactatgagtgggcaatgcaaatttttgagcaacactccatgagcgagggggcgtaccaatttgctcttgctgcactagaactagttcttctcgacgggatagataatggaattgaagctgagggtctccagaga

SEQ ID NO: 49477 - DNA, 3117 bp, Zea Mays
ctccatctcgccgcccaaaacccactctctccaaaaaggcaaaacccctccttcccgcggcggccgccggcgtagccgacgacgccgacgacgaggcagccatggccgcccccgccgcccggagaatagttggcgctgaggttcccatacccggctcggacaagctgcggtggatcgacctcaccatcccctcgtcctccgccgctgcgccggcgagcccctccgatcccttcgtctgcgtgcccccgcgtgctgcctcggggtgccacatcatcccttcgggcgattctcagtattacctctcgtggaggattcacgaggaacacccaaatgtgctggaggtcattgaacttagtccctccaaggagttccctagctttggactgcgtcttgccttccaggaggcgctatctccattcgcctttctatgtgaacgagagggtcgcaggcaaggggagcttgtatatatgctatatgtgcttaccgtttctggagttgctcttttgtgccacctacgcagcccattttcctacgtatctggttcagtgctgcatcaggatgatatagctgagtttaatctccaaactcaagctcagagcgcaaaggttacagcggtaacagcgaagccaggatgtattgtgattggtcggcaagatgggtccatctgttcttacagtcttggcaaattagccccaaactcaccaggtttctcgaatgaactacgagatgatgctgggattggacgtttatggactctcatgtcaagaacaaagactgtgggtcctgtgcaggacatagtagcaactgttgtaaatgaaagggacctgttatttgttcttcatttggatggacacttgcgcatatgggataatcacatgaaacttctcaactataatgtccactcaaatgacattgaaggccatccgtccaggctatgggttggtaaggctgatgatgatcaggagttgatatctttggcgattctgcatcaaaacactgtggttcaaggttgtgattatgttgctgtatatggcttcggtttttctgctgcggaaaggttcatgttctcttctgaaccttcaatttctactatacctttgctagaggggaagcttgcggacttgaaaatagccacatataagctttggatacttaaagaatttggctccatgctctatgaaatattacagtatgacattgacaccgaaactgcaaaatgttgtagtgagaaggtttgctgttatgtgctacaagaagatgctatcagtgaacagttgtttcaaagttctgacaatgcattggatgatttggtttggacagctgattcaatgttctcctccttgaaggaacaggcttttactttgatttcatccatgtttctgcggaggctacttcaaccaggagtaaaccactgttctgccctacgtgaaaccttactagagcataaaaggttcctatcagattctgagttccagtcacttacagcaaatgggctacgaaaagagatattatctattatagaacaagagttcacagacagcaagtgctacagcttatcactggaaacaattctctgcacggtacctccacaattggtgctggcacaataagccctatggattgtttcttgatactacaaatgaagtgtttggtttagtaagaaagggttcattttctctattccgttgtttggagggtctggagatgcttatttatggttatgaccatggggtgaacttactcgacgatgtgtctgattttgaactcctcaatgaggtcctcagatgcatgggcaatatacaccatttgctggggagatcttccacagcagcatattatgaatccttaattagttctattatatcatctgatgaaattgtttcacatatagtaaagattctagagactggttttagtcatcagtcatcctcatccctcagtacattactaggaatggatacttatgtagaaagaaggcaggcagctcacaaaagtcaaaggaagttttctgttgagatgttacgatcttttcatacgttgcaatcaagatcagcatcctggtcggcagtattcgatgtgattgagaagtttatgaagtgtttgaacacaaacatgaacgtacaatcgtatggatcaaagagagtttgtaatgtaaattctgtgttactagttcaagctacttcacaggttgccagaacaatgtttgagtgtgcatttgatctgtttctgttccttagctatctggttggtgttggtgggcaggtttctttgttgcaaaatgatgttgccagaataaaactgaagctgttcccaatgattcaagacatattgggacaatggattgttctccattttgtaggaacctcaccaacctcaccaccaaccattgacgattttagctatcaactttcttctcttcagcttggtaaatcagatgaactgtctttgcacagaaagcttggctgctctgattttacattggcttctttacttgattttccaaaatctcctgaaggggacgttatgtcaccttgttttctcggtccagcggaaataataaatctagtaaggaggtttagtagtttgattatgcatggaggaaattttgaatgtgtacacactttcttgggatgcacaattaatctatcagctgttctcatcagacatagtcagtatgaagctgctcagaatctgctgggaattctggaaacatacttgaacaatggaaaagtatcgcatactggtcaagatgcagacactgcatgttcagcatatcttcatctcaatggattttgccttctgatgattgcacatgatgaagcaaatattattttgagagaatccaaggttcatgatgctatccgatgctttttcagggctgcatccgggtatgaagctccaaaggctttggagaacttttcattggaaacagggtttcaagtttctggggaatctagatctatttctttgtggagacttaactactatgagtgggcaatgcaaatttttgagcaacactccatgagcgagggggcgtaccaatttgctcttgctgcactagaactagttcttctcgacgggatagataatggaattgaagctgagggtctccagaga

SEQ ID NO: 49478 - DNA, 3079 bp, Zea Mays
ccaaaacccactctctccaaaaaggcaaaacccctccttcccgcggcggccgccggcgtagccgacgacgccgacgacgaggcagccatggccgcccccgccgcccggagaatagttggcgctgaggttcccatacccggctcggacaagctgcggtggatcgacctcaccatcccctcgtcctccgccgctgcgccggcgagcccctccgatcccttcgtctgcgtgcccccgcgtgctgcctcggggtgccacatcatcccttcgggcgattctcagtattacctctcgtggaggattcacgaggaacacccaaatgtgctggaggtcattgaacttagtccctccaaggagttccctagctttggactgcgtcttgccttccaggaggcgctatctccattcgcctttctatgtgaacgagagggtcgcaggcaaggggagcttgtatatatgctatatgtgcttaccgtttctggagttgctcttttgtgccacctacgcagcccattttcctacgtatctggttcagtgctgcatcaggatgatatagctgagtttaatctccaaactcaagctcagagcgcaaaggttacagcggtaacagcgaagccaggatgtattgtgattggtcggcaagatgggtccatctgttcttacagtcttggcaaattagccccaaactcaccaggtttctcgaatgaactacgagatgatgctgggattggacgtttatggactctcatgtcaagaacaaagactgtgggtcctgtgcaggacatagtagcaactgttgtaaatgaaagggacctgttatttgttcttcatttggatggacacttgcgcatatgggataatcacatgaaacttctcaactataatgtccactcaaatgacattgaaggccatccgtccaggctatgggttggtaaggctgatgatgatcaggagttgatatctttggcgattctgcatcaaaacactgtggttcaaggttgtgattatgttgctgtatatggcttcggtttttctgctgcggaaaggttcatgttctcttctgaaccttcaatttctactatacctttgctagaggggaagcttgcggacttgaaaatagccacatataagctttggatacttaaagaatttggctccatgctctatgaaatattacagtatgacattgacaccgaaactgcaaaatgttgtagtgagaaggtttgctgttatgtgctacaagaagatgctatcagtgaacagttgtttcaaagttctgacaatgcattggatgatttggtttggacagctgattcaatgttctcctccttgaaggaacaggcttttactttgatttcatccatgtttctgcggaggctacttcaaccaggagtaaaccactgttctgccctacgtgaaaccttactagagcataaaaggttcctatcagattctgagttccagtcacttacagcaaatgggctacgaaaagagatattatctattatagaacaagagggaagttcacagacagcaagtgctacagcttatcactggaaacaattctctgcacggtacctccacaattggtgctggcacaataagccctatggattgtttcttgatactacaaatgaagtgtttggtttagtaagaaagggttcattttctctattccgttgtttggagggtctggagatgcttatttatggttatgaccatggggtgaacttactcgacgatgtgtctgattttgaactcctcaatgaggtcctcagatgcatgggcaatatacaccatttgctggggagatcttccacagcagcatattatgaatccttaattagttctattatatcatctgatgaaattgtttcacatatagtaaagattctagagactggttttagtcatcagtcatcctcatccctcagtacattactaggaatggatacttatgtagaaagaaggcaggcagctcacaaaagtcaaaggaagttttctgttgagatgttacgatcttttcatacgttgcaatcaagatcagcatcctggtcggcagtattcgatgtgattgagaagtttatgaagtgtttgaacacaaacatgaacgtacaatcgtatggatcaaagagagtttgtaatgtaaattctgtgttactagttcaagctacttcacaggttgccagaacaatgtttgagtgtgcatttgatctgtttctgttccttagctatctggttggtgttggtgggcagaataaaactgaagctgttcccaatgattcaagacatattgggacaatggattgttctccattttgtaggaacctcaccaacctcaccaccaaccattgacgattttagctatcaactttcttctcttcagcttggtaaatcagatgaactgtctttgcacagaaagcttggctgctctgattttacattggcttctttacttgattttccaaaatctcctgaaggggacgttatgtcaccttgttttctcggtccagcggaaataataaatctagtaaggaggtttagtagtttgattatgcatggaggaaattttgaatgtgtacacactttcttgggatgcacaattaatctatcagctgttctcatcagacatagtcagtatgaagctgctcagaatctgctgggaattctggaaacatacttgaacaatggaaaagtatcgcatactggtcaagatgcagacactgcatgttcagcatatcttcatctcaatggattttgccttctgatgattgcacatgatgaagcaaatattattttgagagaatccaaggttcatgatgctatccgatgctttttcagggctgcatccgggtatgaagctccaaaggctttggagaacttttcattggaaacagggtttcaagtttctggggaatctagatctatttctttgtggagacttaactactatgagtgggcaatgcaaatttttgagcaacactccatgagcgagggggcgtaccaatttgctcttgctgcactagaactagttcttctcgacgggatagataatggaattgaagctgagggtctccagaga

SEQ ID NO: 49479 - DNA, 3589 bp, Zea Mays
ccaaaacccactctctccaaaaaggcaaaacccctccttcccgcggcggccgccggcgtagccgacgacgccgacgacgaggcagccatggccgcccccgccgcccggagaatagttggcgctgaggttcccatacccggctcggacaagctgcggtggatcgacctcaccatcccctcgtcctccgccgctgcgccggcgagcccctccgatcccttcgtctgcgtgcccccgcgtgctgcctcggggtgccacatcatcccttcgggcgattctcagtattacctctcgtggaggattcacgaggaacacccaaatgtgctggaggtcattgaacttagtccctccaaggagttccctagctttggactgcgtcttgccttccaggaggcgctatctccattcgcctttctatgtgaacgagagggtcgcaggcaaggggagcttgtatatatgctatatgtgcttaccgtttctggagttgctcttttgtgccacctacgcagcccattttcctacgtatctggttcagtgctgcatcaggatgatatagctgagtttaatctccaaactcaagctcagagcgcaaaggttacagcggtaacagcgaagccaggatgtattgtgattggtcggcaagatgggtccatctgttcttacagtcttggcaaattagccccaaactcaccaggtttctcgaatgaactacgagatgatgctgggattggacgtttatggactctcatgtcaagaacaaagactgtgggtcctgtgcaggacatagtagcaactgttgtaaatgaaagggacctgttatttgttcttcatttggatggacacttgcgcatatgggataatcacatgaaacttctcaactataatgtccactcaaatgacattgaaggccatccgtccaggctatgggttggtaaggctgatgatgatcaggagttgatatctttggcgattctgcatcaaaacactgtggttcaaggttgtgattatgttgctgtatatggcttcggtttttctgctgcggaaaggttcatgttctcttctgaaccttcaatttctactatacctttgctagaggggaagcttgcggacttgaaaatagccacatataagctttggatacttaaagaatttggctccatgctctatgaaatattacagtatgacattgacaccgaaactgcaaaatgttgtagtgagaaggtttgctgttatgtgctacaagaagatgctatcagtgaacagttgtttcaaagttctgacaatgcattggatgatttggtttggacagctgattcaatgttctcctccttgaaggaacaggcttttactttgatttcatccatgtttctgcggaggctacttcaaccaggagtaaaccactgttctgccctacgtgaaaccttactagagcataaaaggttcctatcagattctgagttccagtcacttacagcaaatgggctacgaaaagagatattatctattatagaacaagagggaagttcacagacagcaagtgctacagcttatcactggaaacaattctctgcacggtacctccacaattggtgctggcacaataagccctatggattgtttcttgatactacaaatgaagtgtttggtttagtaagaaagggttcattttctctattccgttgtttggagggtctggagatgcttatttatggttatgaccatggggtgaacttactcgacgatgtgtctgattttgaactcctcaatgaggtcctcagatgcatgggcaatatacaccatttgctggggagatcttccacagcagcatattatgaatccttaattagttctattatatcatctgatgaaattgtttcacatatagtaaagattctagagactggttttagtcatcagtcatcctcatccctcagtacattactaggaatggatacttatgtagaaagaaggcaggcagctcacaaaagtcaaaggaagttttctgttgagatgttacgatcttttcatacgttgcaatcaagatcagcatcctggtcggcagtattcgatgtgattgagaagtttatgaagtgtttgaacacaaacatgaacgtacaatcgtatggatcaaagagagtttgtaatgtaaattctgtgttactagttcaagctacttcacaggttgccagaacaatgtttgagtgtgcatttgatctgtttctgttccttagctatctggttggtgttggtgggcaggtacgctataacttttgatttttgctatttctttctgctgtgtactggaacttcaactttgcttcttcgaccatgtactcatatagcttaaggtacacacttttaagctttcatgagcatgcttgctttgtctcatctgtaacttacaatggttagaactctcaagaactttggctattactgggattttgggttgctgagccaatcttatccacatactatacggctaactaccaagaattgctatgatcttaaaatcatgcagatgaatatttgtttacaatttacatgtgcttttagaacaccattgtaacaccaaggcctgtgggctcaaattgtcaattccatatacaaaatattaagcggcaatgcctgtttttttaatcttgtaccccttgcttctagtttgaaaagtgcaagatacatttattcttcaatatctttttgtttatttctttgataataataatttgtgaatcaggtttctttgttgcaaaatgatgttgccagaataaaactgaagctgttcccaatgattcaagacatattgggacaatggattgttctccattttgtaggaacctcaccaacctcaccaccaaccattgacgattttagctatcaactttcttctcttcagcttggtaaatcagatgaactgtctttgcacagaaagcttggctgctctgattttacattggcttctttacttgattttccaaaatctcctgaaggggacgttatgtcaccttgttttctcggtccagcggaaataataaatctagtaaggaggtttagtagtttgattatgcatggaggaaattttgaatgtgtacacactttcttgggatgcacaattaatctatcagctgttctcatcagacatagtcagtatgaagctgctcagaatctgctgggaattctggaaacatacttgaacaatggaaaagtatcgcatactggtcaagatgcagacactgcatgttcagcatatcttcatctcaatggattttgccttctgatgattgcacatgatgaagcaaatattattttgagagaatccaaggttcatgatgctatccgatgctttttcagggctgcatccgggtatgaagctccaaaggctttggagaacttttcattggaaacagggtttcaagtttctggggaatctagatctatttctttgtggagacttaactactatgagtgggcaatgcaaatttttgagcaacactccatgagcgagggggcgtaccaatttgctcttgctgcactagaactagttcttctcgacgggatagataatggaattgaagctgagggtctccagaga

SEQ ID NO: 49480 - DNA, 3057 bp, Zea Mays
caaaaaggcaaaacccctccttcccgcggcggccgccggcgtagccgacgacgccgacgacgaggcagccatggccgcccccgccgcccggagaatagttggcgctgaggttcccatacccggctcggacaagctgcggtggatcgacctcaccatcccctcgtcctccgccgctgcgccggcgagcccctccgatcccttcgtctgcgtgcccccgcgtgctgcctcggggtgccacatcatcccttcgggcgattctcagtattacctctcgtggaggattcacgaggaacacccaaatgtgctggaggtcattgaacttagtccctccaaggagttccctagctttggactgcgtcttgccttccaggaggcgctatctccattcgcctttctatgtgaacgagagggtcgcaggcaaggggagcttgtatatatgctatatgtgcttaccgtttctggagttgctcttttgtgccacctacgcagcccattttcctacgtatctggttcagtgctgcatcaggatgatatagctgagtttaatctccaaactcaagctcagagcgcaaaggttacagcggtaacagcgaagccaggatgtattgtgattggtcggcaagatgggtccatctgttcttacagtcttggcaaattagccccaaactcaccaggtttctcgaatgaactacgagatgatgctgggattggacgtttatggactctcatgtcaagaacaaagactgtgggtcctgtgcaggacatagtagcaactgttgtaaatgaaagggacctgttatttgttcttcatttggatggacacttgcgcatatgggataatcacatgaaacttctcaactataatgtccactcaaatgacattgaaggccatccgtccaggctatgggttggtaaggctgatgatgatcaggagttgatatctttggcgattctgcatcaaaacactgtggttcaaggttgtgattatgttgctgtatatggcttcggtttttctgctgcggaaaggttcatgttctcttctgaaccttcaatttctactatacctttgctagaggggaagcttgcggacttgaaaatagccacatataagctttggatacttaaagaatttggctccatgctctatgaaatattacagtatgacattgacaccgaaactgcaaaatgttgtagtgagaaggtttgctgttatgtgctacaagaagatgctatcagtgaacagttgtttcaaagttctgacaatgcattggatgatttggtttggacagctgattcaatgttctcctccttgaaggaacaggcttttactttgatttcatccatgtttctgcggaggctacttcaaccaggagtaaaccactgttctgccctacgtgaaaccttactagagcataaaaggttcctatcagattctgagttccagtcacttacagcaaatgggctacgaaaagagatattatctattatagaacaagagttcacagacagcaagtgctacagcttatcactggaaacaattctctgcacggtacctccacaattggtgctggcacaataagccctatggattgtttcttgatactacaaatgaagtgtttggtttagtaagaaagggttcattttctctattccgttgtttggagggtctggagatgcttatttatggttatgaccatggggtgaacttactcgacgatgtgtctgattttgaactcctcaatgaggtcctcagatgcatgggcaatatacaccatttgctggggagatcttccacagcagcatattatgaatccttaattagttctattatatcatctgatgaaattgtttcacatatagtaaagattctagagactggttttagtcatcagtcatcctcatccctcagtacattactaggaatggatacttatgtagaaagaaggcaggcagctcacaaaagtcaaaggaagttttctgttgagatgttacgatcttttcatacgttgcaatcaagatcagcatcctggtcggcagtattcgatgtgattgagaagtttatgaagtgtttgaacacaaacatgaacgtacaatcgtatggatcaaagagagtttgtaatgtaaattctgtgttactagttcaagctacttcacaggttgccagaacaatgtttgagtgtgcatttgatctgtttctgttccttagctatctggttggtgttggtgggcagaataaaactgaagctgttcccaatgattcaagacatattgggacaatggattgttctccattttgtaggaacctcaccaacctcaccaccaaccattgacgattttagctatcaactttcttctcttcagcttggtaaatcagatgaactgtctttgcacagaaagcttggctgctctgattttacattggcttctttacttgattttccaaaatctcctgaaggggacgttatgtcaccttgttttctcggtccagcggaaataataaatctagtaaggaggtttagtagtttgattatgcatggaggaaattttgaatgtgtacacactttcttgggatgcacaattaatctatcagctgttctcatcagacatagtcagtatgaagctgctcagaatctgctgggaattctggaaacatacttgaacaatggaaaagtatcgcatactggtcaagatgcagacactgcatgttcagcatatcttcatctcaatggattttgccttctgatgattgcacatgatgaagcaaatattattttgagagaatccaaggttcatgatgctatccgatgctttttcagggctgcatccgggtatgaagctccaaaggctttggagaacttttcattggaaacagggtttcaagtttctggggaatctagatctatttctttgtggagacttaactactatgagtgggcaatgcaaatttttgagcaacactccatgagcgagggggcgtaccaatttgctcttgctgcactagaactagttcttctcgacgggatagataatggaattgaagctgagggtctccagaga

SEQ ID NO: 49481 - DNA, 3054 bp, Zea Mays
ggccgccggcgtagccgacgacgccgacgacgaggcagccatggccgcccccgccgcccggagaatagttggcgctgaggttcccatacccggctcggacaagctgcggtggatcgacctcaccatcccctcgtcctccgccgctgcgccggcgagcccctccgatcccttcgtctgcgtgcccccgcgtgctgcctcggggtgccacatcatcccttcgggcgattctcagtattacctctcgtggaggattcacgaggaacacccaaatgtgctggaggtcattgaacttagtccctccaaggagttccctagctttggactgcgtcttgccttccaggaggcgctatctccattcgcctttctatgtgaacgagagggtcgcaggcaaggggagcttgtatatatgctatatgtgcttaccgtttctggagttgctcttttgtgccacctacgcagcccattttcctacgtatctggttcagtgctgcatcaggatgatatagctgagtttaatctccaaactcaagctcagagcgcaaaggttacagcggtaacagcgaagccaggatgtattgtgattggtcggcaagatgggtccatctgttcttacagtcttggcaaattagccccaaactcaccaggtttctcgaatgaactacgagatgatgctgggattggacgtttatggactctcatgtcaagaacaaagactgtgggtcctgtgcaggacatagtagcaactgttgtaaatgaaagggacctgttatttgttcttcatttggatggacacttgcgcatatgggataatcacatgaaacttctcaactataatgtccactcaaatgacattgaaggccatccgtccaggctatgggttggtaaggctgatgatgatcaggagttgatatctttggcgattctgcatcaaaacactgtggttgtgattatgttgctgtatatggcttcggtttttctgctgcggaaaggttcatgttctcttctgaaccttcaatttctactatacctttgctagaggggaagcttgcggacttgaaaatagccacatataagctttggatacttaaagaatttggctccatgctctatgaaatattacagtatgacattgacaccgaaactgcaaaatgttgtagtgagaaggtttgctgttatgtgctacaagaagatgctatcagtgaacagttgtttcaaagttctgacaatgcattggatgatttggtttggacagctgattcaatgttctcctccttgaaggaacaggcttttactttgatttcatccatgtttctgcggaggctacttcaaccaggagtaaaccactgttctgccctacgtgaaaccttactagagcataaaaggttcctatcagattctgagttccagtcacttacagcaaatgggctacgaaaagagatattatctattatagaacaagagggaagttcacagacagcaagtgctacagcttatcactggaaacaattctctgcacggtacctccacaattggtgctggcacaataagccctatggattgtttcttgatactacaaatgaagtgtttggtttagtaagaaagggttcattttctctattccgttgtttggagggtctggagatgcttatttatggttatgaccatggggtgaacttactcgacgatgtgtctgattttgaactcctcaatgaggtcctcagatgcatgggcaatatacaccatttgctggggagatcttccacagcagcatattatgaatccttaattagttctattatatcatctgatgaaattgtttcacatatagtaaagattctagagactggttttagtcatcagtcatcctcatccctcagtacattactaggaatggatacttatgtagaaagaaggcaggcagctcacaaaagtcaaaggaagttttctgttgagatgttacgatcttttcatacgttgcaatcaagatcagcatcctggtcggcagtattcgatgtgattgagaagtttatgaagtgtttgaacacaaacatgaacgtacaatcgtatggatcaaagagagtttgtaatgtaaattctgtgttactagttcaagctacttcacaggttgccagaacaatgtttgagtgtgcatttgatctgtttctgttccttagctatctggttggtgttggtgggcaggtttctttgttgcaaaatgatgttgccagaataaaactgaagctgttcccaatgattcaagacatattgggacaatggattgttctccattttgtaggaacctcaccaacctcaccaccaaccattgacgattttagctatcaactttcttctcttcagcttggtaaatcagatgaactgtctttgcacagaaagcttggctgctctgattttacattggcttctttacttgattttccaaaatctcctgaaggggacgttatgtcaccttgttttctcggtccagcggaaataataaatctagtaaggaggtttagtagtttgattatgcatggaggaaattttgaatgtgtacacactttcttgggatgcacaattaatctatcagctgttctcatcagacatagtcagtatgaagctgctcagaatctgctgggaattctggaaacatacttgaacaatggaaaagtatcgcatactggtcaagatgcagacactgcatgttcagcatatcttcatctcaatggattttgccttctgatgattgcacatgatgaagcaaatattattttgagagaatccaaggttcatgatgctatccgatgctttttcagggctgcatccgggtatgaagctccaaaggctttggagaacttttcattggaaacagggtttcaagtttctggggaatctagatctatttctttgtggagacttaactactatgagtgggcaatgcaaatttttgagcaacactccatgagcgagggggcgtaccaatttgctcttgctgcactagaactagttcttctcgacgggatagataatggaattgaagctgagggtctccagaga

SEQ ID NO: 49482 - DNA, 3057 bp, Zea Mays
ccggcgtagccgacgacgccgacgacgaggcagccatggccgcccccgccgcccggagaatagttggcgctgaggttcccatacccggctcggacaagctgcggtggatcgacctcaccatcccctcgtcctccgccgctgcgccggcgagcccctccgatcccttcgtctgcgtgcccccgcgtgctgcctcggggtgccacatcatcccttcgggcgattctcagtattacctctcgtggaggattcacgaggaacacccaaatgtgctggaggtcattgaacttagtccctccaaggagttccctagctttggactgcgtcttgccttccaggaggcgctatctccattcgcctttctatgtgaacgagagggtcgcaggcaaggggagcttgtatatatgctatatgtgcttaccgtttctggagttgctcttttgtgccacctacgcagcccattttcctacgtatctggttcagtgctgcatcaggatgatatagctgagtttaatctccaaactcaagctcagagcgcaaaggttacagcggtaacagcgaagccaggatgtattgtgattggtcggcaagatgggtccatctgttcttacagtcttggcaaattagccccaaactcaccaggtttctcgaatgaactacgagatgatgctgggattggacgtttatggactctcatgtcaagaacaaagactgtgggtcctgtgcaggacatagtagcaactgttgtaaatgaaagggacctgttatttgttcttcatttggatggacacttgcgcatatgggataatcacatgaaacttctcaactataatgtccactcaaatgacattgaaggccatccgtccaggctatgggttggtaaggctgatgatgatcaggagttgatatctttggcgattctgcatcaaaacactgtggttcaaggttgtgattatgttgctgtatatggcttcggtttttctgctgcggaaaggttcatgttctcttctgaaccttcaatttctactatacctttgctagaggggaagcttgcggacttgaaaatagccacatataagctttggatacttaaagaatttggctccatgctctatgaaatattacagtatgacattgacaccgaaactgcaaaatgttgtagtgagaaggtttgctgttatgtgctacaagaagatgctatcagtgaacagttgtttcaaagttctgacaatgcattggatgatttggtttggacagctgattcaatgttctcctccttgaaggaacaggcttttactttgatttcatccatgtttctgcggaggctacttcaaccaggagtaaaccactgttctgccctacgtgaaaccttactagagcataaaaggttcctatcagattctgagttccagtcacttacagcaaatgggctacgaaaagagatattatctattatagaacaagagggaagttcacagacagcaagtgctacagcttatcactggaaacaattctctgcacggtacctccacaattggtgctggcacaataagccctatggattgtttcttgatactacaaatgaagtgtttggtttagtaagaaagggttcattttctctattccgttgtttggagggtctggagatgcttatttatggttatgaccatggggtgaacttactcgacgatgtgtctgattttgaactcctcaatgaggtcctcagatgcatgggcaatatacaccatttgctggggagatcttccacagcagcatattatgaatccttaattagttctattatatcatctgatgaaattgtttcacatatagtaaagattctagagactggttttagtcatcagtcatcctcatccctcagtacattactaggaatggatacttatgtagaaagaaggcaggcagctcacaaaagtcaaaggaagttttctgttgagatgttacgatcttttcatacgttgcaatcaagatcagcatcctggtcggcagtattcgatgtgattgagaagtttatgaagtgtttgaacacaaacatgaacgtacaatcgtatggatcaaagagagtttgtaatgtaaattctgtgttactagttcaagctacttcacaggttgccagaacaatgtttgagtgtgcatttgatctgtttctgttccttagctatctggttggtgttggtgggcaggtttctttgttgcaaaatgatgttgccagaataaaactgaagctgttcccaatgattcaagacatattgggacaatggattgttctccattttgtaggaacctcaccaacctcaccaccaaccattgacgattttagctatcaactttcttctcttcagcttggtaaatcagatgaactgtctttgcacagaaagcttggctgctctgattttacattggcttctttacttgattttccaaaatctcctgaaggggacgttatgtcaccttgttttctcggtccagcggaaataataaatctagtaaggaggtttagtagtttgattatgcatggaggaaattttgaatgtgtacacactttcttgggatgcacaattaatctatcagctgttctcatcagacatagtcagtatgaagctgctcagaatctgctgggaattctggaaacatacttgaacaatggaaaagtatcgcatactggtcaagatgcagacactgcatgttcagcatatcttcatctcaatggattttgccttctgatgattgcacatgatgaagcaaatattattttgagagaatccaaggttcatgatgctatccgatgctttttcagggctgcatccgggtatgaagctccaaaggctttggagaacttttcattggaaacagggtttcaagtttctgggggaatctagatctatttctttgtggagacttaactactatgagtgggcaatgcaaatttttgagcaacactccatgagcgagggggcgtaccaatttgctcttgctgcactagaactagttcttctcgacgggatagataatggaattgaagctgagggtctccagaga

SEQ ID NO: 49483 - DNA, 2655 bp, Zea Mays
acatctttagtgttttgaggtggccgtagtgccaaggcgggaataagttgcttggcaggcaggtgattttgtaagtattatagtggtcatgacacatgtttgcagccatacataggtatcataagacttatatcttggccgttgacatgatctaccgcatttgattttgttttacatttttgctatccttacattgtggaaatggagaagggcagacttcagtggtgagagctgtctcaccgagtcaccaggttgctggttcgaagcaacctctccgcatttgtggtggaaggcttgcctcagtttattactttcccagaccccactcacatgggagcctctggcacgtggtctgcctcttttttacattgtggaaaatgtgggttcatgcagtgtgtgatgttgttcaacgtgttttctgctaattttgttaagagtcctacaagtgtgtgatgtgttagctatttgattattttcttttccattgtatatgcggtatgtcaactggtcaagctggctctaactactactactacctaaaaaatcatgactttggatgcatttgttgtgtttgggccttttttttcttgtcttttctttttattgtatcatttgtatgcaaggcatgttggccagtcttagcagcattttcctctaaacattgttagttaaactcctatgtatattgcagggcatgttgatcaatctagcagactttcctctaaatatattaacaattaactaggagtcatacaaatcaaatgctgtttgtgttatccagttgtttttctcatcattttatgcaagggatgctcactattagattggagcttaaatttgcctcttacctgtggaaataggttctttgtgacggagagattccattcactggcttggtagagaaagtggagcaagagctcttctggaaggctgagcgctcagatctgtcgtctagaccaaatctctataaggttctttattcatttgaagcacataggaacaaatggaggaaagcagctgcatacatgtacaggtactttgttagattgaatagagaagcttgttgatccctcatttgcatggctcgattctatttgtgaagccgatgataaaatttctccaagtaaaagaccccggaatcttttgatggagaactcggcttttggcacaaactcagaactttctagattgcaattttgtgttgacattgaaatccttgaaaaagaatacatattaacagaagcacagtatatgctcagcactttgaaatcaagttttgatttttcagaaagccaatctattgagtccctgatggatattcttataaatgagaaattgtatgatatagccttcacaattgtgctaaaattttggaaggagtcagaaataaaaaagcaattggaccgtgtattttcagtcattgcgcagcaatgctgctcgaacagatcagacaacaaatcaagtaaacaagtgccacttctgccttcttctgagaatgatgcatgggagatcaacaataggagtattgctgtgacccaacaattgcaggggagcaaccactgggaaacccttgaactatatttggataaatacaaagacctgcatcctaggttgccagtcattgttgctgagacgcttctttatactgatcctgagattgagctaccactttggttggttcagatgttcaaggctaataaggcagggaacaagatctcatggggcatgtctggaaaagaggcagatcctgctgctttattcagattgtacataaactacggacgccacgcagaagccaccaacctgctggtggagtatctagagtcgttcgcatcgtcgaggccagtggacgtcctccaccgcaagaagatgtccgccgtttggttcccctacaccgccgtcgagaggctctggtgccagcttggtgagatgcaacgggcagggcacagcgtggatcagtgcgaccggctcaagaagctgctgcacggagccctgatgagccacctgcagcaggtcgtggtcgactcggatgatgtgctgtcgtcagttggagatgggcaggggatggaggaccagagcagctgaagtcctgaagatcgtgttgttggcatgtgtagaaaacgatgtgccaccgctggatactgtatgtgattgtttgtgtggtcagctgaccaagagttacgcctgtgtcttttatatagaattattattagatgaaaacaaagacggagcgatggctccatttgtaacgtgagcatggaactgtcgctgatgacgagctgttcacttcccatgtgtagatgtagaaggtggattgacgcatccattacagcactgctgcactggtattgtatcggttctgccttcggggtgtgtaatggggttgttgcgatcgggttcagattagtgttgagcgtcgtggcattagggcatgtacaataccattcaatatatggtcttttaaggggtttctaaagagttaattaaaaaaatacaagagattacctctttatgaaaagcttgtttacacatgatttttaatacatattgtctgttaaaatgtttttaggagctctcctatctcatctcatcatttatttcaaacaaacttcactctgcaagcaatatcatctataatgtcgtgtcctatatttt

SEQ ID NO: 49484 - DNA, 1089 bp, Zea Mays
ctctaaacattgttagttaaactcctatgtatattgcagggcatgttgatcaatctagcagactttcctctaaatatattaacaattaactaggagtcatacaaatcaaatgctgtttgtgttatccagttgtttttctcatcattttatgcaagggatgctcactattagattggagcttaaatttgcctcttacctgtggaaataggttctttgtgacggagagattccattcactggcttggtagagaaagtggagcaagagctcttctggaaggctgagcgctcagatctgtcgtctagaccaaatctctataaggttctttattcatttgaagcacataggaacaaatggaggaaagcagctgcatacatgtacaggtactttgttagattgaatagagaaggtaatgcaggcggcagccaccaacttcctcacgtgttgcaagagaggttgcatgctttatctgctgctatcaacgcattgcagcttgttgatccctcatttgcatggctcgattctatttgtgaagccgatgataaaatttctccaagtaaaagaccccggaatcttttgatggagaactcggcttttggcacaaactcagaactttctagattgcaattttgtgttgacattgaaatccttgaaaaagaatacatattaacagaagcacagtatatgctcagcactttgaaatcaagttttgatttttcagaaagccaatctattgagtccctgatggatattcttataaatgagaaattgtatgatatagccttcacaattgtgctaaaattttggaaggagtcagaaataaaaaagcaattggaccgtgtattttcagtcattgcgcagcaatgctgctcgaacagatcagacaacaaatcaagtaaacaagtgccacttctgccttcttctgagaatgatgcatgggagatcaacaataggagtattgctgtgacccaacaattgcaggggagcaaccactgggaaacccttgaactatatttgctttcaagttggaaggcagacttattgacaaagctgagaaatgtcttctatgtgacaccctgagaaaagaggtc

SEQ ID NO: 49485 - DNA, 1050 bp, Zea Mays
ctctaaacattgttagttaaactcctatgtatattgcagggcatgttgatcaatctagcagactttcctctaaatatattaacaattaactaggagtcatacaaatcaaatgctgtttgtgttatccagttgtttttctcatcattttatgcaagggatgctcactattagattggagcttaaatttgcctcttacctgtggaaataggttctttgtgacggagagattccattcactggcttggtagagaaagtggagcaagagctcttctggaaggctgagcgctcagatctgtcgtctagaccaaatctctataaggttctttattcatttgaagcacataggaacaaatggaggaaagcagctgcatacatgtacaggtactttgttagattgaatagagaaggtaatgcaggcggcagccaccaacttcctcacgtgttgcaagagaggttgcatgctttatctgctgctatcaacgcattgcagcttgttgatccctcatttgcatggctcgattctatttgtgaagccgatgataaaatttctccaagtaaaagaccccggaatcttttgatggagaactcggcttttggcacaaactcagaactttctagattgcaattttgtgttgacattgaaatccttgaaaaagaatacatattaacagaagcacagtatatgctcagcactttgaaatcaagttttgatttttcagaaagccaatctattgagtccctgatggatattcttataaatgagaaattgtatgatatagccttcacaattgtgctaaaattttggaaggagtcagaaataaaaaagcaattggaccgtgtattttcagtcattgcgcagcaatgctgctcgaacagatcagacaacaaatcaagtaaacaagtgccacttctgccttcttctgagaatgatgcatgggagatcaacaataggagtattgctgtgacccaacaattgcaggggagcaaccactgggaaacccttgaactatatttggagagttgtgcatcattatattaagaagaaagtgg

SEQ ID NO: 49486 - DNA, 1960 bp, Zea Mays
ctctaaacattgttagttaaactcctatgtatattgcagggcatgttgatcaatctagcagactttcctctaaatatattaacaattaactaggagtcatacaaatcaaatgctgtttgtgttatccagttgtttttctcatcattttatgcaagggatgctcactattagattggagcttaaatttgcctcttacctgtggaaataggttctttgtgacggagagattccattcactggcttggtagagaaagtggagcaagagctcttctggaaggctgagcgctcagatctgtcgtctagaccaaatctctataaggttctttattcatttgaagcacataggaacaaatggaggaaagcagctgcatacatgtacaggtactttgttagattgaatagagaagccgatgataaaatttctccaagtaaaagaccccggaatcttttgatggagaactcggcttttggcacaaactcagaactttctagattgcaattttgtgttgacattgaaatccttgaaaaagaatacatattaacagaagcacagtatatgctcagcactttgaaatcaagttttgatttttcagaaagccaatctattgagtccctgatggatattcttataaatgagaaattgtatgatatagccttcacaattgtgctaaaattttggaaggagtcagaaataaaaaagcaattggaccgtgtattttcagtcattgcgcagcaatgctgctcgaacagatcagacaacaaatcaagtaaacaagtgccacttctgccttcttctgagaatgatgcatgggagatcaacaataggagtattgctgtgacccaacaattgcaggggagcaaccactgggaaacccttgaactatatttggataaatacaaagacctgcatcctaggttgccagtcattgttgctgagacgcttctttatactgatcctgagattgagctaccactttggttggttcagatgttcaaggctaataaggcagggaacaagatctcatggggcatgtctggaaaagaggcagatcctgctgctttattcagattgtacataaactacggacgccacgcagaagccaccaacctgctggtggagtatctagagtcgttcgcatcgtcgaggccagtggacgtcctccaccgcaagaagatgtccgccgtttggttcccctacaccgccgtcgagaggctctggtgccagcttggtgagatgcaacgggcagggcacagcgtggatcagtgcgaccggctcaagaagctgctgcacggagccctgatgagccacctgcagcaggtcgtggtcgactcggatgatgtgctgtcgtcagttggagatgggcaggggatggaggaccagagcagctgaagtcctgaagatcgtgttgttggcatgtgtagaaaacgatgtgccaccgctggatactgtatgtgattgtttgtgtggtcagctgaccaagagttacgcctgtgtcttttatatagaattattattagatgaaaacaaagacggagcgatggctccatttgtaacgtgagcatggaactgtcgctgatgacgagctgttcacttcccatgtgtagatgtagaaggtggattgacgcatccattacagcactgctgcactggtattgtatcggttctgccttcggggtgtgtaatggggttgttgcgatcgggttcagattagtgttgagcgtcgtggcattagggcatgtacaataccattcaatatatggtcttttaaggggtttctaaagagttaattaaaaaaatacaagagattacctctttatgaaaagcttgtttacacatgatttttaatacatattgtctgttaaaatgtttttaggagctctcctatctcatctcatcatttatttcaaacaaacttcactctgcaagcaatatcatctataatgtcgtgtcctatatttt

SEQ ID NO: 49487 - DNA, 1871 bp, Zea Mays
atgctgtttgtgttatccagttgtttttctcatcattttatgcaagggatgctcactattagattggagcttaaatttgcctcttacctgtggaaataggttctttgtgacggagagattccattcactggcttggtagagaaagtggagcaagagctcttctggaaggctgagcgctcagatctgtcgtctagaccaaatctctataaggttctttattcatttgaagcacataggaacaaatggaggaaagcagctgcatacatgtacaggtactttgttagattgaatagagaaggtaatgcaggcggcagccaccaacttcctcacgtgttgcaagagaggttgcatgctttatctgctgctatcaacgcattgcagcttgttgatccctcatttgcatggctcgattctatttgtgaagccgatgataaaatttctccaagtaaaagaccccggaatcttttgatggagaactcggcttttggcacaaactcagaactttctagattgcaattttgtgttgacattgaaatccttgaaaaagaatacatattaacagaagcacagtatatgctcagcactttgaaatcaagttttgatttttcaggcaattggaccgtgtattttcagtcattgcgcagcaatgctgctcgaacagatcagacaacaaatcaagtaaacaagtgccacttctgccttcttctgagaatgatgcatgggagatcaacaataggagtattgctgtgacccaacaattgcaggggagcaaccactgggaaacccttgaactatatttggataaatacaaagacctgcatcctaggttgccagtcattgttgctgagacgcttctttatactgatcctgagattgagctaccactttggttggttcagatgttcaaggctaataaggcagggaacaagatctcatggggcatgtctggaaaagaggcagatcctgctgctttattcagattgtacataaactacggacgccacgcagaagccaccaacctgctggtggagtatctagagtcgttcgcatcgtcgaggccagtggacgtcctccaccgcaagaagatgtccgccgtttggttcccctacaccgccgtcgagaggctctggtgccagcttggtgagatgcaacgggcagggcacagcgtggatcagtgcgaccggctcaagaagctgctgcacggagccctgatgagccacctgcagcaggtcgtggtcgactcggatgatgtgctgtcgtcagttggagatgggcaggggatggaggaccagagcagctgaagtcctgaagatcgtgttgttggcatgtgtagaaaacgatgtgccaccgctggatactgtatgtgattgtttgtgtggtcagctgaccaagagttacgcctgtgtcttttatatagaattattattagatgaaaacaaagacggagcgatggctccatttgtaacgtgagcatggaactgtcgctgatgacgagctgttcacttcccatgtgtagatgtagaaggtggattgacgcatccattacagcactgctgcactggtattgtatcggttctgccttcggggtgtgtaatggggttgttgcgatcgggttcagattagtgttgagcgtcgtggcattagggcatgtacaataccattcaatatatggtcttttaaggggtttctaaagagttaattaaaaaaatacaagagattacctctttatgaaaagcttgtttacacatgatttttaatacatattgtctgttaaaatgtttttaggagctctcctatctcatctcatcatttatttcaaacaaacttcactctgcaagcaatatcatctataatgtcgtgtcctatatttt

SEQ ID NO: 49488 - DNA, 3875 bp, Zea Mays
cacatatctagcgccggctaccctacgactgacaggtggcgacatttggttcgcacgcggacgcggcacgcctccggctcccctctcgaaattcggttccgattcggttcccacaccagaccgaaccaaatacgcgctctcgtgctcgtgcgcgcgcgtcgcctcccaccccttcgtccgccgttgccgcccgcactctcccttccgccgtcgtgggcgcgcggcgacggggagagaggcaggtgaggtcggaagcggcggcggaggcgggcccccctccgtctactcttactcacgcacaccacggcgcccgcgagctagcgccctagcggagcggaggtcgaggcgggagaaaggcggttggggctccccggtgggcaggggggggggggggggggtcggaggcggggatggggctcgacggcacggtctcgggggtggtgtcgaggaaggtgctgccggcgtgtggtgggctctgctgcctctgcccttcgctgcgtccccgctccaggcagcccgtcaagcgctacaagaagatcctcatcgacatctttcccgcggagcaggaagacggaccaaatgtgaggaggattgggaggctttgcgagtatgttgctagaaatcctcatcgcgtgccaaagatcacagcttacttggagaggaggtgttacagggagttgagaaatgagcagtatgacattgtgaaagttgttgtgctaatataccgcaggctattggtctcttgtaatgaacaaatgccgttactggcaaatagtttattaagcatcatacaaacacttttggatcaatcaaggcaggatgacatgtgcatcattggctgtgaaaccttgtttgatttcatagtcactcaggtggatggtacatatcagttcaatttggaagagtttattccaagactctgcaaactttctcaaatagtaagggacaaagagaaggctaatgcactccgtgcagcagctctgcaatcactctctgctatgatctggtttatgggtgagctctctcatatctcctcagagtttgatagcgttgtccaagtagtattggaaagctatgagcctcgacaggtgcaaagtgacaatagtgccactgaaaatccaggttgtcagttggttgaagaggtccttaaacccgagggtcatgcctctccatcgacatttatattttctgtgataccttcttgggacagcatagttagtgactatggaggaattcaactgcttatggatgatgccaaggatccttatttttggtcaagggtctgtgtgcataacatggccaagctgtccagggaagcaactacattccgccgtgttatggagtccctattttgccacttcgataatactaattcatggtcatccaaaaatggtcttgcactttgtgttctattggacatgcaaatgttcatggaaaagtcagggacaaacattaatttgatgatatcagtactagttaagcatctcgaacacaaggccatactgaaacaacctgagatgcaactcagcattgtcgaagtgataactgctcttgcagaacaatcaagagctcaggcttcagcagcaaccatagttgctataagtgaccttgtgaggcatatgaaaaagacactgcatttagctcttggcagcaacgatttggaggtggtaaagtggaatgacaaactccgcatggcttttgatgaatgcatagtccagctgtcaaagaaggtaggtgatgctggaccagttcttgacatgatgtctgtgatgctagagaacatatcacacactcctcttattgctatagcaactacttctgctgtttatcgcacagctcaaataattgcttcaataccaaatttgtcatataagaacaaggtatttccagaagcactttttcatcaattgctgttagcgatggttcaccctgatcatgaaacacgtgttggtgcacaccgcatattttctgttgtccttgtcccatcttctgtttctccttttcccaatttgaaatccctagatcagtgtagaaagcatgatgtccagaggacactctcgagggttgtatctgtcttctcatcttcagctgctttatttgataagctgagaagggacagaaactcctttagagaatatttacatgaaggaagcatgaacagaattttgcatggtattgatgatgaaattgctacccctaatgacttgccaggctcgcaaagcttgagacaaagcctcagactttcttcagtgtctcacaaacattcttatacttctttaaaggaaggtcaaagtcccttgacagagtcaatcaacgaaatggaaacaattgtgttaagactaagcagccagcaggccactcttctgctctcatctatttggcgtcaagcactttctccaaaaaatgctcctcaaaactacgaagctattgctcatacatatagtttgcttctattgtttttgggatcaaagacaccaatttttgaggttcttgctcccagctttcagattgcattttctttaatgagccattcacttggaggaacagattcattgccaccatctcgccgccggtcattatttactctggctacatctatgattgtttttgcctcaagagctttcaatgtggcacctcttctcccaatttgtaaattaatgctcaatgatggaacgatggatccattccttcatctggtacatgagaacaaacttcaggctgtgaaggactatacggaagatccatcaacatcctatggctcacccgaggacaatcagaatgccttgaaatctctttcagtggtggaactaacaaatagttgctcccgagaatccatgattttaaccattatgaactccataagagatttaccagacttggagttagagaatataaggagtcaactgctgcgtgatttctcccctgatgacgtgtgcccaagtagcgctcactttcttgaatcacctggcaagattgcaccgccatgttctgatgatgacaccgactacgactatcaagaggtacacggaaattttgagcaggctgaacttatcgatctgagaaatgacaacaatacttatttggaagcctctgcaactacactggcggctatagctattcctgtgcccacaacaaatcttctcagtatcgatgaacttctagaaacagtcgtgaatgatgtgtcatctcagaccggagggcaatgtttggtgtcaatggccggagacatcccattccaggagatgactagccactgtgaggccttttcgatgggaaagcaccacaagatgtccctgctcatgagcttcaagcaaaacaagcaagcggccatggtcgtcgtgcctgacaatcaggttagccacgctgaagcagcacatacctccgacaagcagagcacaaacccgttcctcctgcagagcatcagtgccggcgaggcacaggttgctggcgacgtccagcagccgttcctgaggctgccaccgtcgagcccctacgacaacttcctcaaggctgctggctgctgatttccacttgcagaaaccctgccgtgtaaccaaccgaatgtatcgtgtgtgtacagtggccgtctgcctcaatcttattacaaactaaacaagggtttggatattacatgctgacttgttttcggatcatgccagggtcaatccaaaattcatttaattgtaggattccaaagcaaagggaatgatagatatataaggagaaaatgttgaaatctaacttagatcgtctccaacggcttatctatatggccgtactaacactgttttacattgtatactgtatcgttggtagagtgaaggttaaatataagaataaagaagatagtggtagtgtgagatcagttgtttttc

SEQ ID NO: 49489 - DNA, 3767 bp, Zea Mays
gcctccggctcccctctcgaaattcggttccgattcggttcccacaccagaccgaaccaaatacgcgctctcgtgctcgtgcgcgcgcgtcgcctcccaccccttcgtccgccgttgccgcccgcactctcccttccgccgtcgtgggcgcgcggcgacggggagagaggcaggtgaggtcggaagcggcggcggaggcgggcccccctccgtctactcttactcacgcacaccacggcgcccgcgagctagcgccctagcggagcggaggtcgaggcgggagaaaggcggttggggctccccggtgggcaggggggggggggggggggtcggaggcggggatggggctcgacggcacggtctcgggggtggtgtcgaggaaggtgctgccggcgtgtggtgggctctgctgcctctgcccttcgctgcgtccccgctccaggcagcccgtcaagcgctacaagaagatcctcatcgacatctttcccgcggagcaggaagacggaccaaatgtgaggaggattgggaggctttgcgagtatgttgctagaaatcctcatcgcgtgccaaagatcacagcttacttggagaggaggtgttacagggagttgagaaatgagcagtatgacattgtgaaagttgttgtgctaatataccgcaggctattggtctcttgtaatgaacaaatgccgttactggcaaatagtttattaagcatcatacaaacacttttggatcaatcaaggcaggatgacatgtgcatcattggctgtgaaaccttgtttgatttcatagtcactcaggtggatggtacatatcagttcaatttggaagagtttattccaagactctgcaaactttctcaaatagtaagggacaaagagaaggctaatgcactccgtgcagcagctctgcaatcactctctgctatgatctggtttatgggtgagctctctcatatctcctcagagtttgatagcgttgtccaagtagtattggaaagctatgagcctcgacaggtgcaaagtgacaatagtgccactgaaaatccaggttgtcagttggttgaagaggtccttaaacccgagggtcatgcctctccatcgacatttatattttctgtgataccttcttgggacagcatagttagtgactatggaggaattcaactgcttatggatgatgccaaggatccttatttttggtcaagggtctgtgtgcataacatggccaagctgtccagggaagcaactacattccgccgtgttatggagtccctattttgccacttcgataatactaattcatggtcatccaaaaatggtcttgcactttgtgttctattggacatgcaaatgttcatggaaaagtcagggacaaacattaatttgatgatatcagtactagttaagcatctcgaacacaaggccatactgaaacaacctgagatgcaactcagcattgtcgaagtgataactgctcttgcagaacaatcaagagctcaggcttcagcagcaaccatagttgctataagtgaccttgtgaggcatatgaaaaagacactgcatttagctcttggcagcaacgatttggaggtggtaaagtggaatgacaaactccgcatggcttttgatgaatgcatagtccagctgtcaaagaaggtaggtgatgctggaccagttcttgacatgatgtctgtgatgctagagaacatatcacacactcctcttattgctatagcaactacttctgctgtttatcgcacagctcaaataattgcttcaataccaaatttgtcatataagaacaaggtatttccagaagcactttttcatcaattgctgttagcgatggttcaccctgatcatgaaacacgtgttggtgcacaccgcatattttctgttgtccttgtcccatcttctgtttctccttttcccaatttgaaatccctagatcagtgtagaaagcatgatgtccagaggacactctcgagggttgtatctgtcttctcatcttcagctgctttatttgataagctgagaagggacagaaactcctttagagaatatttacatgaaggaagcatgaacagaattttgcatggtattgatgatgaaattgctacccctaatgacttgccaggctcgcaaagcttgagacaaagcctcagactttcttcagtgtctcacaaacattcttatacttctttaaaggaaggtcaaagtcccttgacagagtcaatcaacgaaatggaaacaattgtgttaagactaagcagccagcaggccactcttctgctctcatctatttggcgtcaagcactttctccaaaaaatgctcctcaaaactacgaagctattgctcatacatatagtttgcttctattgtttttgggatcaaagacaccaatttttgaggttcttgctcccagctttcagattgcattttctttaatgagccattcacttggaggaacagattcattgccaccatctcgccgccggtcattatttactctggctacatctatgattgtttttgcctcaagagctttcaatgtggcacctcttctcccaatttgtaaattaatgctcaatgatggaacgatggatccattccttcatctggtacatgagaacaaacttcaggctgtgaaggactatacggaagatccatcaacatcctatggctcacccgaggacaatcagaatgccttgaaatctctttcagtggtggaactaacaaatagttgctcccgagaatccatgattttaaccattatgaactccataagagatttaccagacttggagttagagaatataaggagtcaactgctgcgtgatttctcccctgatgacgtgtgcccaagtagcgctcactttcttgaatcacctggcaagattgcaccgccatgttctgatgatgacaccgactacgactatcaagaggtacacggaaattttgagcaggctgaacttatcgatctgagaaatgacaacaatacttatttggaagcctctgcaactacactggcggctatagctattcctgtgcccacaacaaatcttctcagtatcgatgaacttctagaaacagtcgtgaatgatgtgtcatctcagaccggagggcaatgtttggtgtcaatggccggagacatcccattccaggagatgactagccactgtgaggccttttcgatgggaaagcaccacaagatgtccctgctcatgagcttcaagcaaaacaagcaagcggccatggtcgtcgtgcctgacaatcagagcacaaacccgttcctcctgcagagcatcagtgccggcgaggcacaggttgctggcgacgtccagcagccgttcctgaggctgccaccgtcgagcccctacgacaacttcctcaaggctgctggctgctgatttccacttgcagaaaccctgccgtgtaaccaaccgaatgtatcgtgtgtgtacagtggccgtctgcctcaatcttattacaaactaaacaagggtttggatattacatgctgacttgttttcggatcatgccagggtcaatccaaaattcatttaattgtaggattccaaagcaaagggaatgatagatatataaggagaaaatgttgaaatctaacttagatcgtctccaacggcttatctatatggccgtactaacactgttttacattgtatactgtatcgttggtagagtgaaggttaaatataagaataaagaagatagtggtagtgtgagatcagttgtttttc

SEQ ID NO: 49490 - DNA, 3771 bp, Zea Mays
cccacaccagaccgaaccaaatacgcgctctcgtgctcgtgcgcgcgcgtcgcctcccaccccttcgtccgccgttgccgcccgcactctcccttccgccgtcgtgggcgcgcggcgacggggagagaggcaggtgaggtcggaagcggcggcggaggcgggcccccctccgtctactcttactcacgcacaccacggcgcccgcgagctagcgccctagcggagcggaggtcgaggcgggagaaaggcggttggggctccccggtgggcaggggggggggggggggggtcggaggcggggatggggctcgacggcacggtctcgggggtggtgtcgaggaaggtgctgccggcgtgtggtgggctctgctgcctctgcccttcgctgcgtccccgctccaggcagcccgtcaagcgctacaagaagatcctcatcgacatctttcccgcggagcaggaagacggaccaaatgtgaggaggattgggaggctttgcgagtatgttgctagaaatcctcatcgcgtgccaaagatcacagcttacttggagaggaggtgttacagggagttgagaaatgagcagtatgacattgtgaaagttgttgtgctaatataccgcaggctattggtctcttgtaatgaacaaattgcaggccgttactggcaaatagtttattaagcatcatacaaacacttttggatcaatcaaggcaggatgacatgtgcatcattggctgtgaaaccttgtttgatttcatagtcactcaggtggatggtacatatcagttcaatttggaagagtttattccaagactctgcaaactttctcaaatagtaagggacaaagagaaggctaatgcactccgtgcagcagctctgcaatcactctctgctatgatctggtttatgggtgagctctctcatatctcctcagagtttgatagcgttgtccaagtagtattggaaagctatgagcctcgacaggtgcaaagtgacaatagtgccactgaaaatccaggttgtcagttggttgaagaggtccttaaacccgagggtcatgcctctccatcgacatttatattttctgtgataccttcttgggacagcatagttagtgactatggaggaattcaactgcttatggatgatgccaaggatccttatttttggtcaagggtctgtgtgcataacatggccaagctgtccagggaagcaactacattccgccgtgttatggagtccctattttgccacttcgataatactaattcatggtcatccaaaaatggtcttgcactttgtgttctattggacatgcaaatgttcatggaaaagtcagggacaaacattaatttgatgatatcagtactagttaagcatctcgaacacaaggccatactgaaacaacctgagatgcaactcagcattgtcgaagtgataactgctcttgcagaacaatcaagagctcaggcttcagcagcaaccatagttgctataagtgaccttgtgaggcatatgaaaaagacactgcatttagctcttggcagcaacgatttggaggtggtaaagtggaatgacaaactccgcatggcttttgatgaatgcatagtccagctgtcaaagaaggtaggtgatgctggaccagttcttgacatgatgtctgtgatgctagagaacatatcacacactcctcttattgctatagcaactacttctgctgtttatcgcacagctcaaataattgcttcaataccaaatttgtcatataagaacaaggtatttccagaagcactttttcatcaattgctgttagcgatggttcaccctgatcatgaaacacgtgttggtgcacaccgcatattttctgttgtccttgtcccatcttctgtttctccttttcccaatttgaaatccctagatcagtgtagaaagcatgatgtccagaggacactctcgagggttgtatctgtcttctcatcttcagctgctttatttgataagctgagaagggacagaaactcctttagagaatatttacatgaaggaagcatgaacagaattttgcatggtattgatgatgaaattgctacccctaatgacttgccaggctcgcaaagcttgagacaaagcctcagactttcttcagtgtctcacaaacattcttatacttctttaaaggaaggtcaaagtcccttgacagagtcaatcaacgaaatggaaacaattgtgttaagactaagcagccagcaggccactcttctgctctcatctatttggcgtcaagcactttctccaaaaaatgctcctcaaaactacgaagctattgctcatacatatagtttgcttctattgtttttgggatcaaagacaccaatttttgaggttcttgctcccagctttcagattgcattttctttaatgagccattcacttggaggaacagattcattgccaccatctcgccgccggtcattatttactctggctacatctatgattgtttttgcctcaagagctttcaatgtggcacctcttctcccaatttgtaaattaatgctcaatgatggaacgatggatccattccttcatctggtacatgagaacaaacttcaggctgtgaaggactatacggaagatccatcaacatcctatggctcacccgaggacaatcagaatgccttgaaatctctttcagtggtggaactaacaaatagttgctcccgagaatccatgattttaaccattatgaactccataagagatttaccagacttggagttagagaatataaggagtcaactgctgcgtgatttctcccctgatgacgtgtgcccaagtagcgctcactttcttgaatcacctggcaagattgcaccgccatgttctgatgatgacaccgactacgactatcaagaggtacacggaaattttgagcaggctgaacttatcgatctgagaaatgacaacaatacttatttggaagcctctgcaactacactggcggctatagctattcctgtgcccacaacaaatcttctcagtatcgatgaacttctagaaacagtcgtgaatgatgtgtcatctcagaccggagggcaatgtttggtgtcaatggccggagacatcccattccaggagatgactagccactgtgaggccttttcgatgggaaagcaccacaagatgtccctgctcatgagcttcaagcaaaacaagcaagcggccatggtcgtcgtgcctgacaatcaggttagccacgctgaagcagcacatacctccgacaagcagagcacaaacccgttcctcctgcagagcatcagtgccggcgaggcacaggttgctggcgacgtccagcagccgttcctgaggctgccaccgtcgagcccctacgacaacttcctcaaggctgctggctgctgatttccacttgcagaaaccctgccgtgtaaccaaccgaatgtatcgtgtgtgtacagtggccgtctgcctcaatcttattacaaactaaacaagggtttggatattacatgctgacttgttttcggatcatgccagggtcaatccaaaattcatttaattgtaggattccaaagcaaagggaatgatagatatataaggagaaaatgttgaaatctaacttagatcgtctccaacggcttatctatatggccgtactaacactgttttacattgtatactgtatcgttggtagagtgaaggttaaatataagaataaagaagatagtggtagtgtgagatcagttgtttttc

SEQ ID NO: 49491 - DNA, 3380 bp, Zea Mays
ccaaatacgcgctctcgtgctcgtgcgcgcgcgtcgcctcccaccccttcgtccgccgttgccgcccgcactctcccttccgccgtcgtgggcgcgcggcgacggggagagaggcaggtgaggtcggaagcggcggcggaggcgggcccccctccgtctactcttactcacgcacaccacggcgcccgcgagctagcgccctagcggagcggaggtcgaggcgggagaaaggcggttggggctccccggtgggcaggggggggggggggggggtcggaggcggggatggggctcgacggcacggtctcgggggtggtgtcgaggaaggtgctgccggcgtgtggtgggctctgctgcctctgcccttcgctgcgtccccgctccaggcagcccgtcaagcgctacaagaagatcctcatcgacatctttcccgcggagcaggaagacggaccaaatgtgaggaggattgggaggctttgcgagtatgttgctagaaatcctcatcgcgtgccaaagatcacagcttacttggagaggaggtgttacagggagttgagaaatgagcagtatgacattgtgaaagttgttgtgctaatataccgcaggctattggtctcttgtaatgaacaaatgccgttactggcaaatagtttattaagcatcatacaaacacttttggatcaatcaaggcaggatgacatgtgcatcattggctgtgaaaccttgtttgatttcatagtcactcaggtggatggtacatatcagttcaatttggaagagtttattccaagactctgcaaactttctcaaatagtaagggacaaagagaaggctaatgcactccgtgcagcagctctgcaatcactctctgctatgatctggtttatgggtgagctctctcatatctcctcagagtttgatagcgttgtccaagtagtattggaaagctatgagcctcgacaggtgcaaagtgacaatagtgccactgaaaatccaggttgtcagttggttgaagaggtccttaaacccgagggtcatgcctctccatcgacatttatattttctgtgataccttcttgggacagcatagttagtgactatggaggaattcaactgcttatggatgatgccaaggatccttatttttggtcaagggtctgtgtgcataacatggccaagctgtccagggaagcaactacattccgccgtgttatggagtccctattttgccacttcgataatactaattcatggtcatccaaaaatggtcttgcactttgtgttctattggacatgcaaatgttcatggaaaagtcagggacaaacattaatttgatgatatcagtactagttaagcatctcgaacacaaggccatactgaaacaacctgagatgcaactcagcattgtcgaagtgataactgctcttgcagaacaatcaagagctcaggcttcagcagcaaccatagttgctataagtgaccttgtgaggcatatgaaaaagacactgcatttagctcttggcagcaacgatttggaggtggtaaagtggaatgacaaactccgcatggcttttgatgaatgcatagtccagctgtcaaagaaggtaggtgatgctggaccagttcttgacatgatgtctgtgatgctagagaacatatcacacactcctcttattgctatagcaactacttctgctgtttatcgcacagctcaaataattgcttcaataccaaatttgtcatataagaacaaggctcgcaaagcttgagacaaagcctcagactttcttcagtgtctcacaaacattcttatacttctttaaaggaaggtcaaagtcccttgacagagtcaatcaacgaaatggaaacaattgtgttaagactaagcagccagcaggccactcttctgctctcatctatttggcgtcaagcactttctccaaaaaatgctcctcaaaactacgaagctattgctcatacatatagtttgcttctattgtttttgggatcaaagacaccaatttttgaggttcttgctcccagctttcagattgcattttctttaatgagccattcacttggaggaacagattcattgccaccatctcgccgccggtcattatttactctggctacatctatgattgtttttgcctcaagagctttcaatgtggcacctcttctcccaatttgtaaattaatgctcaatgatggaacgatggatccattccttcatctggtacatgagaacaaacttcaggctgtgaaggactatacggaagatccatcaacatcctatggctcacccgaggacaatcagaatgccttgaaatctctttcagtggtggaactaacaaatagttgctcccgagaatccatgattttaaccattatgaactccataagagatttaccagacttggagttagagaatataaggagtcaactgctgcgtgatttctcccctgatgacgtgtgcccaagtagcgctcactttcttgaatcacctggcaagattgcaccgccatgttctgatgatgacaccgactacgactatcaagaggtacacggaaattttgagcaggctgaacttatcgatctgagaaatgacaacaatacttatttggaagcctctgcaactacactggcggctatagctattcctgtgcccacaacaaatcttctcagtatcgatgaacttctagaaacagtcgtgaatgatgtgtcatctcagaccggagggcaatgtttggtgtcaatggccggagacatcccattccaggagatgactagccactgtgaggccttttcgatgggaaagcaccacaagatgtccctgctcatgagcttcaagcaaaacaagcaagcggccatggtcgtcgtgcctgacaatcagagcacaaacccgttcctcctgcagagcatcagtgccggcgaggcacaggttgctggcgacgtccagcagccgttcctgaggctgccaccgtcgagcccctacgacaacttcctcaaggctgctggctgctgatttccacttgcagaaaccctgccgtgtaaccaaccgaatgtatcgtgtgtgtacagtggccgtctgcctcaatcttattacaaactaaacaagggtttggatattacatgctgacttgttttcggatcatgccagggtcaatccaaaattcatttaattgtaggattccaaagcaaagggaatgatagatatataaggagaaaatgttgaaatctaacttagatcgtctccaacggcttatctatatggccgtactaacactgttttacattgtatactgtatcgttggtagagtgaaggttaaatataagaataaagaagatagtggtagtgtgagatcagttgtttttc

SEQ ID NO: 49492 - DNA, 3419 bp, Zea Mays
ccaaatacgcgctctcgtgctcgtgcgcgcgcgtcgcctcccaccccttcgtccgccgttgccgcccgcactctcccttccgccgtcgtgggcgcgcggcgacggggagagaggcaggtgaggtcggaagcggcggcggaggcgggcccccctccgtctactcttactcacgcacaccacggcgcccgcgagctagcgccctagcggagcggaggtcgaggcgggagaaaggcggttggggctccccggtgggcaggggggggggggggggggtcggaggcggggatggggctcgacggcacggtctcgggggtggtgtcgaggaaggtgctgccggcgtgtggtgggctctgctgcctctgcccttcgctgcgtccccgctccaggcagcccgtcaagcgctacaagaagatcctcatcgacatctttcccgcggagcaggaagacggaccaaatgtgaggaggattgggaggctttgcgagtatgttgctagaaatcctcatcgcgtgccaaagatcacagcttacttggagaggaggtgttacagggagttgagaaatgagcagtatgacattgtgaaagttgttgtgctaatataccgcaggctattggtctcttgtaatgaacaaatgccgttactggcaaatagtttattaagcatcatacaaacacttttggatcaatcaaggcaggatgacatgtgcatcattggctgtgaaaccttgtttgatttcatagtcactcaggtggatggtacatatcagttcaatttggaagagtttattccaagactctgcaaactttctcaaatagtaagggacaaagagaaggctaatgcactccgtgcagcagctctgcaatcactctctgctatgatctggtttatgggtgagctctctcatatctcctcagagtttgatagcgttgtccaagtagtattggaaagctatgagcctcgacaggtgcaaagtgacaatagtgccactgaaaatccaggttgtcagttggttgaagaggtccttaaacccgagggtcatgcctctccatcgacatttatattttctgtgataccttcttgggacagcatagttagtgactatggaggaattcaactgcttatggatgatgccaaggatccttatttttggtcaagggtctgtgtgcataacatggccaagctgtccagggaagcaactacattccgccgtgttatggagtccctattttgccacttcgataatactaattcatggtcatccaaaaatggtcttgcactttgtgttctattggacatgcaaatgttcatggaaaagtcagggacaaacattaatttgatgatatcagtactagttaagcatctcgaacacaaggccatactgaaacaacctgagatgcaactcagcattgtcgaagtgataactgctcttgcagaacaatcaagagctcaggcttcagcagcaaccatagttgctataagtgaccttgtgaggcatatgaaaaagacactgcatttagctcttggcagcaacgatttggaggtggtaaagtggaatgacaaactccgcatggcttttgatgaatgcatagtccagctgtcaaagaaggtaggtgatgctggaccagttcttgacatgatgtctgtgatgctagagaacatatcacacactcctcttattgctatagcaactacttctgctgtttatcgcacagctcaaataattgcttcaataccaaatttgtcatataagaacaaggctcgcaaagcttgagacaaagcctcagactttcttcagtgtctcacaaacattcttatacttctttaaaggaaggtcaaagtcccttgacagagtcaatcaacgaaatggaaacaattgtgttaagactaagcagccagcaggccactcttctgctctcatctatttggcgtcaagcactttctccaaaaaatgctcctcaaaactacgaagctattgctcatacatatagtttgcttctattgtttttgggatcaaagacaccaatttttgaggttcttgctcccagctttcagattgcattttctttaatgagccattcacttggaggaacagattcattgccaccatctcgccgccggtcattatttactctggctacatctatgattgtttttgcctcaagagctttcaatgtggcacctcttctcccaatttgtaaattaatgctcaatgatggaacgatggatccattccttcatctggtacatgagaacaaacttcaggctgtgaaggactatacggaagatccatcaacatcctatggctcacccgaggacaatcagaatgccttgaaatctctttcagtggtggaactaacaaatagttgctcccgagaatccatgattttaaccattatgaactccataagagatttaccagacttggagttagagaatataaggagtcaactgctgcgtgatttctcccctgatgacgtgtgcccaagtagcgctcactttcttgaatcacctggcaagattgcaccgccatgttctgatgatgacaccgactacgactatcaagaggtacacggaaattttgagcaggctgaacttatcgatctgagaaatgacaacaatacttatttggaagcctctgcaactacactggcggctatagctattcctgtgcccacaacaaatcttctcagtatcgatgaacttctagaaacagtcgtgaatgatgtgtcatctcagaccggagggcaatgtttggtgtcaatggccggagacatcccattccaggagatgactagccactgtgaggccttttcgatgggaaagcaccacaagatgtccctgctcatgagcttcaagcaaaacaagcaagcggccatggtcgtcgtgcctgacaatcaggttagccacgctgaagcagcacatacctccgacaagcagagcacaaacccgttcctcctgcagagcatcagtgccggcgaggcacaggttgctggcgacgtccagcagccgttcctgaggctgccaccgtcgagcccctacgacaacttcctcaaggctgctggctgctgatttccacttgcagaaaccctgccgtgtaaccaaccgaatgtatcgtgtgtgtacagtggccgtctgcctcaatcttattacaaactaaacaagggtttggatattacatgctgacttgttttcggatcatgccagggtcaatccaaaattcatttaattgtaggattccaaagcaaagggaatgatagatatataaggagaaaatgttgaaatctaacttagatcgtctccaacggcttatctatatggccgtactaacactgttttacattgtatactgtatcgttggtagagtgaaggttaaatataagaataaagaagatagtggtagtgtgagatcagttgtttttc

SEQ ID NO: 49493 - DNA, 3450 bp, Zea Mays
ccaaatacgcgctctcgtgctcgtgcgcgcgcgtcgcctcccaccccttcgtccgccgttgccgcccgcactctcccttccgccgtcgtgggcgcgcggcgacggggagagaggcaggtgaggtcggaagcggcggcggaggcgggcccccctccgtctactcttactcacgcacaccacggcgcccgcgagctagcgccctagcggagcggaggtcgaggcgggagaaaggcggttggggctccccggtgggcaggggggggggggggggggtcggaggcggggatggggctcgacggcacggtctcgggggtggtgtcgaggaaggtgctgccggcgtgtggtgggctctgctgcctctgcccttcgctgcgtccccgctccaggcagcccgtcaagcgctacaagaagatcctcatcgacatctttcccgcggagcaggaagacggaccaaatgtgaggaggattgggaggctttgcgagtatgttgctagaaatcctcatcgcgtgccaaagatcacagcttacttggagaggaggtgttacagggagttgagaaatgagcagtatgacattgtgaaagttgttgtgctaatataccgcaggctattggtctcttgtaatgaacaaatgccgttactggcaaatagtttattaagcatcatacaaacacttttggatcaatcaaggcaggatgacatgtgcatcattggctgtgaaaccttgtttgatttcatagtcactcaggtggatggtacatatcagttcaatttggaagagtttattccaagactctgcaaactttctcaaatagtaagggacaaagagaaggctaatgcactccgtgcagcagctctgcaatcactctctgctatgatctggtttatgggtgagctctctcatatctcctcagagtttgatagcgttgtccaagtagtattggaaagctatgagcctcgacaggtgcaaagtgacaatagtgccactgaaaatccaggttgtcagttggttgaagaggtccttaaacccgagggtcatgcctctccatcgacatttatattttctgtgataccttcttgggacagcatagttagtgactatggaggaattcaactgcttatggatgatgccaaggatccttatttttggtcaagggtctgtgtgcataacatggccaagctgtccagggaagcaactacattccgccgtgttatggagtccctattttgccacttcgataatactaattcatggtcatccaaaaatggtcttgcactttgtgttctattggacatgcaaatgttcatggaaaagtcagggacaaacattaatttgatgatatcagtactagttaagcatctcgaacacaaggccatactgaaacaacctgagatgcaactcagcattgtcgaagtgataactgctcttgcagaacaatcaagagctcaggcttcagcagcaaccatagttgctataagtgaccttgtgaggcatatgaaaaagacactgcatttagctcttggcagcaacgatttggaggtggtaaagtggaatgacaaactccgcatggcttttgatgaatgcatagtccagctgtcaaagaaggtaggtgatgctggaccagttcttgacatgatgtctgtgatgctagagaacatatcacacactcctcttattgctatagcaactacttctgctgtttatcgcacagctcaaataattgcttcaataccaaatttgtcatataagaacaaggtatttccagaagcactttttcatcaattgctgttagcgatggttcaccctgatcatgaaacacgtgttggctcgcaaagcttgagacaaagcctcagactttcttcagtgtctcacaaacattcttatacttctttaaaggaaggtcaaagtcccttgacagagtcaatcaacgaaatggaaacaattgtgttaagactaagcagccagcaggccactcttctgctctcatctatttggcgtcaagcactttctccaaaaaatgctcctcaaaactacgaagctattgctcatacatatagtttgcttctattgtttttgggatcaaagacaccaatttttgaggttcttgctcccagctttcagattgcattttctttaatgagccattcacttggaggaacagattcattgccaccatctcgccgccggtcattatttactctggctacatctatgattgtttttgcctcaagagctttcaatgtggcacctcttctcccaatttgtaaattaatgctcaatgatggaacgatggatccattccttcatctggtacatgagaacaaacttcaggctgtgaaggactatacggaagatccatcaacatcctatggctcacccgaggacaatcagaatgccttgaaatctctttcagtggtggaactaacaaatagttgctcccgagaatccatgattttaaccattatgaactccataagagatttaccagacttggagttagagaatataaggagtcaactgctgcgtgatttctcccctgatgacgtgtgcccaagtagcgctcactttcttgaatcacctggcaagattgcaccgccatgttctgatgatgacaccgactacgactatcaagaggtacacggaaattttgagcaggctgaacttatcgatctgagaaatgacaacaatacttatttggaagcctctgcaactacactggcggctatagctattcctgtgcccacaacaaatcttctcagtatcgatgaacttctagaaacagtcgtgaatgatgtgtcatctcagaccggagggcaatgtttggtgtcaatggccggagacatcccattccaggagatgactagccactgtgaggccttttcgatgggaaagcaccacaagatgtccctgctcatgagcttcaagcaaaacaagcaagcggccatggtcgtcgtgcctgacaatcagagcacaaacccgttcctcctgcagagcatcagtgccggcgaggcacaggttgctggcgacgtccagcagccgttcctgaggctgccaccgtcgagcccctacgacaacttcctcaaggctgctggctgctgatttccacttgcagaaaccctgccgtgtaaccaaccgaatgtatcgtgtgtgtacagtggccgtctgcctcaatcttattacaaactaaacaagggtttggatattacatgctgacttgttttcggatcatgccagggtcaatccaaaattcatttaattgtaggattccaaagcaaagggaatgatagatatataaggagaaaatgttgaaatctaacttagatcgtctccaacggcttatctatatggccgtactaacactgttttacattgtatactgtatcgttggtagagtgaaggttaaatataagaataaagaagatagtggtagtgtgagatcagttgtttttc

SEQ ID NO: 49494 - DNA, 3746 bp, Zea Mays
ccaaatacgcgctctcgtgctcgtgcgcgcgcgtcgcctcccaccccttcgtccgccgttgccgcccgcactctcccttccgccgtcgtgggcgcgcggcgacggggagagaggcaggtgaggtcggaagcggcggcggaggcgggcccccctccgtctactcttactcacgcacaccacggcgcccgcgagctagcgccctagcggagcggaggtcgaggcgggagaaaggcggttggggctccccggtgggcaggggggggggggggggggtcggaggcggggatggggctcgacggcacggtctcgggggtggtgtcgaggaaggtgctgccggcgtgtggtgggctctgctgcctctgcccttcgctgcgtccccgctccaggcagcccgtcaagcgctacaagaagatcctcatcgacatctttcccgcggagcagacggaccaaatgtgaggaggattgggaggctttgcgagtatgttgctagaaatcctcatcgcgtgccaaagatcacagcttacttggagaggaggtgttacagggagttgagaaatgagcagtatgacattgtgaaagttgttgtgctaatataccgcaggctattggtctcttgtaatgaacaaatgccgttactggcaaatagtttattaagcatcatacaaacacttttggatcaatcaaggcaggatgacatgtgcatcattggctgtgaaaccttgtttgatttcatagtcactcaggtggatggtacatatcagttcaatttggaagagtttattccaagactctgcaaactttctcaaatagtaagggacaaagagaaggctaatgcactccgtgcagcagctctgcaatcactctctgctatgatctggtttatgggtgagctctctcatatctcctcagagtttgatagcgttgtccaagtagtattggaaagctatgagcctcgacaggtgcaaagtgacaatagtgccactgaaaatccaggttgtcagttggttgaagaggtccttaaacccgagggtcatgcctctccatcgacatttatattttctgtgataccttcttgggacagcatagttagtgactatggaggaattcaactgcttatggatgatgccaaggatccttatttttggtcaagggtctgtgtgcataacatggccaagctgtccagggaagcaactacattccgccgtgttatggagtccctattttgccacttcgataatactaattcatggtcatccaaaaatggtcttgcactttgtgttctattggacatgcaaatgttcatggaaaagtcagggacaaacattaatttgatgatatcagtactagttaagcatctcgaacacaaggccatactgaaacaacctgagatgcaactcagcattgtcgaagtgataactgctcttgcagaacaatcaagagctcaggcttcagcagcaaccatagttgctataagtgaccttgtgaggcatatgaaaaagacactgcatttagctcttggcagcaacgatttggaggtggtaaagtggaatgacaaactccgcatggcttttgatgaatgcatagtccagctgtcaaagaaggtaggtgatgctggaccagttcttgacatgatgtctgtgatgctagagaacatatcacacactcctcttattgctatagcaactacttctgctgtttatcgcacagctcaaataattgcttcaataccaaatttgtcatataagaacaaggtatttccagaagcactttttcatcaattgctgttagcgatggttcaccctgatcatgaaacacgtgttggtgcacaccgcatattttctgttgtccttgtcccatcttctgtttctccttttcccaatttgaaatccctagatcagtgtagaaagcatgatgtccagaggacactctcgagggttgtatctgtcttctcatcttcagctgctttatttgataagctgagaagggacagaaactcctttagagaatatttacatgaaggaagcatgaacagaattttgcatggtattgatgatgaaattgctacccctaatgacttgccaggctcgcaaagcttgagacaaagcctcagactttcttcagtgtctcacaaacattcttatacttctttaaaggaaggtcaaagtcccttgacagagtcaatcaacgaaatggaaacaattgtgttaagactaagcagccagcaggccactcttctgctctcatctatttggcgtcaagcactttctccaaaaaatgctcctcaaaactacgaagctattgctcatacatatagtttgcttctattgtttttgggatcaaagacaccaatttttgaggttcttgctcccagctttcagattgcattttctttaatgagccattcacttggaggaacagattcattgccaccatctcgccgccggtcattatttactctggctacatctatgattgtttttgcctcaagagctttcaatgtggcacctcttctcccaatttgtaaattaatgctcaatgatggaacgatggatccattccttcatctggtacatgagaacaaacttcaggctgtgaaggactatacggaagatccatcaacatcctatggctcacccgaggacaatcagaatgccttgaaatctctttcagtggtggaactaacaaatagttgctcccgagaatccatgattttaaccattatgaactccataagagatttaccagacttggagttagagaatataaggagtcaactgctgcgtgatttctcccctgatgacgtgtgcccaagtagcgctcactttcttgaatcacctggcaagattgcaccgccatgttctgatgatgacaccgactacgactatcaagaggtacacggaaattttgagcaggctgaacttatcgatctgagaaatgacaacaatacttatttggaagcctctgcaactacactggcggctatagctattcctgtgcccacaacaaatcttctcagtatcgatgaacttctagaaacagtcgtgaatgatgtgtcatctcagaccggagggcaatgtttggtgtcaatggccggagacatcccattccaggagatgactagccactgtgaggccttttcgatgggaaagcaccacaagatgtccctgctcatgagcttcaagcaaaacaagcaagcggccatggtcgtcgtgcctgacaatcaggttagccacgctgaagcagcacatacctccgacaagcagagcacaaacccgttcctcctgcagagcatcagtgccggcgaggcacaggttgctggcgacgtccagcagccgttcctgaggctgccaccgtcgagcccctacgacaacttcctcaaggctgctggctgctgatttccacttgcagaaaccctgccgtgtaaccaaccgaatgtatcgtgtgtgtacagtggccgtctgcctcaatcttattacaaactaaacaagggtttggatattacatgctgacttgttttcggatcatgccagggtcaatccaaaattcatttaattgtaggattccaaagcaaagggaatgatagatatataaggagaaaatgttgaaatctaacttagatcgtctccaacggcttatctatatggccgtactaacactgttttacattgtatactgtatcgttggtagagtgaaggttaaatataagaataaagaagatagtggtagtgtgagatcagttgtttttc

SEQ ID NO: 49495 - DNA, 3690 bp, Zea Mays
ccaaatacgcgctctcgtgctcgtgcgcgcgcgtcgcctcccaccccttcgtccgccgttgccgcccgcactctcccttccgccgtcgtgggcgcgcggcgacggggagagaggcaggtgaggtcggaagcggcggcggaggcgggcccccctccgtctactcttactcacgcacaccacggcgcccgcgagctagcgccctagcggagcggaggtcgaggcgggagaaaggcggttggggctccccggtgggcaggggggggggggggggggtcggaggcggggatggggctcgacggcacggtctcgggggtggtgtcgaggaaggtgctgccggcgtgtggtgggctctgctgcctctgcccttcgctgcgtccccgctccaggcagcccgtcaagcgctacaagaagatcctcatcgacatctttcccgcggagcaggaagacggaccaaatgtgaggaggattgggaggctttgcgagtatgttgctagaaatcctcatcgcgtgccaaagatcacagcttacttggagaggaggtgttacagggagttgagaaatgagcagtatgacattgtgaaagttgttgtgctaatataccgcaggctattggtctcttgtaatgaacaaatgccgttactggcaaatagtttattaagcatcatacaaacacttttggatcaatcaaggcaggatgacatgtgcatcattggctgtgaaaccttgtttgatttcatagtcactcaggtggatggtacatatcagttcaatttggaagagtttattccaagactctgcaaactttctcaaatagtaagggacaaagagaaggctaatgcactccgtgcagcagctctgcaatcactctctgctatgatctggtttatgggtgagctctctcatatctcctcagagtttgatagcgttgtccaagtagtattggaaagctatgagcctcgacaggtgcaaagtgacaatagtgccactgaaaatccaggttgtcagttggttgaagaggtccttaaacccgagggtcatgcctctccatcgacatttatattttctgtgataccttcttgggacagcatagttagtgactatggaggaattcaactgcttatggatgatgccaaggatccttatttttggtcaagggtctgtgtgcataacatggccaagctgtccagggaagcaactacattccgccgtgttatggagtccctattttgccacttcgataatactaattcatggtcatccaaaaatggtcttgcactttgtgttctattggacatgcaaatgttcatggaaaagtcagggacaaacattaatttgatgatatcagtactagttaagcatctcgaacacaaggccatactgaaacaacctgagatgcaactcagcattgtcgaagtgataactgctcttgcagaacaatcaagagctcaggcttcagcagcaaccatagttgctataagtgaccttgtgaggcatatgaaaaagacactgcatttagctcttggcagcaacgatttggaggtggtaaagtggaatgacaaactccgcatggcttttgatgaatgcatagtccagctgtcaaagaaggtaggtgatgctggaccagttcttgacatgatgtctgtgatgctagagaacatatcacacactcctcttattgctatagcaactacttctgctgtttatcgcacagctcaaataattgcttcaataccaaatttgtcatataagaacaaggtatttccagaagcactttttcatcaattgctgttagcgatggttcaccctgatcatgaaacacgtgttggtgcacaccgcatattttctgttgtccttgtcccatcttctgtttctccttttcccaatttgaaatccctagatcagtgtagaaagcatgatgtccagaggacactctcgagggttgtatctgtcttctcatcttcagctgctttatttgataagctgagaagggacagaaactcctttagagaatatttacatgaaggaagcatgaacagaattttgcatggtattgatgatgaaattgctacccctaatgacttgccaggctcgcaaagcttgagacaaagcctcagactttcttcagtgtctcacaaacattcttatacttctttaaaggaaggtcaaagtcccttgacagagtcaatcaacgaaatggaaacaattgtgttaagactaagcagccagcaggccactcttctgctctcatctatttggcgtcaagcactttctccaaaaaatgctcctcaaaactacgaagctattgctcatacatatagtttgcttctattgtttttgggatcaaagacaccaatttttgaggttcttgctcccagctttcagattgcattttctttaatgagccattcacttggaggaacagattcattgccaccatctcgccgccggtcattatttactctggctacatctatgattgtttttgcctcaagagctttcaatgtggcacctcttctcccaatttgtaaattaatgctcaatgatggaacgatggatccattccttcatctggtacatgagaacaaacttcaggctgtgaaggactatacggaagatccatcaacatcctatggctcacccgaggacaatcagaatgccttgaaatctctttcagtggtggaactaacaaatagttgctcccgagaatccatgattttaaccattatgaactccataagagatttaccagacttggagttagagaatataaggagtcaactgctgcgtgatttctcccctgatgacgtgtgcccaagtagcgctcactttcttgaatcacctggcaagattgcaccgccatgttctgatgatgacaccgactacgactatcaagaggctgaacttatcgatctgagaaatgacaacaatacttatttggaagcctctgcaactacactggcggctatagctattcctgtgcccacaacaaatcttctcagtatcgatgaacttctagaaacagtcgtgaatgatgtgtcatctcagaccggagggcaatgtttggtgtcaatggccggagacatcccattccaggagatgactagccactgtgaggccttttcgatgggaaagcaccacaagatgtccctgctcatgagcttcaagcaaaacaagcaagcggccatggtcgtcgtgcctgacaatcagagcacaaacccgttcctcctgcagagcatcagtgccggcgaggcacaggttgctggcgacgtccagcagccgttcctgaggctgccaccgtcgagcccctacgacaacttcctcaaggctgctggctgctgatttccacttgcagaaaccctgccgtgtaaccaaccgaatgtatcgtgtgtgtacagtggccgtctgcctcaatcttattacaaactaaacaagggtttggatattacatgctgacttgttttcggatcatgccagggtcaatccaaaattcatttaattgtaggattccaaagcaaagggaatgatagatatataaggagaaaatgttgaaatctaacttagatcgtctccaacggcttatctatatggccgtactaacactgttttacattgtatactgtatcgttggtagagtgaaggttaaatataagaataaagaagatagtggtagtgtgagatcagttgtttttc

SEQ ID NO: 49496 - DNA, 3346 bp, Zea Mays
ccaaatacgcgctctcgtgctcgtgcgcgcgcgtcgcctcccaccccttcgtccgccgttgccgcccgcactctcccttccgccgtcgtgggcgcgcggcgacggggagagaggcaggtgaggtcggaagcggcggcggaggcgggcccccctccgtctactcttactcacgcacaccacggcgcccgcgagctagcgccctagcggagcggaggtcgaggcgggagaaaggcggttggggctccccggtgggcaggggggggggggggggggtcggaggcggggatggggctcgacggcacggtctcgggggtggtgtcgaggaaggtgctgccggcgtgtggtgggctctgctgcctctgcccttcgctgcgtccccgctccaggcagcccgtcaagcgctacaagaagatcctcatcgacatctttcccgcggagcaggaagacggaccaaatgtgaggaggattgggaggctttgcgaatcacagcttacttggagaggaggtgttacagggagttgagaaatgagcagtatgacattgtgaaagttgttgtgctaatataccgcaggctattggtctcttgtaatgaacaaatgccgttactggcaaatagtttattaagcatcatacaaacacttttggatcaatcaaggcaggatgacatgtgcatcattggctgtgaaaccttgtttgatttcatagtcactcaggtggatggtacatatcagttcaatttggaagagtttattccaagactctgcaaactttctcaaatagtaagggacaaagagaaggctaatgcactccgtgcagcagctctgcaatcactctctgctatgatctggtttatgggtgagctctctcatatctcctcagagtttgatagcgttgtccaagtagtattggaaagctatgagcctcgacaggtgcaaagtgacaatagtgccactgaaaatccaggttgtcagttggttgaagaggtccttaaacccgagggtcatgcctctccatcgacatttatattttctgtgataccttcttgggacagcatagttagtgactatggaggaattcaactgcttatggatgatgccaaggatccttatttttggtcaagggtctgtgtgcataacatggccaagctgtccagggaagcaactacattccgccgtgttatggagtccctattttgccacttcgataatactaattcatggtcatccaaaaatggtcttgcactttgtgttctattggacatgcaaatgttcatggaaaagtcagggacaaacattaatttgatgatatcagtactagttaagcatctcgaacacaaggccatactgaaacaacctgagatgcaactcagcattgtcgaagtgataactgctcttgcagaacaatcaagagctcaggcttcagcagcaaccatagttgctataagtgaccttgtgaggcatatgaaaaagacactgcatttagctcttggcagcaacgatttggaggtggtaaagtggaatgacaaactccgcatggcttttgatgaatgcatagtccagctgtcaaagaaggtaggtgatgctggaccagttcttgacatgatgtctgtgatgctagagaacatatcacacactcctcttattgctatagcaactacttctgctgtttatcgcacagctcaaataattgcttcaataccaaatttgtcatataagaacaaggctcgcaaagcttgagacaaagcctcagactttcttcagtgtctcacaaacattcttatacttctttaaaggaaggtcaaagtcccttgacagagtcaatcaacgaaatggaaacaattgtgttaagactaagcagccagcaggccactcttctgctctcatctatttggcgtcaagcactttctccaaaaaatgctcctcaaaactacgaagctattgctcatacatatagtttgcttctattgtttttgggatcaaagacaccaatttttgaggttcttgctcccagctttcagattgcattttctttaatgagccattcacttggaggaacagattcattgccaccatctcgccgccggtcattatttactctggctacatctatgattgtttttgcctcaagagctttcaatgtggcacctcttctcccaatttgtaaattaatgctcaatgatggaacgatggatccattccttcatctggtacatgagaacaaacttcaggctgtgaaggactatacggaagatccatcaacatcctatggctcacccgaggacaatcagaatgccttgaaatctctttcagtggtggaactaacaaatagttgctcccgagaatccatgattttaaccattatgaactccataagagatttaccagacttggagttagagaatataaggagtcaactgctgcgtgatttctcccctgatgacgtgtgcccaagtagcgctcactttcttgaatcacctggcaagattgcaccgccatgttctgatgatgacaccgactacgactatcaagaggtacacggaaattttgagcaggctgaacttatcgatctgagaaatgacaacaatacttatttggaagcctctgcaactacactggcggctatagctattcctgtgcccacaacaaatcttctcagtatcgatgaacttctagaaacagtcgtgaatgatgtgtcatctcagaccggagggcaatgtttggtgtcaatggccggagacatcccattccaggagatgactagccactgtgaggccttttcgatgggaaagcaccacaagatgtccctgctcatgagcttcaagcaaaacaagcaagcggccatggtcgtcgtgcctgacaatcagagcacaaacccgttcctcctgcagagcatcagtgccggcgaggcacaggttgctggcgacgtccagcagccgttcctgaggctgccaccgtcgagcccctacgacaacttcctcaaggctgctggctgctgatttccacttgcagaaaccctgccgtgtaaccaaccgaatgtatcgtgtgtgtacagtggccgtctgcctcaatcttattacaaactaaacaagggtttggatattacatgctgacttgttttcggatcatgccagggtcaatccaaaattcatttaattgtaggattccaaagcaaagggaatgatagatatataaggagaaaatgttgaaatctaacttagatcgtctccaacggcttatctatatggccgtactaacactgttttacattgtatactgtatcgttggtagagtgaaggttaaatataagaataaagaagatagtggtagtgtgagatcagttgtttttc

SEQ ID NO: 49497 - DNA, 2774 bp, Zea Mays
aacctcttgattgatgtttggattatgccgttactggcaaatagtttattaagcatcatacaaacacttttggatcaatcaaggcaggatgacatgtgcatcattggctgtgaaaccttgtttgatttcatagtcactcaggtggatggtacatatcagttcaatttggaagagtttattccaagactctgcaaactttctcaaatagtaagggacaaagagaaggctaatgcactccgtgcagcagctctgcaatcactctctgctatgatctggtttatgggtgagctctctcatatctcctcagagtttgatagcgttgtccaagtagtattggaaagctatgagcctcgacaggtgcaaagtgacaatagtgccactgaaaatccaggttgtcagttggttgaagaggtccttaaacccgagggtcatgcctctccatcgacatttatattttctgtgataccttcttgggacagcatagttagtgactatggaggaattcaactgcttatggatgatgccaaggatccttatttttggtcaagggtctgtgtgcataacatggccaagctgtccagggaagcaactacattccgccgtgttatggagtccctattttgccacttcgataatactaattcatggtcatccaaaaatggtcttgcactttgtgttctattggacatgcaaatgttcatggaaaagtcagggacaaacattaatttgatgatatcagtactagttaagcatctcgaacacaaggccatactgaaacaacctgagatgcaactcagcattgtcgaagtgataactgctcttgcagaacaatcaagagctcaggcttcagcagcaaccatagttgctataagtgaccttgtgaggcatatgaaaaagacactgcatttagctcttggcagcaacgatttggaggtggtaaagtggaatgacaaactccgcatggcttttgatgaatgcatagtccagctgtcaaagaaggtaggtgatgctggaccagttcttgacatgatgtctgtgatgctagagaacatatcacacactcctcttattgctatagcaactacttctgctgtttatcgcacagctcaaataattgcttcaataccaaatttgtcatataagaacaaggctcgcaaagcttgagacaaagcctcagactttcttcagtgtctcacaaacattcttatacttctttaaaggaaggtcaaagtcccttgacagagtcaatcaacgaaatggaaacaattgtgttaagactaagcagccagcaggccactcttctgctctcatctatttggcgtcaagcactttctccaaaaaatgctcctcaaaactacgaagctattgctcatacatatagtttgcttctattgtttttgggatcaaagacaccaatttttgaggttcttgctcccagctttcagattgcattttctttaatgagccattcacttggaggaacagattcattgccaccatctcgccgccggtcattatttactctggctacatctatgattgtttttgcctcaagagctttcaatgtggcacctcttctcccaatttgtaaattaatgctcaatgatggaacgatggatccattccttcatctggtacatgagaacaaacttcaggctgtgaaggactatacggaagatccatcaacatcctatggctcacccgaggacaatcagaatgccttgaaatctctttcagtggtggaactaacaaatagttgctcccgagaatccatgattttaaccattatgaactccataagagatttaccagacttggagttagagaatataaggagtcaactgctgcgtgatttctcccctgatgacgtgtgcccaagtagcgctcactttcttgaatcacctggcaagattgcaccgccatgttctgatgatgacaccgactacgactatcaagaggtacacggaaattttgagcaggctgaacttatcgatctgagaaatgacaacaatacttatttggaagcctctgcaactacactggcggctatagctattcctgtgcccacaacaaatcttctcagtatcgatgaacttctagaaacagtcgtgaatgatgtgtcatctcagaccggagggcaatgtttggtgtcaatggccggagacatcccattccaggagatgactagccactgtgaggccttttcgatgggaaagcaccacaagatgtccctgctcatgagcttcaagcaaaacaagcaagcggccatggtcgtcgtgcctgacaatcagagcacaaacccgttcctcctgcagagcatcagtgccggcgaggcacaggttgctggcgacgtccagcagccgttcctgaggctgccaccgtcgagcccctacgacaacttcctcaaggctgctggctgctgatttccacttgcagaaaccctgccgtgtaaccaaccgaatgtatcgtgtgtgtacagtggccgtctgcctcaatcttattacaaactaaacaagggtttggatattacatgctgacttgttttcggatcatgccagggtcaatccaaaattcatttaattgtaggattccaaagcaaagggaatgatagatatataaggagaaaatgttgaaatctaacttagatcgtctccaacggcttatctatatggccgtactaacactgttttacattgtatactgtatcgttggtagagtgaaggttaaatataagaataaagaagatagtggtagtgtgagatcagttgtttttc

SEQ ID NO: 49498 - DNA, 2165 bp, Zea Mays
aatccttcacttgatcagccacttcctttttcgggaataaggtaggtgatgctggaccagttcttgacatgatgtctgtgatgctagagaacatatcacacactcctcttattgctatagcaactacttctgctgtttatcgcacagctcaaataattgcttcaataccaaatttgtcatataagaacaaggtatttccagaagcactttttcatcaattgctgttagcgatggttcaccctgatcatgaaacacgtgttggtgcacaccgcatattttctgttgtccttgtcccatcttctgtttctccttttcccaatttgaaatccctagatcagtgtagaaagcatgatgtccagaggacactctcgagggttgtatctgtcttctcatcttcagctgctttatttgataagctgagaagggacagaaactcctttagagaatatttacatgaaggaagcatgaacagaattttgcatggtattgatgatgaaattgctacccctaatgacttgccaggctcgcaaagcttgagacaaagcctcagactttcttcagtgtctcacaaacattcttatacttctttaaaggaaggtcaaagtcccttgacagagtcaatcaacgaaatggaaacaattgtgttaagactaagcagccagcaggccactcttctgctctcatctatttggcgtcaagcactttctccaaaaaatgctcctcaaaactacgaagctattgctcatacatatagtttgcttctattgtttttgggatcaaagacaccaatttttgaggttcttgctcccagctttcagattgcattttctttaatgagccattcacttggaggaacagattcattgccaccatctcgccgccggtcattatttactctggctacatctatgattgtttttgcctcaagagctttcaatgtggcacctcttctcccaatttgtaaattaatgctcaatgatggaacgatggatccattccttcatctggtacatgagaacaaacttcaggctgtgaaggactatacggaagatccatcaacatcctatggctcacccgaggacaatcagaatgccttgaaatctctttcagtggtggaactaacaaatagttgctcccgagaatccatgattttaaccattatgaactccataagagatttaccagacttggagttagagaatataaggagtcaactgctgcgtgatttctcccctgatgacgtgtgcccaagtagcgctcactttcttgaatcacctggcaagattgcaccgccatgttctgatgatgacaccgactacgactatcaagaggctgaacttatcgatctgagaaatgacaacaatacttatttggaagcctctgcaactacactggcggctatagctattcctgtgcccacaacaaatcttctcagtatcgatgaacttctagaaacagtcgtgaatgatgtgtcatctcagaccggagggcaatgtttggtgtcaatggccggagacatcccattccaggagatgactagccactgtgaggccttttcgatgggaaagcaccacaagatgtccctgctcatgagcttcaagcaaaacaagcaagcggccatggtcgtcgtgcctgacaatcaggttagccacgctgaagcagcacatacctccgacaagcagagcacaaacccgttcctcctgcagagcatcagtgccggcgaggcacaggttgctggcgacgtccagcagccgttcctgaggctgccaccgtcgagcccctacgacaacttcctcaaggctgctggctgctgatttccacttgcagaaaccctgccgtgtaaccaaccgaatgtatcgtgtgtgtacagtggccgtctgcctcaatcttattacaaactaaacaagggtttggatattacatgctgacttgttttcggatcatgccagggtcaatccaaaattcatttaattgtaggattccaaagcaaagggaatgatagatatataaggagaaaatgttgaaatctaacttagatcgtctccaacggcttatctatatggccgtactaacactgttttacattgtatactgtatcgttggtagagtgaaggttaaatataagaataaagaagatagtggtagtgtgagatcagttgtttttc

SEQ ID NO: 49499 - DNA, 1561 bp, Zea Mays
gaacaacttgtttgttcccctccatagaaaaaaatccaacatgctgagccttgtgctcagaaatttacaggaaacaattgtgttaagactaagcagccagcaggccactcttctgctctcatctatttggcgtcaagcactttctccaaaaaatgctcctcaaaactacgaagctattgctcatacatatagtttgcttctattgtttttgggatcaaagacaccaatttttgaggttcttgctcccagctttcagattgcattttctttaatgagccattcacttggaggaacagattcattgccaccatctcgccgccggtcattatttactctggctacatctatgattgtttttgcctcaagagctttcaatgtggcacctcttctcccaatttgtaaattaatgctcaatgatggaacgatggatccattccttcatctggtacatgagaacaaacttcaggctgtgaaggactatacggaagatccatcaacatcctatggctcacccgaggacaatcagaatgccttgaaatctctttcagtggtggaactaacaaatagttgctcccgagaatccatgattttaaccattatgaactccataagagatttaccagacttggagttagagaatataaggagtcaactgctgcgtgatttctcccctgatgacgtgtgcccaagtagcgctcactttcttgaatcacctggcaagattgcaccgccatgttctgatgatgacaccgactacgactatcaagaggtacacggaaattttgagcaggctgaacttatcgatctgagaaatgacaacaatacttatttggaagcctctgcaactacactggcggctatagctattcctgtgcccacaacaaatcttctcagtatcgatgaacttctagaaacaaccggagggcaatgtttggtgtcaatggccggagacatcccattccaggagatgactagccactgtgaggccttttcgatgggaaagcaccacaagatgtccctgctcatgagcttcaagcaaaacaagcaagcggccatggtcgtcgtgcctgacaatcagagcacaaacccgttcctcctgcagagcatcagtgccggcgaggcacaggttgctggcgacgtccagcagccgttcctgaggctgccaccgtcgagcccctacgacaacttcctcaaggctgctggctgctgatttccacttgcagaaaccctgccgtgtaaccaaccgaatgtatcgtgtgtgtacagtggccgtctgcctcaatcttattacaaactaaacaagggtttggatattacatgctgacttgttttcggatcatgccagggtcaatccaaaattcatttaattgtaggattccaaagcaaagggaatgatagatatataaggagaaaatgttgaaatctaacttagatcgtctccaacggcttatctatatggccgtactaacactgttttacattgtatactgtatcgttggtagagtgaaggttaaatataagaataaagaagatagtggtagtgtgagatcagttgtttttc

SEQ ID NO: 49500 - DNA, 1574 bp, Zea Mays
aaaaatccaacatgctgagccttgtgctcagaaatttacaggaaacaattgtgttaagactaagcagccagcaggccactcttctgctctcatctatttggcgtcaagcactttctccaaaaaatgctcctcaaaactacgaagctattgctcatacatatagtttgcttctattgtttttgggatcaaagacaccaatttttgaggttcttgctcccagctttcagattgcattttctttaatgagccattcacttggaggaacagattcattgccaccatctcgccgccggtcattatttactctggctacatctatgattgtttttgcctcaagagctttcaatgtggcacctcttctcccaatttgtaaattaatgctcaatgatggaacgatggatccattccttcatctggtacatgagaacaaacttcaggctgtgaaggactatacggaagatccatcaacatcctatggctcacccgaggacaatcagaatgccttgaaatctctttcagtggtggaactaacaaatagttgctcccgagaatccatgattttaaccattatgaactccataagagatttaccagacttggagttagagaatataaggagtcaactgctgcgtgatttctcccctgatgacgtgtgcccaagtagcgctcactttcttgaatcacctggcaagattgcaccgccatgttctgatgatgacaccgactacgactatcaagaggctgaacttatcgatctgagaaatgacaacaatacttatttggaagcctctgcaactacactggcggctatagctattcctgtgcccacaacaaatcttctcagtatcgatgaacttctagaaacagtcgtgaatgatgtgtcatctcagaccggagggcaatgtttggtgtcaatggccggagacatcccattccaggagatgactagccactgtgaggccttttcgatgggaaagcaccacaagatgtccctgctcatgagcttcaagcaaaacaagcaagcggccatggtcgtcgtgcctgacaatcaggttagccacgctgaagcagcacatacctccgacaagcagagcacaaacccgttcctcctgcagagcatcagtgccggcgaggcacaggttgctggcgacgtccagcagccgttcctgaggctgccaccgtcgagcccctacgacaacttcctcaaggctgctggctgctgatttccacttgcagaaaccctgccgtgtaaccaaccgaatgtatcgtgtgtgtacagtggccgtctgcctcaatcttattacaaactaaacaagggtttggatattacatgctgacttgttttcggatcatgccagggtcaatccaaaattcatttaattgtaggattccaaagcaaagggaatgatagatatataaggagaaaatgttgaaatctaacttagatcgtctccaacggcttatctatatggccgtactaacactgttttacattgtatactgtatcgttggtagagtgaaggttaaatataagaataaagaagatagtggtagtgtgagatcagttgtttttc

SEQ ID NO: 49501 - DNA, 1233 bp, Zea Mays
gtcttctataagaaggaaatacttcaatcaagcctccttgaacattttgtttttttgttgggggtggaggagatggatccattccttcatctggtacatgagaacaaacttcaggctgtgaaggactatacggaagatccatcaacatcctatggctcacccgaggacaatcagaatgccttgaaatctctttcagtggtggaactaacaaatagttgctcccgagaatccatgattttaaccattatgaactccataagagatttaccagacttggagttagagaatataaggagtcaactgctgcgtgatttctcccctgatgacgtgtgcccaagtagcgctcactttcttgaatcacctggcaagattgcaccgccatgttctgatgatgacaccgactacgactatcaagaggtacacggaaattttgagcaggctgaacttatcgatctgagaaatgacaacaatacttatttggaagcctctgcaactacactggcggctatagctattcctgtgcccacaacaaatcttctcagtatcgatgaacttctagaaacagtcgtgaatgatgtgtcatctcagaccggagggcaatgtttggtgtcaatggccggagacatcccattccaggagatgactagccactgtgaggccttttcgatgggaaagcaccacaagatgtccctgctcatgagcttcaagcaaaacaagcaagcggccatggtcgtcgtgcctgacaatcagagcacaaacccgttcctcctgcagagcatcagtgccggcgaggcacaggttgctggcgacgtccagcagccgttcctgaggctgccaccgtcgagcccctacgacaacttcctcaaggctgctggctgctgatttccacttgcagaaaccctgccgtgtaaccaaccgaatgtatcgtgtgtgtacagtggccgtctgcctcaatcttattacaaactaaacaagggtttggatattacatgctgacttgttttcggatcatgccagggtcaatccaaaattcatttaattgtaggattccaaagcaaagggaatgatagatatataaggagaaaatgttgaaatctaacttagatcgtctccaacggcttatctatatggccgtactaacactgttttacattgtatactgtatcgttggtagagtgaaggttaaatataagaataaagaagatagtggtagtgtgagatcagttgtttttc

SEQ ID NO: 49502 - DNA, 10025 bp, Zea Mays
gacaaataaagtcggccagaatttataaacaggtggtttttaatccggcggctcacatggaaataattttatgtcgagaacacaatacgtatatatcacaaatatactgtattagttggtagtcagggctgaactttcctaataactgaactgaattggacactgaacacaaacaaagaagctaaaagagcgcaggacgacagttaccacctcatcattgcaaagagccgagcgaggagggatgcatcaactgtgtctacaactatacgtactgaaaattcagaagtactgtttgttttattacttcattgtggccagaaaagtgtgaactcccattgttgcatcagattgcatgactgaagactgaagtacctgttcctcccttcttcgtgacacatttggtcactcacatgggctctgaaattctagcgtccgagcagatcgattcgcttcagattaaagccgtttgtttggattgttacaactgcaatacatagagatagaaacatttggactgttacagttacaatatataaagataaaaacactatagaaacagtagaagtcggtacggattaaatcaaagcaaacacgaagaacagagcaacagagtgcaaatggttgcacatgtcatggtatcaacaatatggagcaagctgacacatttgccagatctagtatcatggcctcacggacggtggaaatggcatgtgcataagcaatgtaagcatattgtcatgccacccttcacatgcatgtttttgggtgatcgtcactggaagtatgcaagatgaaagtgaacaaaaacaaattcgcagtgtttagtggtaatctatgttagaagtttagcactaatatacaaggtcaggaaggactttatagcacctgccttttctgccagatatccaaatttatacatgaaatctgaaataaacacagtgggtagctcgtctgtcagataacttgagaacatatcaactcatgatgataaggtaggggtattggatgcatccaagatgaaaacatgctctactttatattttttaggggaagatggccacttccaagaatccaacatatctatgcaaccaaccaatcaggaaactttgggccagaagattaaggtccgatgattaacatggtatggacgtcatacttgtccaaggagacttttcattttgttccttccaagcatacacaactcaacaacaatttcagttagataatagtgtttgtacttcattcttttttttcttgaacgcgcagaagaggtgcacatcattaatactaagaagatgagaaaaaatatccaaaatggaccaatacaaagggaaggcacctcaggatagccaaaaacgaaaatacaaaaaacagctcataactaataaaacaaccaacaagcaactacaaccctaggatagtaggagagccaaatccttggccctagcaagcacccacatttccctttcttccctagcttttctaatagctgctcccaaattgggaggatttttgtcgaaaacacatccattcctgtgattccataaaatccatagttcaagggtcatatgagaattaaaccctttcttggcaataccctgcagctgatcactactcctttgccaccactgcatgatgcttccttctccaaattaggaggcaatggcctaaaggttgacctttgcaagcagctgaaaccaaaaacttctggcaaacacacggcccacaaggagatagtctatagtttcaagctcctgatcacataaagggcatattgagccctcttctttgcagcctatatgttgtccaacatcttcctaaagcagctagccacaagaaaaaaattacatttggggcgaccaagacttccaaattctttctgagtgctcaaattgagttgatccaataaagagaccctcatatgctactttggctgaatattttccttccggagccaatctgaagatatgcttatcctctcgatctgggtgtaaagcaattgcctcaagagaataccatgggtcaaataagtcagcaagtatcccactgtcaaggtccctttaatatttgtcaaccacttcctgcctgttaaagcctctggaactgttctactactcttgatccgcttagggactgctattattaatcgtggagtgaggtcttctattttctttccatctaaccaccggtcttgccaaaataaggttgatgaaccatttccaatatcagtaatcatagctatagagagaagagactgctgaaatttcaaggtttttcaggagaagttttggacagccacatccatcgcatcctcaaggcccatccaagctctttggggctagcaatacctaggccaccaagctcaagtggtctgcagactctaccccaagccactaaacaatgaccctctcttacaccctatcctacccgtcagagaaaatccttttctaatttattaatggtttttagagctgctagggttaggtccaaagccatggcaaggctcccataataaaatatcaaaaaggctgatgcaatcatagtactctactgcgaatggacagaaaaactaggatgtcttgcacaataactctgactaatataagacttgttgtgtaagcctggtgaaaggtcctctagcgtaatggttaagacttccgagtagcacctccagctccgggttcgatacccacggggacgaatttcgggcttggttaaaaaaatccctcttgctgtgttctgcccgcttccgggttacgtcctgtgcgccaccctccggctgcccgttgcagagtggacggtgacggcccgctagtgattggggccagagttcaggaattttctcttctggaccatgtttcggtctctttttaataataatactgggagggtggtcttgccctctctggccgagtttttgttgttgttgtgtaagcctggttaccagatacgaaaaattgagcaaagcaattccatgatgtggcacaagacaggacagtcgatagggtttgtaggattttgaatctgtaatatgtttcacagctatcaataataagtaaagaaaaaaaacagagccactcagcaaaaactgtatatgtaaattgatgcttttaattaagatgctattttagcattcttatatgctattattaggctgaagataactccaaacttcagagagcaatatcacttcagtttcagtgatagtgttacattttactaatctggagctttttaggtgaaacctaggataaagcaaaagtgacaaacgtgttgtgacttgtgagatatttgaactaggcatatttcatctggaattgctaaacaaagtatgttgcatcaataaattagctaatacaatatatgcaaacttttgctgcttcttttaaagctacacttcagaatttaattgaagaaacggcatagctgtactcaaataactttcaaaagtatactcggaaacggttgcaaatcataaatcacatagaaaaaaacattggaaaactacttttactaattctcaattatgctttggtggtattcttttagttgagtcctttaccttcataacaacatccaaaaatatgataacatatcaaaataattgattggcaaataatgctgaaactcatcaatacggttattctggtctagtaacaagcaaacataaatgagagcattttctcacagatagcctttcagcagttaccgcgaactagaaacatcaagatatcaaacactgcttcaacagaagatattccagcacaaacaataacaagcacagaaactattaagaatctaatcgacagagctagtacactagatcgtatagcttgtttgcttcagtgatgatccaggaaaatggaatgaatcacgttgtatatcatgaggatatcttgcaaatgtcctcgtattcgacagccctgagaaccttcccatcatagaggcctttctcaacctgcacttttgcacagaatttctcagtgtccactgaaagcaacctggcatttgacccccgataagccccattgacaatccgcacaagtccaccaatctgagggatcacggtctcaagctcatcttggtcgaccctgagaacatgcttgctctccaacatctcaatctccccaacatatttatcaataactttcttcaccacccctttctgcttgtagtaccccttctctgccaatgacttgctcatcactttgaccacaatcccagggcacagccagtagtccttcctattgctcctctccttggccttctcctcctccttcatcagctcgtccaatgctgacctctttgcctctgctgccttcacatcctttcccatcttcttggtcaactcattcttctcctggtctcgggtgcctgagccatcctcctcatcaaaaccaaatttcatcttcggcttatcgtcaaaaggattaaccttgggccccggcacagccttctgaagcgcaatcgcaatcttacctgttgccttatctgcctctttcgagtcatcctccggctcctgctcatcatcatccgaacctgaatactctccttcactgccagactcaggctcgccctcggcagcaccaccaccattgggtttagctaaggacttgtgcgcacgctcaatctggcgggcaatcatgcgctcctggcgctcgtcgtcagccatgtctgacttgatcctcttgcgcttgaggcgttccttgacggcctgctccgagtcacggtcgatgtaggtcatgaaccaccccttgggcgtgtcctcgaccttacagtacccctcgcgccccaggaacttgacgaactcggtgagcgtggcccaccgcgtggagttcatgtggacgtggtgccggtcggcgatgtactcgttgtagacgacggtggcggcgacgcgggagtggcggtgcgcgcggcggatgagggagaggaaggactcgaggaactcctcggagaagccctcgacgacgcggtcgggggccatgccgaacacctgcatctgcctctggtgcgactccgacatgcagtggcacttgaacccgttctcgtcgcggcactgcttctgacacatctgacagtaccaccgcagcttctgcagccccttcgccttgatccggtttgcgatcgccttcggcgtcaggaactcgtgcttccccatcgtgcgggagaggcccttgccgcacaagcaggatgggaattacaggtagaagaaggggggagcacgttggtcaaggagacggacgcgaggcgacgaggagtggattattattgtggagagaggcagcggcggaggccggagaggaggccggcgacggcgagattggggagtgcgtgaacggattggggatcgattggattggggcgagggctttgtttttttttgttgctttttttgtttttttattagacaggcgagggctttgttgggacttgggaataagtccaaggctagcaccacaaatgaacgatccggatcgcgtaaacgatcaatcaacggacgagatccagccaccgtgccagatttttcaacccaacgcatgtgaagggcgcgcatcgtatcttatcttcactctccgtccaccaaagcaaaccctacccgctcccttcccgcgccgccgccgccatggactcgatcgacgcagatctcgcgcgcacgcaagaggagcggcgcaggatggaggaggcgctggcggctggcgcgcccatggccgtgtcctccgtcaccttcgacaccgacctctacggcggcgggggcgccgaccccaaccgcttcgcgggctacgacacctccatcccggcctccgaggacgacgccgcggaggacgacgcggaggccgccaaccctgcgccgcgccgcctcgcggcctacacgggccacgccatcgccgccgccgacatcccgcggtcggccgacgacgacgacgggctgcccaagaggtcccagcgcatcatcgaccgcgaggacgactaccgccgccgccgcctcaaccagatcatctcgccggagcgccatgacccgttcgccgctggggaggccaccccggacccctcggtgcggacctacgctgacgtcatgcgcgacgcggcgctgcagaagaagaaggaggacctgctgagggagattgccaagaagaagaaggaagaggaagagaaggagaaggagaggaaggctgccgctcctgagcagcctgccgccacaacaaagcggcgcaacaggtgggatcagtcgcaggacggcgacgctggtgccggtgccaagaaggtgaagacatcctcggactgggatgcccctgatgcgactcctgggattggccgttgggatgccacccccggacgtgttggagacgccacaccctccgtgagaaggaacagatgggatgagacaccgactccagggaggatggccgatgctgatgctacgcctgcagctggcggtgccacccctggggctactccttctggggcttgggacgcgactccaaagctgcctggtggtgtcacgccaacccctggtaagaagcagagatcaaggtgggatgagacaccagcaagtatggggagtgcaacccctggtagtcttggtgctgcaacacctgctggttatactcctggtccaacgccatttggtgcagagaaccttgccacaccaactcctagccagattgctcgtggaccgatcactccggagcagtaccagctcatgcggtgggagcgggacattgaggagaggaacaggcctctcactgacgaggagcttgatgccatgttcccgcaggagggctacaagattcttgagcccccggcttcctaccagcccatcaggaccccggcaaggaagctccttgcgacaccgacacctctggggacaccactttatgctattccagaggagaatcgtgggcagcattttgatgtgcccaaggagctgcctggtgggttgccactcatgaagcccgaggattaccagtactttggaactttgctgaacgaggaagaggaggagcagctatcgccagaggagcagaaggagaggaaaatcatgaaactgttactcaaagtgaagaatggcacacccccacagcgtaaaacagcacttcggcaactgacagacaaagcccgtgaatttggtgcaggaccgttgttcaacaaaatactgcccttactcatgcagccaacactggaggaccaggagaggcatcttttggtgaaggtcattgacagagtactttataagctcgatgagctggtccgtccttttgtgcacaagattcttgtggttattgaaccactgttgattgatgaggactattatgctcgtgttgaaggcagggagatcatctcaaaccttagcaaagcagctgggcttgctactatgattgctgctatgcgacccgacatcgataacattgatgagtatgtgagaaacaccactgctagggcgttcagtgtggtggcttctgctttgggtatccctgcccttttaccattcttgaaggctgtctgtcagagtaagaagtcttggcaggctaggcacactggtatcaaaatcgtccaacagattgctattctcatgggctgtgctgttttgccacacctcaagtcactagttgagatcattgagcatgggctgagcgatgaaaaccagaaagttcgtacaattactgccctttctcttgctgcacttgctgaggctgctgcaccatatggtatagaaagttttgatactgtattgaaacctctgtggaagggtatcagatctcaccgtgggaaggtccttgctgccttcctaaaggccattggtttcatcatccctcttatggatgctctgtatgctagctactacacaaaggaggtgatgcaggtcctcattagggagttccagtctccagatgaagaaatgaagaaaattgttctcaaggtggtgaaacagtgtgtcagtacagagggtgtggaggctgattatatccggaatgacatccttccagatttcttcaagcacttctgggtgaggagaatggctctagatcgcaggaactataagcagcttgtggaaactacagttgagatggcaaacaaggttggagttgctgatattgttgggagggttgttgaggatctgaaagatgaaagtgagccctacagaagaatggtgatggaaacaatcgagaaggtggtagccaacttgggtgcatcagatattgatgctcgtctggaggagctgcttattgatggtatcttgtatgctttccaagagcagactagtgatgacgcaaatgttatgctaaatggttttggagctgtggttaatgcacttggacagagagttaagccctaccttcctcagatttgtggtactatcaagtggcgattgaacaacaagagtgcaaaagttaggcagcaagctgctgatctgatctccaggatagccatagtaatgaagcagtgccaggaggagcagcttatgggtcacttgggtgttgtgctgtatgagtacttaggagaggagtatcctgaggtgcttggttcaattcttggagccttgaaggctatcgtcaatgtcattggtatgactaaaatgactccaccaatcaaggatcttcttcctcgtctgacccccattcttaagaacaggcatgagaaggtccaagagaactgcattgatcttgttggtaggattgctgatcgtggagcagaatttgtgccagcaagggaatggatgaggatttgttttgagctgctcgaaatgttgaaggctcataagaagggtattaggagagcaactgtgaacacatttggttatatcgcaaaggctatagggccacaggatgtgttggccaccctgttgaataacttgaaggtgcaagaacgacagaaccgggtctgtacaactgtagctattgctatagttgctgaaacttgctcacctttcacagttttacctgcccttatgaatgagtaccgggtcccagagctcaatgtccaaaatggtgttctgaagtcactctctttcctctttgagtatattggtgagatgggcaaagattacatatatgccgtcacccccttacttgaagatgctttaatggatagagatctggttcaccggcagactgctgcatctgctgttaagcacatggctctaggtgttgctggcttgggttgtgaggatgctcttgttcatctgcttaactatgtttggcccaacatatttgagacatctccccacgttataaatgctgtcatggaggcaattgaggggatgagggtcgcactaggtgcggctgtgattttaaattattgcctgcaaggtctcttccatccagcaaggaaagtacgagaagtgtattggaagatatacaactctttgtacatcggcgcgcaggatgcacttgttgcttcttatcctgccctggaagacgatggggataacatctttagtcgtccagagttggcaatgtttgtctgattaacgctggatgtgcatgtccatgtgtcttcatccatattcttatgaagcttgaactgggattgttccttctgaagggggtgcaatgtttaggaattttttttcctggtttactataatgcaactcaaaatctctatcatagtctggtcttactaacgatttgggaactgttttgttttcagggtacctcatgttgcagctgctgaagcgttacactggatttaggaccaatcctaaggctgcagcatgccaattaatccatcaagatcctatattgtgaaggacaaatgacaatcctagcgcgctgtcatctttttatgaatattaggcgttgggcatttaccgtgttttaaaactttgtattacacatggatgttgtattatgtggtgtggacaatggaacgttgcaagctgacctgaacctgattccttactgtattactgagatgttgatatgcatgtcatgttagtgtacgttgtgttctccttgtcattttgtttgtgatatcgacatgctatgtttgttgctgaagttgagcacaaatgatttgttggtca

SEQ ID NO: 49503 - DNA, 2195 bp, Zea Mays
gcgccgcaccacggcaccagcatcacacaggacaggaccaagcccacgcgacccgccgacgcgttggcgtaacggtccaaccaatggccgggttcgcgcgcgccaccgcccccgcgtccccgtcaccggcggcggcgctgctcaccggcgagcgcctcgtggtcttcctcttcgcggcccgcgtggcactcgcggccccggtgcacctcgccgcggcgctcgcggtcctcgtggcggccgccctcgccgtcgagctcgccgtggacggctccggctccgccccgcttcgccgcttcaggaccaggccaggtgcttcgtcaggcatacttcttggcgccactactctgcccagcgtcatgctttctcggttaattcaactgtcaaggctcctaccagctgatcctaatggacctaaagaatttgcatacctggaaatgcagtactgggcagcatcaatcagctgtctcagtgtgctagctttattcctttggcatctacagaagtctcccagcaatgggatctctaaacatttggagtacggctcattgtttatagttttatatctcatgacattctttttgtcctttctactgaagactgatgaaggcttgatggtaacgaccaatatggcgtatatgctctgtcatggagtggctgctgtgatcttaatcaagcatatcctagagaagtttccctcatgcgcatcttttggggaggcgcttttggtgtcaggtggtcttgttctctactttggtgatatgttggcacatacactttcaaagatggagttctccatgtcatcaaaagcattcattcacacacctcaaactagaagcgatatgaccgcaattattcaggattgttaactatatgttcactgattcacatgagcgacttgttttatgtgcatactggatatgtgtaatatatgtatcagttagaaggttctacagtatatcaaagcaaagcaagacagagaggattcttttgcgcaagtattatcatcttgtcgctgttctcattttctctcctgcagttatatttcagcctgctttcttggacttggcatttggtgcagcatttgcagttttcttgatattggagatgttacgaatttgggaaatataccctcttggacgtgttgtgcatcagtttatgaacgcctttactgatcatcgtgattctgagattcttattgtcagccatttttcactcttactgggctgtgcacttccgaaatggatgtcatctggattaaatgaccgaccacttgccccttttgccggaattctcagcttggggataggtgataccatggcatcaatgatagggtacaagtatggcgtgttaagatggagcaagacaggaaagaaaacaatcgagggcacggcagcgggcataacatcggtgctagcagcctgctcgatcctggtgtcactcttggcttccagtgggtacattctttcgcagaattggctatcgctcctgatagctgtcacattgagcgggttattggaggcatacactgcacagctggacaatgccttcatccccctcgtgttctatagtcttctgtgtctataagggtagcatcctgtacatctaactgaccttgatatcctctttttgtttacacgctattagtatatacgtagtgcaatatgttatttcgacattactcacttggtctcctcggcgcatcaactgcctggtgattcagttcaacagatcacattctgtgtaaccctgcctttcggaagttgagaggacgtgctcatggttgagacagtcggtacaggcatatgaccagaagtagaaaaataaaatgttctccagtcgttcagtagagggtgtttttggcggagctgggcagttggatgctgtacataaagttttttttatatgaacctgttgactgttgttgggacgaacagtattgaaacatgctgtgatgctgatcaatttgatcactctatttgctctttctatccatttttaaatacctcatccattccaccctctatttctcctgttctctaaccattccctccaaacattctctctatccaactctatctttacattttaactaagatatttaacttttatacaccatttttagaagctagaatgaataatatctgtaataatattgttatctagtaatctttactaatataaagcactagtttcta

SEQ ID NO: 49504 - DNA, 2388 bp, Zea Mays
cgacgcgttggcgtaacggtccaaccaatggccgggttcgcgcgcgccaccgcccccgcgtccccgtcaccggcggcggcgctgctcaccggcgagcgcctcgtggtcttcctcttcgcggcccgcgtggcactcgcggccccggtgcacctcgccgcggcgctcgcggtcctcgtggcggccgccctcgccgtcgagctcgccgtggacggctccggctccgccccgcttcgccgcttcaggaccaggccaggtgcttcgtcaggcatacttcttggcgccactactctgcccagcgtcatgctttctcggttaattcaactgtcaaggctcctaccagctgatcctaatggacctaaagaatttgcatacctggaaatgcagtactgggcagcatcaatcagctgtctcagtgtgctagctttattcctttggcatctacagaagtctcccagcaatgggatctctaaacatttggagtacggctcattgtttatagttttatatctcatgacattctttttgtcctttctactgaagactgatgaaggcttgatggtaacgaccaatatggcgtatatgctctgtcatggagtggctgctgtgatcttaatcaagcatatcctagagaagtttccctcatgcgcatcttttggtttgtaactaaagcctaagatgggaggcgcttttggtgtcaggtggtcttgttctctactttggtgatatgttggcacatacactttcaaagatggagttctccatgtcatcaaaagcattcattcacacacctcaaactagaagcgatatgaccgcaattattcaggggattttacttgtcctttttctacttccgttactatacaagagttctcttaaagtttggtattgctggacaaaggagagaaagcaacaaacacaaacacctgaggaacataagcgaataagaattgattctgccatattctatatctcgttggcggtggtgttaatatttttactgccatcatggacacaccttgtccaaggcctcaaagtgcatccttttgtttggattgttaactatatgttcactgattcacatgagcgacttgttttatgtgcatactggatatgtgtaatatatgtatcagttagaaggttctacagtatatcaaagcaaagcaagacagagaggattcttttgcgcaagtattatcatcttgtcgctgttctcattttctctcctgcagttatatttcagcctgctttcttggacttggcatttggtgcagcatttgcagttttcttgatattggagatgttacgaatttgggaaatataccctcttggacgtgttgtgcatcagtttatgaacgcctttactgatcatcgtgattctgagattcttattgtcagccatttttcactcttactgggctgtgcacttccgaaatggatgtcatctggattaaatgaccgaccacttgccccttttgccggaattctcagcttggggataggtgataccatggcatcaatgatagggtacaagtatggcgtgttaagatggagcaagacaggaaagaaaacaatcgagggcacggcagcgggcataacatcggtgctagcagcctgctcgatcctggtgtcactcttggcttccagtgggtacattctttcgcagaattggctatcgctcctgatagctgtcacattgagcgggttattggaggcatacactgcacagctggacaatgccttcatccccctcgtgttctatagtcttctgtgtctataagggtagcatcctgtacatctaactgaccttgatatcctctttttgtttacacgctattagtatatacgtagtgcaatatgttatttcgacattactcacttggtctcctcggcgcatcaactgcctggtgattcagttcaacagatcacattctgtgtaaccctgcctttcggaagttgagaggacgtgctcatggttgagacagtcggtacaggcatatgaccagaagtagaaaaataaaatgttctccagtcgttcagtagagggtgtttttggcggagctgggcagttggatgctgtacataaagttttttttatatgaacctgttgactgttgttgggacgaacagtattgaaacatgctgtgatgctgatcaatttgatcactctatttgctctttctatccatttttaaatacctcatccattccaccctctatttctcctgttctctaaccattccctccaaacattctctctatccaactctatctttacattttaactaagatatttaacttttatacaccatttttagaagctagaatgaataatatctgtaataatattgttatctagtaatctttactaatataaagcactagtttcta

SEQ ID NO: 49505 - DNA, 2145 bp, Zea Mays
cggtccaaccaatggccgggttcgcgcgcgccaccgcccccgcgtccccgtcaccggcggcggcgctgctcaccggcgagcgcctcgtggtcttcctcttcgcggcccgcgtggcactcgcggccccggtgcacctcgccgcggcgctcgcggtcctcgtggcggccgccctcgccgtcgagctcgccgtggacggctccggctccgccccgcttcgccgcttcaggaccaggccaggtgcttcgtcaggcatacttcttggcgccactactctgcccagcgtcatgctttctcggttaattcaactgtcaaggctcctaccagctgatcctaatggacctaaagaatttgcatacctggaaatgcagtactgggcagcatcaatcagctgtctcagtgtgctagctttattcctttggcatctacagaagtctcccagcaatgggatctctaaacatttggagtacggctcattgtttatagttttatatctcatgacattctttttgtcctttctactgaagactgatgaaggcttgatggtaacgaccaatatggcgtatatgctctgtcatggagtggctgctgtgatcttaatcaagcatatcctagagaagtttccctcatgcgcatcttttggtttgtaactaaagcctaagatgggaggcgcttttggtgtcaggtggtcttgttctctactttggtgatatgttggcacatacactttcaaagatggagttctccatgtcatcaaaagcattcattcacacacctcaaactagaagcgatatgaccgcaattattcaggattgttaactatatgttcactgattcacatgagcgacttgttttatgtgcatactggatatgtgtaatatatgtatcagttagaaggttctacagtatatcaaagcaaagcaagacagagaggattcttttgcgcaagtattatcatcttgtcgctgttctcattttctctcctgcagttatatttcagcctgctttcttggacttggcatttggtgcagcatttgcagttttcttgatattggagatgttacgaatttgggaaatataccctcttggacgtgttgtgcatcagtttatgaacgcctttactgatcatcgtgattctgagattcttattgtcagccatttttcactcttactgggctgtgcacttccgaaatggatgtcatctggattaaatgaccgaccacttgccccttttgccggaattctcagcttggggataggtgataccatggcatcaatgatagggtacaagtatggcgtgttaagatggagcaagacaggaaagaaaacaatcgagggcacggcagcgggcataacatcggtgctagcagcctgctcgatcctggtgtcactcttggcttccagtgggtacattctttcgcagaattggctatcgctcctgatagctgtcacattgagcgggttattggaggcatacactgcacagctggacaatgccttcatccccctcgtgttctatagtcttctgtgtctataagggtagcatcctgtacatctaactgaccttgatatcctctttttgtttacacgctattagtatatacgtagtgcaatatgttatttcgacattactcacttggtctcctcggcgcatcaactgcctggtgattcagttcaacagatcacattctgtgtaaccctgcctttcggaagttgagaggacgtgctcatggttgagacagtcggtacaggcatatgaccagaagtagaaaaataaaatgttctccagtcgttcagtagagggtgtttttggcggagctgggcagttggatgctgtacataaagttttttttatatgaacctgttgactgttgttgggacgaacagtattgaaacatgctgtgatgctgatcaatttgatcactctatttgctctttctatccatttttaaatacctcatccattccaccctctatttctcctgttctctaaccattccctccaaacattctctctatccaactctatctttacattttaactaagatatttaacttttatacaccatttttagaagctagaatgaataatatctgtaataatattgttatctagtaatctttactaatataaagcactagtttcta

SEQ ID NO: 49506 - DNA, 2367 bp, Zea Mays
cggtccaaccaatggccgggttcgcgcgcgccaccgcccccgcgtccccgtcaccggcggcggcgctgctcaccggcgagcgcctcgtggtcttcctcttcgcggcccgcgtggcactcgcggccccggtgcacctcgccgcggcgctcgcggtcctcgtggcggccgccctcgccgtcgagctcgccgtggacggctccggctccgccccgcttcgccgcttcaggaccaggccaggtgcttcgtcaggcatacttcttggcgccactactctgcccagcgtcatgctttctcggttaattcaactgtcaaggctcctaccagctgatcctaatggacctaaagaatttgcatacctggaaatgcagtactgggcagcatcaatcagctgtctcagtgtgctagctttattcctttggcatctacagaagtctcccagcaatgggatctctaaacatttggagtacggctcattgtttatagttttatatctcatgacattctttttgtcctttctactgaagactgatgaaggcttgatggtaacgaccaatatggcgtatatgctctgtcatggagtggctgctgtgatcttaatcaagcatatcctagagaagtttccctcatgcgcatcttttggggaggcgcttttggtgtcaggtggtcttgttctctactttggtgatatgttggcacatacactttcaaagatggagttctccatgtcatcaaaagcattcattcacacacctcaaactagaagcgatatgaccgcaattattcaggggattttacttgtcctttttctacttccgttactatacaagagttctcttaaagtttggtattgctggacaaaggagagaaagcaacaaacacaaacacctgaggaacataagcgaataagaattgattctgccatattctatatctcgttggcggtggtgttaatatttttactgccatcatggacacaccttgtccaaggcctcaaagtgcatccttttgtttggattgttaactatatgttcactgattcacatgagcgacttgttttatgtgcatactggatatgtgtaatatatgtatcagttagaaggttctacagtatatcaaagcaaagcaagacagagaggattcttttgcgcaagtattatcatcttgtcgctgttctcattttctctcctgcagttatatttcagcctgctttcttggacttggcatttggtgcagcatttgcagttttcttgatattggagatgttacgaatttgggaaatataccctcttggacgtgttgtgcatcagtttatgaacgcctttactgatcatcgtgattctgagattcttattgtcagccatttttcactcttactgggctgtgcacttccgaaatggatgtcatctggattaaatgaccgaccacttgccccttttgccggaattctcagcttggggataggtgataccatgttttcctttttacctaggcatcaatgatagggtacaagtatggcgtgttaagatggagcaagacaggaaagaaaacaatcgagggcacggcagcgggcataacatcggtgctagcagcctgctcgatcctggtgtcactcttggcttccagtgggtacattctttcgcagaattggctatcgctcctgatagctgtcacattgagcgggttattggaggcatacactgcacagctggacaatgccttcatccccctcgtgttctatagtcttctgtgtctataagggtagcatcctgtacatctaactgaccttgatatcctctttttgtttacacgctattagtatatacgtagtgcaatatgttatttcgacattactcacttggtctcctcggcgcatcaactgcctggtgattcagttcaacagatcacattctgtgtaaccctgcctttcggaagttgagaggacgtgctcatggttgagacagtcggtacaggcatatgaccagaagtagaaaaataaaatgttctccagtcgttcagtagagggtgtttttggcggagctgggcagttggatgctgtacataaagttttttttatatgaacctgttgactgttgttgggacgaacagtattgaaacatgctgtgatgctgatcaatttgatcactctatttgctctttctatccatttttaaatacctcatccattccaccctctatttctcctgttctctaaccattccctccaaacattctctctatccaactctatctttacattttaactaagatatttaacttttatacaccatttttagaagctagaatgaataatatctgtaataatattgttatctagtaatctttactaatataaagcactagtttcta

SEQ ID NO: 49507 - DNA, 1686 bp, Zea Mays
taactaaagcctaagatgggaggcgcttttggtgtcaggtggtcttgttctctactttggtgatatgttggcacatacactttcaaagatggagttctccatgtcatcaaaagcattcattcacacacctcaaactagaagcgatatgaccgcaattattcagagttctcttaaagtttggtattgctggacaaaggagagaaagcaacaaacacaaacacctgaggaacataagcgaataagaattgattctgccatattctatatctcgttggcggtggtgttaatatttttactgccatcatggacacaccttgtccaaggcctcaaagtgcatccttttgtttggattgttaactatatgttcactgattcacatgagcgacttgttttatgtgcatactggatatgtgtaatatatgtatcagttagaaggttctacagtatatcaaagcaaagcaagacagagaggattcttttgcgcaagtattatcatcttgtcgctgttctcattttctctcctgcagttatatttcagcctgctttcttggacttggcatttggtgcagcatttgcagttttcttgatattggagatgttacgaatttgggaaatataccctcttggacgtgttgtgcatcagtttatgaacgcctttactgatcatcgtgattctgagattcttattgtcagccatttttcactcttactgggctgtgcacttccgaaatggatgtcatctggattaaatgaccgaccacttgccccttttgccggaattctcagcttggggataggtgataccatggcatcaatgatagggtacaagtatggcgtgttaagatggagcaagacaggaaagaaaacaatcgagggcacggcagcgggcataacatcggtgctagcagcctgctcgatcctggtgtcactcttggcttccagtgggtacattctttcgcagaattggctatcgctcctgatagctgtcacattgagcgggttattggaggcatacactgcacagctggacaatgccttcatccccctcgtgttctatagtcttctgtgtctataagggtagcatcctgtacatctaactgaccttgatatcctctttttgtttacacgctattagtatatacgtagtgcaatatgttatttcgacattactcacttggtctcctcggcgcatcaactgcctggtgattcagttcaacagatcacattctgtgtaaccctgcctttcggaagttgagaggacgtgctcatggttgagacagtcggtacaggcatatgaccagaagtagaaaaataaaatgttctccagtcgttcagtagagggtgtttttggcggagctgggcagttggatgctgtacataaagttttttttatatgaacctgttgactgttgttgggacgaacagtattgaaacatgctgtgatgctgatcaatttgatcactctatttgctctttctatccatttttaaatacctcatccattccaccctctatttctcctgttctctaaccattccctccaaacattctctctatccaactctatctttacattttaactaagatatttaacttttatacaccatttttagaagctagaatgaataatatctgtaataatattgttatctagtaatctttactaatataaagcactagtttcta

SEQ ID NO: 49508 - DNA, 860 bp, Zea Mays
tactaaatctatatgtccattcgtggacacaatatatgttcagagcagcatgaatatactaaatctatatgcccattgcaagttctggtttttacttcaatggtaggtcaaaccgattaagaagtccaattgggtatgttggccctaacgatgattcaggatcaatactgagttcaatgtgtggggtatgggaatctgaactacataggcaaccatacaaacatcacttcttttgctcaacctagaagtgctgtggtattcctagtgatgatattagttggggaagatcaggaaaccttggccgtggaaccggagataacaactttggcttgccttctggaaactatgcgaggagcgactcaactggtacaattggcgagccatttcctgctgtgtgtccgtacttgtttgtggatgagcagccaccagggaaaacaaaccaacaggagagttgggagagagaaggaaacaattaattatgcaaacacggaggagacacaatttgaagactgttggtacacctacggagcacgatgagggagcataccaagctcggaccgtcagacacgcggaggacggacggtggcaccggtggagatggagacaattgcgtgccgttttttgtggagggcttcgttggtgtcaggcgccgggtggagcctgaacgcggtgggaagaagagcggcgtggtgggaagaagagcgacgtcgggttctagactattcttgtggcctcaggcggatggcgggtacccacatcttcgttaggcttatctgaccgtggaggtgaaatctaacggctcatagaaattaaactaacgtggacactctgtccttgctgttttgctccctgctctttat

SEQ ID NO: 49509 - DNA, 2664 bp, Zea Mays
caaaaacctaaatctctcaccccgcgcgtctctcttctttccctctgtctaccgcacgcgcccgtggctagctgccagccgcgcgcccgccgccaccccgcgcccaccccactgcgcgccggctggcgcgccgccacccagcgcggcccgccctcgccaccctgtggccccgccaccgccccgctgccccaccgttaaggcaggtgatgcggccgacaagggggcggcgtccaggaacccacaaaatcacgtcgtggtggggaggcacgggattcggatccggccgtggccacacccggaccccatcgaggtgatgcgggcgcaacggatcatggagcgtgtgcaggaggaacagcgccgctggtacggcgtcaaggagccggggcaggtgctcgccgtcaccccgacctactcacgcgcgttccaggcgctccacctcaccggcctcctccactcactccgtcggaatccttgcgcatactggcaaggcagaccaactgctgctcagcgaggaggacaagcagaatatgcctcttccagtccatggccctgcttgcaagtcctcagggcatctgattggatggcacacgttcaactcattgcccttctctaggaagacggccacagttgttggtgaagcagcccctattctgcccagggatttctagtgggctagttttgtgttgaactcgaggatgctgtggaaggaggctgacggcaagcctgactgggtgaaggatcttgatgctgtgggcgagaactttgaggagcgctggttaaaggcatcaaagcgcagtgccgctaagaaactgtcaaaattgtcgaggtcgcataatgattcgctgctgtggatcaacaagatacctgatattatttctattgacgacgaaatctattcaaatgacgatgatccagagagatgggacatgcagattttccgatcaattgattcgaattctgtcaagggttttccaaaagatccacgggaggccactagtaagaatcttgtttgtgggaaaatgtactgattgatatgagcgtgcatacaacatatgtgaatgccatccgaggtgctcaacatttcatctatattgagaaccagtacttccttggctcttcatttaactgggattcacatagagatgttgaaaatgacaatgcaaattatgtatgagataatctataaggccatgaaagaagtaggactagatggtacatatgagccacaggattacctgaatttcttctgccttggtaaccgtgaagccgaggacactacttgcacatctagtggaccattctcaaccagtaacccacagcttggatatccaatcaggaccaagctcggaataataggagattcatggtgtatgtgcactcgaaaggcatgattgtggatgatgaatatgtgataattggatccgctaacatcaaccagagatccatggaaggaactagagatacagagattgcaatggctgcataccaaccccagcatacattggcaaatatgctttctgctcctcgtggatagattttcgggtacaggaaaatacagtgtacgtgttgaaactgttatcctgccccaggttgggatagacggtggtacattcgtgttggtagaactgtgagaagaaaagatgggaaaactttgctttcttggctgtgatgattatctgctcaaacaagacatgcaaattgcaaaactcttaaaggatagtattagttctatttgttcatatagttctacagctagttgtttcttgctttgttcatggattgcaatactggataagatcatgatggatgttgtgtgtgttttaatcaccatttctaaaatttattctattggtaagacgattctaagatataggtcggagatggattccttgcatatacataaatagataaagaagcaaccggtttataacaaaaatatgtcttctattttgcctgttgcccaattctcttttagtgtagcctacttacaataattaaaagaagagttggtgtctgtttgagtagacaactaagtgcatatataagtacgtgcatgattttgattactaattgtgattttgatgatctttcttttgaagacggtctaacatataagcgcatgatttagatgaacggaattactattgtgccatttctgaagaatcttactgatttctcttgccttcttagaacaacatgggaagaagtgatgatgacagtccatcgccgccaagaggtcacaagagaagaacttgcagcccaagtcctcgtggtagttatggaggccatggcaagcgccccacaactaatcttatggtgacgaatcttggtccggattgtaggattctaactctcatcaagtgactcctcccctcacgatgactttgcggacagatgtctcaattatagtggtggagctacgaacaacaatccgatgtcctgatcgagagcgatggagctaatgtttgaacttgtgtgtttgaacttgtgaactaaaaatgtgaactatggatgtgaatttatgtgaatttgtgaaattatgtatttgaacttatgtgaatttgtgaacttatgtatttggacttgtgtgaatttgtgatatgaatatatatccatgtgtttgaaatttgtattgtatgtgatattctgtgttgcatgtgattt

SEQ ID NO: 49510 - DNA, 2809 bp, Zea Mays
cgcgtctctcttctttccctctgtctaccgcacgcgcccgtggctagctgccagccgcgcgcccgccgccaccccgcgcccaccccactgcgcgccggctggcgcgccgccacccagcgcggcccgccctcgccaccctgtggccccgccaccgccccgctgccccaccgttaaggcaggtgatgcggccgacaagggggcggcgtccaggaacccacaaaatcacgtcgtggtggggaggcacgggattcggatccggccgtggccacacccggaccccatcgaggtgatgcgggcgcaacggatcatggagcgtgtgcaggaggaacagcgccgctggtacggcgtcaaggagccggggcaggtgctcgccgtcaccccgacctactcacgcgcgttccaggcgctccacctcaccggcctcctccactcactccgtcggaatccttgcgcatactggcaaggcagaccaactgctgctcagcgaggaggacaagcagaatatgcctcttccagtccatggccctgcttgcaagtcctcagggcatctgattggatggcacacgttcaactcattgcccttctctaggaagacggccacagttgttggtgaagcagcccctattctgcccagggatttctagtgggctagttttgtgttgaactcgaggatgctgtggaaggaggctgacggcaagcctgactgggtgaaggatcttgatgctgtgggcgagaactttgaggagcgctggttaaaggcatcaaagcgcagtgccgctaagaaactgtcaaaattgtcgaggtcgcataatgattcgctgctgtggatcaacaagatacctgatattatttctattgacgacgaaatctattcaaatgacgatgatccagagagatgggacatgcagattttccgatcaattgattcgaattctgtcaagggttttccaaaagatccacgggaggccactagtaagaatcttgtttgtgggaaaatgtactgattgatatgagcgtgcatacaacatatgtgaatgccatccgaggtgctcaacatttcatctatattgagaaccagtacttccttggctcttcatttaactgggattcacatagagatgttggtgctaataatctgatacccactgagatagcactgaaaattgcaaacaagatttattcgaatgagagattttcagcttatatagtagttccaatgtggcctgagggcaatcctactggtactcttacgcaaagattctttattggcagaaaatgacaatgcaaattatgtatgagataatctataaggccatgaaagaagtaggactagatggtacatatgagccacaggattacctgaatttcttctgccttggtaaccgtgaagccgaggacactacttgcacatctagtggaccattctcaaccagtaacccacagaaaaatacaattatgctgcagcttggatatccaatcaggaccaagctcggaataataggagattcatggtgtatgtgcactcgaaaggcatgattgtggatgatgaatatgtgataattggatccgctaacatcaaccagagatccatggaaggaactagagatacagagattgcaatggctgcataccaaccccagcatacattggcaaatatgctttctgctcctcgtggatagattttcgggtacaggaaaatacagtgtacgtgttgaaactgttatcctgccccaggttgggatagacggtggtacattcgtgttggtagaactgtgagaagaaaagatgggaaaactttgctttcttggctgtgatgattatctgctcaaacaagacatgcaaattgcaaaactcttaaaggatagtattagttctatttgttcatatagttctacagctagttgtttcttgctttgttcatggattgcaatactggataagatcatgatggatgttgtgtgtgttttaatcaccatttctaaaatttattctattggtaagacgattctaagatataggtcggagatggattccttgcatatacataaatagataaagaagcaaccggtttataacaaaaatatgtcttctattttgcctgttgcccaattctcttttagtgtagcctacttacaataattaaaagaagagttggtgtctgtttgagtagacaactaagtgcatatataagtacgtgcatgattttgattactaattgtgattttgatgatctttcttttgaagacggtctaacatataagcgcatgatttagatgaacggaattactattgtgccatttctgaagaatcttactgatttctcttgccttcttagaacaacatgggaagaagtgatgatgacagtccatcgccgccaagaggtcacaagagaagaacttgcagcccaagtcctcgtggtagttatggaggccatggcaagcgccccacaactaatcttatggtgacgaatcttggtccggattgtaggattctaactctcatcaagtgactcctcccctcacgatgactttgcggacagatgtctcaattatagtggtggagctacgaacaacaatccgatgtcctgatcgagagcgatggagctaatgtttgaacttgtgtgtttgaacttgtgaactaaaaatgtgaactatggatgtgaatttatgtgaatttgtgaaattatgtatttgaacttatgtgaatttgtgaacttatgtatttggacttgtgtgaatttgtgatatgaatatatatccatgtgtttgaaatttgtattgtatgtgatattctgtgttgcatgtgattt

SEQ ID NO: 49511 - DNA, 2682 bp, Zea Mays
cttctttccctctgtctaccgcacgcgcccgtggctagctgccagccgcgcgcccgccgccaccccgcgcccaccccactgcgcgccggctggcgcgccgccacccagcgcggcccgccctcgccaccctgtggccccgccaccgccccgctgccccaccgttaaggcaggtgatgcggccgacaagggggcggcgtccaggaacccacaaaatcacgtcgtggtggggaggcacgggattcggatccggccgtggccacacccggaccccatcgaggtgatgcgggcgcaacggatcatggagcgtgtgcaggaggaacagcgccgctggtacggcgtcaaggagccggggcaggtgctcgccgtcaccccgacctactcacgcgcgttccaggcgctccacctcaccggcctcctccactcactccgtcggaatccttgcgcatactggcaaggcagaccaactgctgctcagcgaggaggacaagcagaatatgcctcttccagtccatggccctgcttgcaagtcctcagggcatctgattggatggcacacgttcaactcattgcccttctctaggaagacggccacagttgttggtgaagcagcccctattctgcccagggatttctagtgggctagttttgtgttgaactcgaggatgctgtggaaggaggctgacggcaagcctgactgggtgaaggatcttgatgctgtgggcgagaactttgaggagcgctggttaaaggcatcaaagcgcagtgccgctaagaaactgtcaaaattgtcgaggtcgcataatgattcgctgctgtggatcaacaagatacctgatattatttctattgacgacgaaatctattcaaatgacgatgatccagagagatgggacatgcagattttccgatcaattgattcgaattctgtcaagggttttccaaaagatccacgggaggccactagtaagaatcttgtttgtgggaaaatgtactgattgatatgagcgtgcatacaacatatgtgaatgccatccgaggtgctcaacatttcatctatattgagaaccagtacttccttggctcttcatttaactgggattcacatagagatgttggtgctaataatctgatacccactgagatagcactgaaaattgcaaacaagatttattcgaatgagagattttcagcttatatagtagttccaatgtggcctgagggcaatcctactggtactcttacgcaaagattctttattggcagccgaggacactacttgcacatctagtggaccattctcaaccagtaacccacagaaaaatacaattatgctgcagcttggatatccaatcaggaccaagctcggaataataggagattcatggtgtatgtgcactcgaaaggcatgattgtggatgatgaatatgtgataattggatccgctaacatcaaccagagatccatggaaggaactagagatacagagattgcaatggctgcataccaaccccagcatacattggcaaatatgctttctgctcctcgtggatagattttcgggtacaggaaaatacagtgtacgtgttgaaactgttatcctgccccaggttgggatagacggtggtacattcgtgttggtagaactgtgagaagaaaagatgggaaaactttgctttcttggctgtgatgattatctgctcaaacaagacatgcaaattgcaaaactcttaaaggatagtattagttctatttgttcatatagttctacagctagttgtttcttgctttgttcatggattgcaatactggataagatcatgatggatgttgtgtgtgttttaatcaccatttctaaaatttattctattggtaagacgattctaagatataggtcggagatggattccttgcatatacataaatagataaagaagcaaccggtttataacaaaaatatgtcttctattttgcctgttgcccaattctcttttagtgtagcctacttacaataattaaaagaagagttggtgtctgtttgagtagacaactaagtgcatatataagtacgtgcatgattttgattactaattgtgattttgatgatctttcttttgaagacggtctaacatataagcgcatgatttagatgaacggaattactattgtgccatttctgaagaatcttactgatttctcttgccttcttagaacaacatgggaagaagtgatgatgacagtccatcgccgccaagaggtcacaagagaagaacttgcagcccaagtcctcgtggtagttatggaggccatggcaagcgccccacaactaatcttatggtgacgaatcttggtccggattgtaggattctaactctcatcaagtgactcctcccctcacgatgactttgcggacagatgtctcaattatagtggtggagctacgaacaacaatccgatgtcctgatcgagagcgatggagctaatgtttgaacttgtgtgtttgaacttgtgaactaaaaatgtgaactatggatgtgaatttatgtgaatttgtgaaattatgtatttgaacttatgtgaatttgtgaacttatgtatttggacttgtgtgaatttgtgatatgaatatatatccatgtgtttgaaatttgtattgtatgtgatattctgtgttgcatgtgattt

SEQ ID NO: 49512 - DNA, 2507 bp, Zea Mays
ttccctctgtctaccgcacgcgcccgtggctagctgccagccgcgcgcccgccgccaccccgcgcccaccccactgcgcgccggctggcgcgccgccacccagcgcggcccgccctcgccaccctgtggccccgccaccgccccgctgccccaccgttaaggcaggtgatgcggccgacaagggggcggcgtccaggaacccacaaaatcacgtcgtggtggggaggcacgggattcggatccggccgtggccacacccggaccccatcgaggtgatgcgggcgcaacggatcatggagcgtgtgcaggaggaacagcgccgctggtacggcgtcaaggagccggggcaggtgctcgccgtcaccccgacctactcacgcgcgttccaggcgctccacctcaccggcctcctccactcactccgtcggaatccttgcgcatactggcaaggcagaccaactgctgctcagcgaggaggacaagcagaatatgcctcttccagtccatggccctgcttgcaagtcctcagggcatctgattggatggcacacgttcaactcattgcccttctctaggaagacggccacagttgttggtgaagcagcccctattctgcccagggatttctagtgggctagttttgtgttgaactcgaggatgctgtggaaggaggctgacggcaagcctgactgggtgaaggatcttgatgctgtgggcgagaactttgaggagcgctggttaaaggcatcaaagcgcagtgccgctaagaaactgtcaaaattgtcgaggtcgcataatgattcgctgctgtggatcaacaagatacctgatattatttctattgacgacgaaatctattcaaatgacgatgatccagagagatgggacatgcagattttccgatcaattgattcgaattctgtcaagggttttccaaaagatccacgggaggccactagtaagaatcttgtttgtgggaaaatgtactgattgatatgagcgtgcatacaacatatgtgaatgccatccgaggtgctcaacatttcatctatattgagaaccagtacttccttggctcttcatttaactgggattcacatagagatgttgaaaatgacaatgcaaattatgtatgagataatctataaggccatgaaagaagtaggactagatggtacatatgagccacaggattacctgaatttcttctgccttggtaaccgtgaagccgaggacactacttgcacatctagtggaccattctcaaccagtaacccacagagatccatggaaggaactagagatacagagattgcaatggctgcataccaaccccagcatacattggcaaatatgctttctgctcctcgtggatagattttcgggtacaggaaaatacagtgtacgtgttgaaactgttatcctgccccaggttgggatagacggtggtacattcgtgttggtagaactgtgagaagaaaagatgggaaaactttgctttcttggctgtgatgattatctgctcaaacaagacatgcaaattgcaaaactcttaaaggatagtattagttctatttgttcatatagttctacagctagttgtttcttgctttgttcatggattgcaatactggataagatcatgatggatgttgtgtgtgttttaatcaccatttctaaaatttattctattggtaagacgattctaagatataggtcggagatggattccttgcatatacataaatagataaagaagcaaccggtttataacaaaaatatgtcttctattttgcctgttgcccaattctcttttagtgtagcctacttacaataattaaaagaagagttggtgtctgtttgagtagacaactaagtgcatatataagtacgtgcatgattttgattactaattgtgattttgatgatctttcttttgaagacggtctaacatataagcgcatgatttagatgaacggaattactattgtgccatttctgaagaatcttactgatttctcttgccttcttagaacaacatgggaagaagtgatgatgacagtccatcgccgccaagaggtcacaagagaagaacttgcagcccaagtcctcgtggtagttatggaggccatggcaagcgccccacaactaatcttatggtgacgaatcttggtccggattgtaggattctaactctcatcaagtgactcctcccctcacgatgactttgcggacagatgtctcaattatagtggtggagctacgaacaacaatccgatgtcctgatcgagagcgatggagctaatgtttgaacttgtgtgtttgaacttgtgaactaaaaatgtgaactatggatgtgaatttatgtgaatttgtgaaattatgtatttgaacttatgtgaatttgtgaacttatgtatttggacttgtgtgaatttgtgatatgaatatatatccatgtgtttgaaatttgtattgtatgtgatattctgtgttgcatgtgattt

SEQ ID NO: 49513 - DNA, 2761 bp, Zea Mays
ccgcacgcgcccgtggctagctgccagccgcgcgcccgccgccaccccgcgcccaccccactgcgcgccggctggcgcgccgccacccagcgcggcccgccctcgccaccctgtggccccgccaccgccccgctgccccaccgttaaggcaggtgatgcggccgacaagggggcggcgtccaggaacccacaaaatcacgtcgtggtggggaggcacgggattcggatccggccgtggccacacccggaccccatcgaggtgatgcgggcgcaacggatcatggagcgtgtgcaggaggaacagcgccgctggtacggcgtcaaggagccggggcaggtgctcgccgtcaccccgacctactcacgcgcgttccaggcgctccacctcaccggcctcctccactcactccgtcggaatccttgcgcatactggcaaggcagaccaactgctgctcagcgaggaggacaagcagaatatgcctcttccagtccatggccctgcttgcaagtcctcagggcatctgattggatggcacacgttcaactcattgcccttctctaggaagacggccacagttgttggtgaagcagcccctattctgcccagggatttctagtgggctagttttgtgttgaactcgaggatgctgtggaaggaggctgacggcaagcctgactgggtgaaggatcttgatgctgtgggcgagaactttgaggagcgctggttaaaggcatcaaagcgcagtgccgctaagaaactgtcaaaattgtcgaggtcgcataatgattcgctgctgtggatcaacaagatacctgatattatttctattgacgacgaaatctattcaaatgacgatgatccagagagatgggacatgcagattttccgatcaattgattcgaattctgtcaagggttttccaaaagatccacgggaggccactagtaagaatcttgtttgtgggaaaatgtactgattgatatgagcgtgcatacaacatatgtgaatgccatccgaggtgctcaacatttcatctatattgagaaccagtacttccttggctcttcatttaactgggattcacatagagatgttggtgctaataatctgatacccactgagatagcactgaaaattgcaaacaagatttattcgaatgagagattttcagcttatatagtagttccaatgtggcctgagggcaatcctactggtactcttacgcaaagattctttattggcagaaaatgacaatgcaaattatgtatgagataatctataaggccatgaaagaagtaggactagatggtacatatgagccacaggattacctgaatttcttctgccttggtaaccgtgaagccgaggacactacttgcacatctagtggaccattctcaaccagtaacccacagcttggatatccaatcaggaccaagctcggaataataggagattcatggtgtatgtgcactcgaaaggcatgattgtggatgatgaatatgtgataattggatccgctaacatcaaccagagatccatggaaggaactagagatacagagattgcaatggctgcataccaaccccagcatacattggcaaatatgctttctgctcctcgtggatagattttcgggtacaggaaaatacagtgtacgtgttgaaactgttatcctgccccaggttgggatagacggtggtacattcgtgttggtagaactgtgagaagaaaagatgggaaaactttgctttcttggctgtgatgattatctgctcaaacaagacatgcaaattgcaaaactcttaaaggatagtattagttctatttgttcatatagttctacagctagttgtttcttgctttgttcatggattgcaatactggataagatcatgatggatgttgtgtgtgttttaatcaccatttctaaaatttattctattggtaagacgattctaagatataggtcggagatggattccttgcatatacataaatagataaagaagcaaccggtttataacaaaaatatgtcttctattttgcctgttgcccaattctcttttagtgtagcctacttacaataattaaaagaagagttggtgtctgtttgagtagacaactaagtgcatatataagtacgtgcatgattttgattactaattgtgattttgatgatctttcttttgaagacggtctaacatataagcgcatgatttagatgaacggaattactattgtgccatttctgaagaatcttactgatttctcttgccttcttagaacaacatgggaagaagtgatgatgacagtccatcgccgccaagaggtcacaagagaagaacttgcagcccaagtcctcgtggtagttatggaggccatggcaagcgccccacaactaatcttatggtgacgaatcttggtccggattgtaggattctaactctcatcaagtgactcctcccctcacgatgactttgcggacagatgtctcaattatagtggtggagctacgaacaacaatccgatgtcctgatcgagagcgatggagctaatgtttgaacttgtgtgtttgaacttgtgaactaaaaatgtgaactatggatgtgaatttatgtgaatttgtgaaattatgtatttgaacttatgtgaatttgtgaacttatgtatttggacttgtgtgaatttgtgatatgaatatatatccatgtgtttgaaatttgtattgtatgtgatattctgtgttgcatgtgattt

SEQ ID NO: 49514 - DNA, 2274 bp, Zea Mays
ccgcacgcgcccgtggctagctgccagccgcgcgcccgccgccaccccgcgcccaccccactgcgcgccggctggcgcgccgccacccagcgcggcccgccctcgccaccctgtggccccgccaccgccccgctgccccaccgttaaggcaggtgatgcggccgacaagggggcggcgtccaggaacccacaaaatcacgtcgtggtggggaggcacgggattcggatccggccgtggccacacccggaccccatcgaggtgatgcgggcgcaacggatcatggagcgtgtgcaggaggaacagcgccgctggtacggcgtcaaggagccggggcaggtgctcgccgtcaccccgacctactcacgcgcgttccaggcgctccacctcaccggcctcctccactcactccgtcggaatccttgcgcatactggcaaggcagaccaactgctgctcagcgaggaggacaagcagaatatgcctcttccagtccatggccctgcttgcaagtcctcagggcatctgattggatggcacacgttcaactcattgcccttctctaggaagacggccacagttgttggtgaagcagcccctattctgcccagggatttctagtgggctagttttgtgttgaactcgaggatgctgtggaaggaggctgacggcaagcctgactgggtgaaggatcttgatgctgtgggcgagaactttgaggagcgctggttaaaggcatcaaagcgcagtgccgctaagaaactgtcaaaattgtcgaggtcgcataatgattcgctgctgtggatcaacaagatacctgatattatttctattgacgacgaaatctattcaaatgacgatgatccagagagatgggacatgcagattttccgatcaattgattcgaattctgtcaagggttttccaaaagatccacgggaggccactagtaagaatcttgtttgtgggaaaatgtactgattgatatgagcgtgcatacaacatatgtgaatgccatccgaggtgctcaacatttcatctatattgagaaccagtacttccttggctcttcatttaactgggattcacatagagatgttgaaaatgacaatgcaaattatgtatgagataatctataaggccatgaaagaagtaggactagatggtacatatgagccacaggattacctgaatttcttctgccttggtaaccgtgaagccgaggacactacttgcacatctagtggaccattctcaaccagtaacccacagcttggatatccaatcaggaccaagctcggaataataggagattcatggtgtatgtgcactcgaaaggcatgattgtggatgatgaatatgtgataattggatccgctaacatcaaccagagatccatggaaggaactagagatacagagattgcaatggctgcataccaaccccagcatacattggcaaatatgctttctgctcctcgtggatagattttcgggtacaggaaaatacagtgtacgtgttgaaactgttatcctgccccaggttgggatagacggtggtacattcgtgttggtagaactgtgagaagaaaagatgggaaaactttgctttcttggctgtgatgattatctgctcaaacaagacatgcaaattgcaaaactcttaaaggatagtattagttctatttgttcatatagttctacagctagttgtttcttgctttgttcatggattgcaatactggataagatcatgatggatgttgtgtgtgttttaatcaccatttctaaaatttattctattgaacaacatgggaagaagtgatgatgacagtccatcgccgccaagaggtcacaagagaagaacttgcagcccaagtcctcgtggtagttatggaggccatggcaagcgccccacaactaatcttatggtgacgaatcttggtccggattgtaggattctaactctcatcaagtgactcctcccctcacgatgactttgcggacagatgtctcaattatagtggtggagctacgaacaacaatccgatgtcctgatcgagagcgatggagctaatgtttgaacttgtgtgtttgaacttgtgaactaaaaatgtgaactatggatgtgaatttatgtgaatttgtgaaattatgtatttgaacttatgtgaatttgtgaacttatgtatttggacttgtgtgaatttgtgatatgaatatatatccatgtgtttgaaatttgtattgtatgtgatattctgtgttgcatgtgattt

SEQ ID NO: 49515 - DNA, 381 bp, Zea Mays
tgagaacccacttactcagttgaatgatccgtcctctgttgagccactgggcaactgtgggaagaaggtcatattgtggtggcttcgtgttgaagcacgggctgatagcaagtttcctgaatggaaacaggcactatctttactcatcaccagaagacaatgatcttggatgctgatgctgggaatcatagaaggaagatcgttgctttcgtgggaggacatgatctatgtggaagccgatatgatacaccaaagcacactctatttcgaactcttcagacatttcacaaggaagactactacacccaaattttgcggttgaagatgctcgcggcccaagagagccatggcatgacttgcattccaagatcgacggtccag

SEQ ID NO: 49516 - DNA, 476 bp, Zea Mays
agaacaacatgggaagaagtgatgatgacagtccatcgccgccaagaggtcacaagagaagaacttgcagcccaagtcctcgtggtagttatggaggccatggcaagcgccccacaactaatcttatggtgacgaatcttggtccggattgtaggattctaactctcatcaagtgactcctcccctcacgatgactttgcggacagatgtctcaattatagtggtggagctacgaacaacaatccgatgtcctgatcgagagcgatggagctaatgtttgaacttgtgtgtttgaacttgtgaactaaaaatgtgaactatggatgtgaatttatgtgaatttgtgaaattatgtatttgaacttatgtgaatttgtgaacttatgtatttggacttgtgtgaatttgtgatatgaatatatatccatgtgtttgaaatttgtattgtatgtgatattctgtgttgcatgtgattt

SEQ ID NO: 49517 - DNA, 3582 bp, Zea Mays
cgcacattcatttttcacggtccgctagagtcacctaacaatacgcaaccctcgtcgaccgtcgtcctagttaagaatccgtgggcccgagagaacaattgctcggcccacgtctactcttcttggacgaggggcaaaagctgcgtcgaaacgggaggcgtggctctacgctagcacgctccacctcggacgtctcttctacctctccgtaacaaaggcgcacgggcaaagcggatcccctcttccactccgctgcctcacttccgccgcacgcgaccggaggcggctcaccgcgtagccgcgagcccaacccttgccccgcccgcccgtccttcattccttccggtggactagccgccgtacgcctcaggcagccatgtctccccccgagaatcccagccccgcggcgccggccgagccgtcgcagccgccgccaccggctgccgcggccaaggggaagcggaagaaggacgagaagaaggatgacgatctgtcggaggaggatctggcgctgaaggagcagctggagctctacgtcgtgcgggcgcaggatgcggatccgggcgtgcagaagctcgcgctcgagagcatgaggcaggagattcgctctgccacgagctcaatgacttcagttccaaagccgctgaaattcctccgcccacactttggaactctcaagtcctatttcgaaacaatgccagagtccgagctcaagaagtacatggctgacatactgtcagtgttagctttaacaatgtccgttgaaggagaaagagagagtctgaaataccgtttgctgggttctgaaggtgatattggttcatggggtcatgaatatgtgagaaatttggccggtgagattgcacaagaattccaaaagcgtcaggatgatgacttgcatgctctaatggtgctagtccagcaaattgtttcatttcacatgaagcataatgctgagcctgaagctgtggatcttcttatggaggttgaagaccttgatttactagttgagcatgtcgatgcaacaaactacaaaagagcttgtttgtaccttactagttcatccaaatttctccctgcccctgatgatagtttagcacttgacatagcgtataccatctatatgaagtttggagaccttgcaagtgctttgagaatttctctgcaacttgagaaatctgtgcagtatgtgaagcaagtctacacagcaactgatgatcttctgctgaagaaacagttctcttatctcattgcgcgccatggtttggctatggagattgatgacgagatctctactgatgataatgataaggaggctttacaagaaatagtaaataatactaagttgagtgagggatatcttactcttgctcgcgatattgaggtcatggagcctaaatccccagaggatatatacaaggtccatttgattgatggccgtggtgccagctccagtcttgattccgcaagacagaatttagctgcaacatttgtaaatgcatttgtgaatgctgggtttggcaaggacaagttgatgaccgctccatctgattcacccagcagcgggtcttccggaaattggttatttaagaacaaggaacatggaaaagccagtgcagcagctagtctgggaatgattctcctgtgggatactgattctgggctcgctcagcttgacaagtacttgcatagtaatgatactcatgttgtagctggagccttgctaggtattggaattgtcacttgcggggtgaagagtgattgtgatcctgcgtttgctattctcatggagtatattggcaaagatgactcaaacattcgtattggagcaatattgggtcttggaattgcatatgctggttcccagaaagaagagcttaaaatgcatctatctgctgtgctgggagactctcaatcacctcttgaagtattggtcttctcagccattgccttggggttggtgtttgttggttcttgcaatgaagagattgcacagtctattatatttgccttgatggagcgtagtgaggctgagttggcagagcccattatacggttgcttcctgttgcgcttggccttctataccttggaaaacaggatagtgtggaggctaccgcagaggtctctaaaacatttgatgaaaagatagggaagtactgtgatgtaacacttatgtcgctggcatatgccgggacaggaaatgtgcttaaggttcagaaacttcttggcatttgttcacagcatcttgagaaagtatggcgagcagaatataagacgagcagttcctcttgctcttggtatactctgcatatctaatcccaaggtgaatgttatggacacactgagtagattgagtcatgatgccgatgccgatgtgtcaatggctgcaattatctcattgggtttgattggtgctggcacaaacaatgccagaatagctgccatgcttcgcaatctttcaagttattactacaaagaagcagctcatctgttttgtgttagaattgctcagggccttgttcacctcggaaagggcttgttgaccctttctccgtaccattctgatagatttcttctttccccgatggcacttggagggcttgtaactgttctgcatgcgtgtcttgatatgaagtccactatcctagggaaatatcactacatactttacattattgtcctggcaatgcagcccaggatgcttttaactgtcgatgaggatctgaagcccctctcagtacctgtccgcgttgggcaagctgtggacgtggttggtcaggcaggaaggcctaagacaattaccggctttcagacacactccacaccagtcttgcttgcagcaggggagagagctgaactagcaactgaaaaatacatcccactgactccggtattagagggctttgtgattttgaagaagaacccggagtaccatgaagagtgaaacgctttagcatgccaaatagcatggtgtttcggaggctcgtgcacatggcagtcttcaagccctggcgcacccctcgtcgagaaatcgctcgccctttgctcaacccttcgcctggagttcatgttgaattcttaccagagttgtggctaactgaaagctgtcttcggttgtgctgatatacgattgtatctgtacgattgtagcaattactgggacagcttactctgtatggtgtggtgataacgtggcatagcatttttggcgctggtctaggttagtccttgtgttgacatggtgcaccatcattataagttttctgtattttatggatccgttctgttcgtgtgtactggaaacattgtacacatgatatgtaagtgtgcctccatgtgtatgtgtgccttcgtgtgtgttttggttttgtctttagcatggcttttgtccccttaaaaccaaaagacaaatcaaagcgctcgaagcaactttttccaaatatatatggaagaacttttagggctgatttggtgatgggttttttacattggtccccttagttgtccaccactgctcattgctacccttaatttttgttcctcctcagttttgcccacgaatccttctctccactcagaaa

SEQ ID NO: 49518 - DNA, 3671 bp, Zea Mays
atttttcacggtccgctagagtcacctaacaatacgcaaccctcgtcgaccgtcgtcctagttaagaatccgtgggcccgagagaacaattgctcggcccacgtctactcttcttggacgaggggcaaaagctgcgtcgaaacgggaggcgtggctctacgctagcacgctccacctcggacgtctcttctacctctccgtaacaaaggcgcacgggcaaagcggatcccctcttccactccgctgcctcacttccgccgcacgcgaccggaggcggctcaccgcgtagccgcgagcccaacccttgccccgcccgcccgtccttcattccttccggtggactagccgccgtacgcctcaggcagccatgtctccccccgagaatcccagccccgcggcgccggccgagccgtcgcagccgccgccaccggctgccgcggccaaggggaagcggaagaaggacgagaagaaggatgacgatctgtcggaggaggatctggcgctgaaggagcagctggagctctacgtcgtgcgggcgcaggatgcggatccgggcgtgcagaagctcgcgctcgagagcatgaggcaggagattcgctctgccacgagctcaatgacttcagttccaaagccgctgaaattcctccgcccacactttggaactctcaagtcctatttcgaaacaatgccagagtccgagctcaagaagtacatggctgacatactgtcagtgttagctttaacaatgtccgttgaaggagaaagagagagtctgaaataccgtttgctgggttctgaaggtgatattggttcatggggtcatgaatatgtgagaaatttggccggtgagattgcacaagaattccaaaagcgtcaggatgatgacttgcatgctctaatggtgctagtccagcaaattgtttcatttcacatgaagcataatgctgagcctgaagctgtggatcttcttatggaggttgaagaccttgatttactagttgagcatgtcgatgcaacaaactacaaaagagcttgtttgtaccttactagttcatccaaatttctccctgcccctgatgatagtttagcacttgacatagcgtataccatctatatgaagtttggagaccttgcaagtgctttgagaatttctctgcaacttgagaaatctgtgcagtatgtgaagcaagtctacacagcaactgatgatcttctgctgaagaaacagttctcttatctcattgcgcgccatggtttggctatggagattgatgacgagatctctactgatgataatgataaggaggctttacaagaaatagtaaataatactaagttgagtgagggatatcttactcttgctcgcgatattgaggtcatggagcctaaatccccagaggatatatacaaggtccatttgattgatggccgtggtgccagctccagtcttgattccgcaagacagaatttagctgcaacatttgtaaatgcatttgtgaatgctgggtttggcaaggacaagttgatgaccgctccatctgattcacccagcagcgggtcttccggaaattggttatttaagaacaaggaacatggaaaagccagtgcagcagctagtctgggaatgattctcctgtgggatactgattctgggctcgctcagcttgacaagtacttgcatagtaatgatactcatgttgtagctggagccttgctaggtattggaattgtcacttgcggggtgaagagtgattgtgatcctgcgtttgctattctcatggagtatattggcaaagatgactcaaacattcgtattggagcaatattgggtcttggaattgcatatgctggttcccagaaagaagagcttaaaatgcatctatctgctgtgctgggagactctcaatcacctcttgaagtattggtcttctcagccattgccttggggttggtgtttgttggttcttgcaatgaagagattgcacagtctattatatttgccttgatggagcgtagtgaggctgagttggcagagcccattatacggttgcttcctgttgcgcttggccttctataccttggaaaacaggatagtgtggaggctaccgcagaggtctctaaaacatttgatgaaaagatagggaagtactgtgatgtaacacttatgtcgctggcatatgccgggacaggaaatgtgcttaagaaacttcttggcatttgttcacagcatcttgagaaaggtgaaacacaccaagggccagctgtccttggaattgctcttattgctatggctgaagaattaggagctgaaatggctgtacgttcacttgagcgtcttctgcagtatggcgagcagaatataagacgagcagttcctcttgctcttggtatactctgcatatctaatcccaaggtgaatgttatggacacactgagtagattgagtcatgatgccgatgccgatgtgtcaatggctgcaattatctcattgggtttgattggtgctggcacaaacaatgccagaatagctgccatgcttcgcaatctttcaagttattactacaaagaagcagctcatctgttttgtgttagaattgctcagggccttgttcacctcggaaagggcttgttgaccctttctccgtaccattctgatagatttcttctttccccgatggcacttggagggcttgtaactgttctgcatgcgtgtcttgatatgaagtccactatcctagggaaatatcactacatactttacattattgtcctggcaatgcagcccaggatgcttttaactgtcgatgaggatctgaagcccctctcagtacctgtccgcgttgggcaagctgtggacgtggttggtcaggcaggaaggcctaagacaattaccggctttcagacacactccacaccagtcttgcttgcagcaggggagagagctgaactagcaactgaaaaatacatcccactgactccggtattagagggctttgtgattttgaagaagaacccggagtaccatgaagagtgaaacgctttagcatgccaaatagcatggtgtttcggaggctcgtgcacatggcagtcttcaagccctggcgcacccctcgtcgagaaatcgctcgccctttgctcaacccttcgcctggagttcatgttgaattcttaccagagttgtggctaactgaaagctgtcttcggttgtgctgatatacgattgtatctgtacgattgtagcaattactgggacagcttactctgtatggtgtggtgataacgtggcatagcatttttggcgctggtctaggttagtccttgtgttgacatggtgcaccatcattataagttttctgtattttatggatccgttctgttcgtgtgtactggaaacattgtacacatgatatgtaagtgtgcctccatgtgtatgtgtgccttcgtgtgtgttttggttttgtctttagcatggcttttgtccccttaaaaccaaaagacaaatcaaagcgctcgaagcaactttttccaaatatatatggaagaacttttagggctgatttggtgatgggttttttacattggtccccttagttgtccaccactgctcattgctacccttaatttttgttcctcctcagttttgcccacgaatccttctctccactcagaaa

SEQ ID NO: 49519 - DNA, 3571 bp, Zea Mays
ctcttcttggacgaggggcaaaagctgcgtcgaaacgggaggcgtggctctacgctagcacgctccacctcggacgtctcttctacctctccgtaacaaaggcgcacgggcaaagcggatcccctcttccactccgctgcctcacttccgccgcacgcgaccggaggcggctcaccgcgtagccgcgagcccaacccttgccccgcccgcccgtccttcattccttccggtggactagccgccgtacgcctcaggcagccatgtctccccccgagaatcccagccccgcggcgccggccgagccgtcgcagccgccgccaccggctgccgcggccaaggggaagcggaagaaggacgagaagaaggatgacgatctgtcggaggaggatctggcgctgaaggagcagctggagctctacgtcgtgcgggcgcaggatgcggatccgggcgtgcagaagctcgcgctcgagagcatgaggcaggagattcgctctgccacgagctcaatgacttcagttccaaagccgctgaaattcctccgcccacactttggaactctcaagtcctatttcgaaacaatgccagagtccgagctcaagaagtacatggctgacatactgtcagtgttagctttaacaatgtccgttgaaggagaaagagagagtctgaaataccgtttgctgggttctgaaggtgatattggttcatggggtcatgaatatgtgagaaatttggccggtgagattgcacaagaattccaaaagcgtcaggatgatgacttgcatgctctaatggtgctagtccagcaaattgtttcatttcacatgaaggcataatgctgagcctgaagctgtggatcttcttatggaggttgaagaccttgatttactagttgagcatgtcgatgcaacaaactacaaaagagcttgtttgtaccttactagttcatccaaatttctccctgcccctgatgatagtttagcacttgacatagcgtataccatctatatgaagtttggagaccttgcaagtgctttgagaatttctctgcaacttgagaaatctgtgcagtatgtgaagcaagtctacacagcaactgatgatcttctgctgaagaaacagttctcttatctcattgcgcgccatggtttggctatggagattgatgacgagatctctactgatgataatgataaggaggctttacaagaaatagtaaataatactaagttgagtgagggatatcttactcttgctcgcgatattgaggtcatggagcctaaatccccagaggatatatacaaggtccatttgattgatggccgtggtgccagctccagtcttgattccgcaagacagaatttagctgcaacatttgtaaatgcatttgtgaatgctgggtttggcaaggacaagttgatgaccgctccatctgattcacccagcagcgggtcttccggaaattggttatttaagaacaaggaacatggaaaagccagtgcagcagctagtctgggaatgattctcctgtgggatactgattctgggctcgctcagcttgacaagtacttgcatagtaatgatactcatgttgtagctggagccttgctaggtattggaattgtcacttgcggggtgaagagtgattgtgatcctgcgtttgctattctcatggagtatattggcaaagatgactcaaacattcgtattggagcaatattgggtcttggaattgcatatgctggttcccagaaagaagagcttaaaatgcatctatctgctgtgctgggagactctcaatcacctcttgaagtattggtcttctcagccattgccttggggttggtgtttgttggttcttgcaatgaagagattgcacagtctattatatttgccttgatggagcgtagtgaggctgagttggcagagcccattatacggttgcttcctgttgcgcttggccttctataccttggaaaacaggatagtgtggaggctaccgcagaggtctctaaaacatttgatgaaaagatagggaagtactgtgatgtaacacttatgtcgctggcatatgccgggacaggaaatgtgcttaaggttcagaaacttcttggcatttgttcacagcatcttgagaaaggtgaaacacaccaagggccagctgtccttggaattgctcttattgctatggctgaagaattaggagctgaaatggctgtacgttcacttgagcgtcttctgcagtatggcgagcagaatataagacgagcagttcctcttgctcttggtatactctgcatatctaatcccaaggtgaatgttatggacacactgagtagattgagtcatgatgccgatgccgatgtgtcaatggctgcaattatctcattgggtttgattggtgctggcacaaacaatgccagaatagctgccatgcttcgcaatctttcaagttattactacaaagaagcagctcatctgttttgtgttagaattgctcagggccttgttcacctcggaaagggcttgttgaccctttctccgtaccattctgatagatttcttctttccccgatggcacttggagggcttgtaactgttctgcatgcgtgtcttgatatgaagtccactatcctagggaaatatcactacatactttacattattgtcctggcaatgcagcccaggatgcttttaactgtcgatgaggatctgaagcccctctcagtacctgtccgcgttgggcaagctgtggacgtggttggtcaggcaggaaggcctaagacaattaccggctttcagacacactccacaccagtcttgcttgcagcaggggagagagctgaactagcaactgaaaaatacatcccactgactccggtattagagggctttgtgattttgaagaagaacccggagtaccatgaagagtgaaacgctttagcatgccaaatagcatggtgtttcggaggctcgtgcacatggcagtcttcaagccctggcgcacccctcgtcgagaaatcgctcgccctttgctcaacccttcgcctggagttcatgttgaattcttaccagagttgtggctaactgaaagctgtcttcggttgtgctgatatacgattgtatctgtacgattgtagcaattactgggacagcttactctgtatggtgtggtgataacgtggcatagcatttttggcgctggtctaggttagtccttgtgttgacatggtgcaccatcattataagttttctgtattttatggatccgttctgttcgtgtgtactggaaacattgtacacatgatatgtaagtgtgcctccatgtgtatgtgtgccttcgtgtgtgttttggttttgtctttagcatggcttttgtccccttaaaaccaaaagacaaatcaaagcgctcgaagcaactttttccaaatatatatggaagaacttttagggctgatttggtgatgggttttttacattggtccccttagttgtccaccactgctcattgctacccttaatttttgttcctcctcagttttgcccacgaatccttctctccactcagaaa

SEQ ID NO: 49520 - DNA, 3572 bp, Zea Mays
ctcttcttggacgaggggcaaaagctgcgtcgaaacgggaggcgtggctctacgctagcacgctccacctcggacgtctcttctacctctccgtaacaaaggcgcacgggcaaagcggatcccctcttccactccgctgcctcacttccgccgcacgcgaccggaggcggctcaccgcgtagccgcgagcccaacccttgccccgcccgcccgtccttcattccttccggtggactagccgccgtacgcctcaggcagccatgtctccccccgagaatcccagccccgcggcgccggccgagccgtcgcagccgccgccaccggctgccgcggccaaggggaagcggaagaaggacgagaagaaggatgacgatctgtcggaggaggatctggcgctgaaggagcagctggagctctacgtcgtgcgggcgcaggatgcggatccgggcgtgcagaagctcgcgctcgagagcatgaggcaggagattcgctctgccacgagctcaatgacttcagttccaaagccgctgaaattcctccgcccacactttggaactctcaagtcctatttcgaaacaatgccagagtccgagctcaagaagtacatggctgacatactgtcagtgttagctttaacaatgtccgttgaaggagaaagagagagtctgaaataccgtttgctgggttctgaaggtgatattggttcatggggtcatgaatatgtgagaaatttggccggtgagattgcacaagaattccaaaagcgtcaggatgatgacttgcatgctctaatggtgctagtccagcaaattgtttcatttcacatgaagagcataatgctgagcctgaagctgtggatcttcttatggaggttgaagaccttgatttactagttgagcatgtcgatgcaacaaactacaaaagagcttgtttgtaccttactagttcatccaaatttctccctgcccctgatgatagtttagcacttgacatagcgtataccatctatatgaagtttggagaccttgcaagtgctttgagaatttctctgcaacttgagaaatctgtgcagtatgtgaagcaagtctacacagcaactgatgatcttctgctgaagaaacagttctcttatctcattgcgcgccatggtttggctatggagattgatgacgagatctctactgatgataatgataaggaggctttacaagaaatagtaaataatactaagttgagtgagggatatcttactcttgctcgcgatattgaggtcatggagcctaaatccccagaggatatatacaaggtccatttgattgatggccgtggtgccagctccagtcttgattccgcaagacagaatttagctgcaacatttgtaaatgcatttgtgaatgctgggtttggcaaggacaagttgatgaccgctccatctgattcacccagcagcgggtcttccggaaattggttatttaagaacaaggaacatggaaaagccagtgcagcagctagtctgggaatgattctcctgtgggatactgattctgggctcgctcagcttgacaagtacttgcatagtaatgatactcatgttgtagctggagccttgctaggtattggaattgtcacttgcggggtgaagagtgattgtgatcctgcgtttgctattctcatggagtatattggcaaagatgactcaaacattcgtattggagcaatattgggtcttggaattgcatatgctggttcccagaaagaagagcttaaaatgcatctatctgctgtgctgggagactctcaatcacctcttgaagtattggtcttctcagccattgccttggggttggtgtttgttggttcttgcaatgaagagattgcacagtctattatatttgccttgatggagcgtagtgaggctgagttggcagagcccattatacggttgcttcctgttgcgcttggccttctataccttggaaaacaggatagtgtggaggctaccgcagaggtctctaaaacatttgatgaaaagatagggaagtactgtgatgtaacacttatgtcgctggcatatgccgggacaggaaatgtgcttaaggttcagaaacttcttggcatttgttcacagcatcttgagaaaggtgaaacacaccaagggccagctgtccttggaattgctcttattgctatggctgaagaattaggagctgaaatggctgtacgttcacttgagcgtcttctgcagtatggcgagcagaatataagacgagcagttcctcttgctcttggtatactctgcatatctaatcccaaggtgaatgttatggacacactgagtagattgagtcatgatgccgatgccgatgtgtcaatggctgcaattatctcattgggtttgattggtgctggcacaaacaatgccagaatagctgccatgcttcgcaatctttcaagttattactacaaagaagcagctcatctgttttgtgttagaattgctcagggccttgttcacctcggaaagggcttgttgaccctttctccgtaccattctgatagatttcttctttccccgatggcacttggagggcttgtaactgttctgcatgcgtgtcttgatatgaagtccactatcctagggaaatatcactacatactttacattattgtcctggcaatgcagcccaggatgcttttaactgtcgatgaggatctgaagcccctctcagtacctgtccgcgttgggcaagctgtggacgtggttggtcaggcaggaaggcctaagacaattaccggctttcagacacactccacaccagtcttgcttgcagcaggggagagagctgaactagcaactgaaaaatacatcccactgactccggtattagagggctttgtgattttgaagaagaacccggagtaccatgaagagtgaaacgctttagcatgccaaatagcatggtgtttcggaggctcgtgcacatggcagtcttcaagccctggcgcacccctcgtcgagaaatcgctcgccctttgctcaacccttcgcctggagttcatgttgaattcttaccagagttgtggctaactgaaagctgtcttcggttgtgctgatatacgattgtatctgtacgattgtagcaattactgggacagcttactctgtatggtgtggtgataacgtggcatagcatttttggcgctggtctaggttagtccttgtgttgacatggtgcaccatcattataagttttctgtattttatggatccgttctgttcgtgtgtactggaaacattgtacacatgatatgtaagtgtgcctccatgtgtatgtgtgccttcgtgtgtgttttggttttgtctttagcatggcttttgtccccttaaaaccaaaagacaaatcaaagcgctcgaagcaactttttccaaatatatatggaagaacttttagggctgatttggtgatgggttttttacattggtccccttagttgtccaccactgctcattgctacccttaatttttgttcctcctcagttttgcccacgaatccttctctccactcagaaa

SEQ ID NO: 49521 - DNA, 1851 bp, Zea Mays
gttcagtcaggatggaaggcttatagtacattcctccttctgggccgtaccgcgcggaccttcaaagcctgtatcatgctgcatcttccttccctggggccagcctcgtcaactccgcttccggttctggcccattggcgttgcttcacatcgacgcgcctgcgccgccggtccgccgcgccttcccctcccttctcccccgcgtgccctcctattccttctctgcggcggcgtggggagctgcatctgccttcgtctggaggagtgggaagaagcgctgccgaaggggtgatttacgaagccagagagcggctgggagcaagagtgcctgggactgggagttgaagctagagaggctagttgcttgtttggtgcgctgccaaaccgccctcaacatctgacccgtctctccctcacttccacggttccagcgagcggcgcaaccgcgcaactgagcagctagcatgggggacgaagaagatgatcctgactggctccgcgcgtttcagatacctcccctgaagctagtcctacaagaaccagtacatctagaaaacaaaacaagggagagaagcacgctagtccagatcatgcacgtgatagagatggtgcttcacaaaataaaaacaaaatctcagcagctactagaagaaaaaaccttgtcagtaaaaaagaggggtcaactatggatgaaaaacaagctaatactcctagacgcttgactccaaagaaggatatggtaacactttcatctggttctgatgcttcaccgggaaacagcctttcgagggcccatgaagataaccatgaagagggctcacttagcactgccaagagaaagaatgctcaacaaactaagactaaaaaaacaaaggatgctggaacaaaaactggtgcagaccaagcagggaatggagatgctgaggatgatgtgcaagataaactcacagggaactctgtctcccagaggttaccattaatatttccagataaagttcaacgttcaaaggcattgattgaatgtgatggtgactcgatagatttaagtggagatattggtgcggttgggaggatagtagtttcaaatggtcctactgcaaaacaggatttgttgttggacctgaaaggaacaatatacaaaacaactatagttccatccaggacattttgtgttgtgagtgtgggacaatcagaagcaaagatagaggctataatgaatgacttcattcaactggaaccacaatccaatttatttgaagcagagactatggtggaaggtacccttgatggattcacatttgattcagatgaggagggtgacaaactctatgaaccacaggctaatcaaaacgatctgaataataacgaagatgaaggtcaacctaaggcaaagaccaaaaggaaagcagagaaaacaacggggaaggcaccgaagaaggcgaaggttgcaggaaagggccctaaaaagggcacgaggaaaacccaacctgcgaagagaggtaggaaggctaagaaatgatgacatgttgatttcctcggataagaagaaaaagtctattgagaacctggatagctggcaacaaagatgtgaatttttcaacgcatagtcatggctgtgaggcgcgtcgtcagttcaacatcatgcagtacttgttttagagagagagaacatgtaaagctgtaaacgttgttgtgtactctatgagcgttcagctttggatcattgaaaagaccgagatgttcacgtggaggcgaactgacttctctattttttttcacaaattaaaatctatcagtaaggctttgttcgtttatgccggattggtggatcgaaacgattcctaactggat

SEQ ID NO: 49522 - DNA, 1762 bp, Zea Mays
cttcaaagcctgtatcatgctgcatcttccttccctggggccagcctcgtcaactccgcttccggttctggcccattggcgttgcttcacatcgacgcgcctgcgccgccggtccgccgcgccttcccctcccttctcccccgcgtgccctcctattccttctctgcggcggcgtggggagctgcatctgccttcgtctggaggagtgggaagaagcgctgccgaaggggtgatttacgaagccagagagcggctgggagcaagagtgcctgggactgggagttgaagctagagaggctagttgcttgtttggtgcgctgccaaaccgccctcaacatctgacccgtctctccctcacttccacggttccagcgagcggcgcaaccgcgcaactgagcagctagcatgggggacgaagaagatgatcctgactggctccgcgcgtttcagatacctcccctgaagctagtcctacaagaaccagtacatctagaaaacaaaacaagggagagaagcacgctagtccagatcatgcacgtgatagagatggtgcttcacaaaataaaaacaaaatctcagcagctactagaagaaaaaaccttgtcagtaaaaaagaggggtcaactatggatgaaaaacaagctaatactcctagacgcttgactccaaagaaggatatggtaacactttcatctggttctgatgcttcaccgggaaacagcctttcgagggcccatgaagataaccatgaagagggctcacttagcactgccaagagaaagaatgctcaacaaactaagactaaaaaaacaaaggatgctggaacaaaaactggtgcagaccaagcagggaatggagatgctgaggatgatgtgcaagataaactcacagggaactctgtctcccagaggttaccattaatatttccagataaagttcaacgttcaaaggcattgattgaatgtgatggtgactcgatagatttaagtggagatattggtgcggttgggaggatagtagtttcaaatggtcctactgcaaaacaggatttgttgttggacctgaaaggaacaatatacaaaacaactatagttccatccaggacattttgtgttgtgagtgtgggacaatcagaagcaaagatagaggctataatgaatgacttcattcaactggaaccacaatccaatttatttgaagcagagactatggtggaagatgaggagggtgacaaactctatgaaccacaggctaatcaaaacgatctgaataataacgaagatgaaggtcaacctaaggcaaagaccaaaaggaaagcagagaaaacaacggggaaggcaccgaagaaggcgaaggttgcaggaaagggccctaaaaagggcacgaggaaaacccaacctgcgaagagaggtaggaaggctaagaaatgatgacatgttgatttcctcggataagaagaaaaagtctattgagaacctggatagctggcaacaaagatgtgaatttttcaacgcatagtcatggctgtgaggcgcgtcgtcagttcaacatcatgcagtacttgttttagagagagagaacatgtaaagctgtaaacgttgttgtgtactctatgagcgttcagctttggatcattgaaaagaccgagatgttcacgtggaggcgaactgacttctctattttttttcacaaattaaaatctatcagtaaggctttgttcgtttatgccggattggtggatcgaaacgattcctaactggat

SEQ ID NO: 49523 - DNA, 1627 bp, Zea Mays
cttcaaagcctgtatcatgctgcatcttccttccctggggccagcctcgtcaactccgcttccggttctggcccattggcgttgcttcacatcgacgcgcctgcgccgccggtccgccgcgccttcccctcccttctcccccgcgtgccctcctattccttctctgcggcggcgtggggagctgcatctgccttcgtctggaggagtgggaagaagcgctgccgaaggggtgatttacgaagccagagagcggctgggagcaagagtgcctgggactgggagttgaagctagagaggctagttgcttgtttggtgcgctgccaaaccgccctcaacatctgacccgtctctccctcacttccacggttccagcgagcggcgcaaccgcgcaactgagcagctagcatgggggacgaagaagatgatcctgactggctccgcgcgtttcagaggggtcaactatggatgaaaaacaagctaatactcctagacgcttgactccaaagaaggatatggtaacactttcatctggttctgatgcttcaccgggaaacagcctttcgagggcccatgaagataaccatgaagagggctcacttagcactgccaagagaaagaatgctcaacaaactaagactaaaaaaacaaaggatgctggaacaaaaactggtgcagaccaagcagggaatggagatgctgaggatgatgtgcaagataaactcacagggaactctgtctcccagaggttaccattaatatttccagataaagttcaacgttcaaaggcattgattgaatgtgatggtgactcgatagatttaagtggagatattggtgcggttgggaggatagtagtttcaaatggtcctactgcaaaacaggatttgttgttggacctgaaaggaacaatatacaaaacaactatagttccatccaggacattttgtgttgtgagtgtgggacaatcagaagcaaagatagaggctataatgaatgacttcattcaactggaaccacaatccaatttatttgaagcagagactatggtggaaggtacccttgatggattcacatttgattcagatgaggagggtgacaaactctatgaaccacaggctaatcaaaacgatctgaataataacgaagatgaaggtcaacctaaggcaaagaccaaaaggaaagcagagaaaacaacggggaaggcaccgaagaaggcgaaggttgcaggaaagggccctaaaaagggcacgaggaaaacccaacctgcgaagagaggtaggaaggctaagaaatgatgacatgttgatttcctcggataagaagaaaaagtctattgagaacctggatagctggcaacaaagatgtgaatttttcaacgcatagtcatggctgtgaggcgcgtcgtcagttcaacatcatgcagtacttgttttagagagagagaacatgtaaagctgtaaacgttgttgtgtactctatgagcgttcagctttggatcattgaaaagaccgagatgttcacgtggaggcgaactgacttctctattttttttcacaaattaaaatctatcagtaaggctttgttcgtttatgccggattggtggatcgaaacgattcctaactggat

SEQ ID NO: 49524 - DNA, 1597 bp, Zea Mays
cttcaaagcctgtatcatgctgcatcttccttccctggggccagcctcgtcaactccgcttccggttctggcccattggcgttgcttcacatcgacgcgcctgcgccgccggtccgccgcgccttcccctcccttctcccccgcgtgccctcctattccttctctgcggcggcgtggggagctgcatctgccttcgtctggaggagtgggaagaagcgctgccgaaggggtgatttacgaagccagagagcggctgggagcaagagtgcctgggactgggagttgaagctagagaggctagttgcttgtttggtgcgctgccaaaccgccctcaacatctgacccgtctctccctcacttccacggttccagcgagcggcgcaaccgcgcaactgagcagctagcatgggggacgaagaagatgatcctgactggctccgcgcgtttcagaggggtcaactatggatgaaaaacaagctaatactcctagacgcttgactccaaagaaggatatggtaacactttcatctggttctgatgcttcaccgggaaacagcctttcgagggcccatgaagataaccatgaagagggctcacttagcactgccaagagaaagaatgctcaacaaactaagactaaaaaaacaaaggatgctggaacaaaaactggtgcagaccaagcagggaatggagatgctgaggatgatgtgcaagataaactcacagggaactctgtctcccagaggttaccattaatatttccagataaagttcaacgttcaaaggcattgattgaatgtgatggtgactcgatagatttaagtggagatattggtgcggttgggaggatagtagtttcaaatggtcctactgcaaaacaggatttgttgttggacctgaaaggaacaatatacaaaacaactatagttccatccaggacattttgtgttgtgagtgtgggacaatcagaagcaaagatagaggctataatgaatgacttcattcaactggaaccacaatccaatttatttgaagcagagactatggtggaagatgaggagggtgacaaactctatgaaccacaggctaatcaaaacgatctgaataataacgaagatgaaggtcaacctaaggcaaagaccaaaaggaaagcagagaaaacaacggggaaggcaccgaagaaggcgaaggttgcaggaaagggccctaaaaagggcacgaggaaaacccaacctgcgaagagaggtaggaaggctaagaaatgatgacatgttgatttcctcggataagaagaaaaagtctattgagaacctggatagctggcaacaaagatgtgaatttttcaacgcatagtcatggctgtgaggcgcgtcgtcagttcaacatcatgcagtacttgttttagagagagagaacatgtaaagctgtaaacgttgttgtgtactctatgagcgttcagctttggatcattgaaaagaccgagatgttcacgtggaggcgaactgacttctctattttttttcacaaattaaaatctatcagtaaggctttgttcgtttatgccggattggtggatcgaaacgattcctaactggat

SEQ ID NO: 49525 - DNA, 1198 bp, Zea Mays
aaccaataaccactgcaagggtgaagttgttctagtgttccagccagtgttaatcctctcccttactgcagagttaagttgttcctgagctgagtgtcaacctcctgtgtggtgaccagggtcatccaagtgcccacctcgccgcggtcaagcaatcacaagcgattccccagctgtacagtgcatgtttcgtgttctccttagaacacctaaacgaggtggtatttgaagaagtctactccaatgcctgctcctcaagtggatgaagccatctaactgggtattggatagagggatctagaaccacttcactgcaacaaaggcaagccctggtgcatgcaaccccttccttgtgtttttaaattatttttacacactttaagtctagtgaatgtgcattaggtttataggagttgcttggaaaccctttgatgcattgtcttccttgatatccatacctttatagatacttctggtgaagtatcaaaatatgatttataaaaatgcttagccctgcttagatcttgtggatagaagttgtctttcgcaataaggcctagctcaggggttatcctgaggaaagatggcttctacctgcaagaatattttcattgagagcgtggtgggatcttactataaagttccctttgatgctcttttcatcctaaggaatacaaacaatcctaagggtggaagtacttaaatcgggacttgggctaggaacaggtgatgctccgcccagattaattaatgattggatgcgtatgtaggcctgttgatcaaggactatcttaactagccacatgccctggaaatgggacaggataagcttgaacccgactattccatacgtgaaaagacaaccgcgcactaggcgtgggagatggtgggagtagcgtgtaccctcctggctaaaggcaggatggaggagtactgtgctcccgggtagcgcggacccgttcacgttgtggaggatctgtgggaacggttgacatatgcaagggttaagtgctacatatgtcgtgtggttagagatcctcagctgagtaaatcgattcggatcgccgttatatccccggagagtggagacttgatctccgacctgcaacctaagtcaggatgtgaacctcatgaataaaaatgatgttgtattgatgagatggtgaaattagactagatgcaaacagagtctattaat

SEQ ID NO: 49526 - DNA, 2842 bp, Zea Mays
gcagcaacaccgcccccggcctcgctttgcagccccctccctccaccgcctcctccacgccctagcgctccggcccccgccccgagctcgtcgtggccggctgcgctgcggtgcccgcacctgtgggggcgtgcgggccggtggtgaaacgacccgcgacctcggtgcctctcgacgtctgcccgcttcctcgccggcgccattttgtctaaatcccctgtgataagcaccactgctcgtgatgcattcttcggaaaataaactgggttggaatgagacctctatggggttggttcctgtaccaaaaagaccagctagacctgatgcttcccaccaatgcaaatctgattcctttatgaagcgatcaccaaggaaagttagaaatgctactctggcaaaaagcataaagagcaaataccactatagtcccctcaaacagcggaagggttcagattctgttcctgggaaaatcgtaacaggactaaccgcaaggaaaaagaagaaaaggaaaatccaaattacagacgaggcaactcgtttggaacgaagagcgagatattttctaatcaagataaaactggagcagaatttgctagatgcttactctggagatggatggaatgggcaaagccgagagaaaataaagccagagaaggaactgcaacgtgccaggaaacaaatcataaaatgcaaaattgctatacgtgatatcatccgccaacttgatttgtatacttctactgggagtgttgatgacccactaatgcctacagatcagtccaccaatcccgaacataccatgtgctcaacatgcaagtctcatgaatcatttcccagcaataaaattatcttctgcaaagggccctgcaaaagggcatgtcatgagaaatgtttggaacctcccttaaacaaaagcgtacttccaacaagtagccatgggtggctttgcaaattctgtttgtgcaaggtgaggattttagaaactattaatgcacatctagggacgagttttacagtgaagtgccactttgaagatatattcaaggaaactactgaactaatagactctgaggatgcactagatgaagattggctttctgagtattcaggtgatgaggactatgatcctgatgaaaatgaggccagtggcgactgtatggacagcggggagaagattatgtctgatgattccaatggttcaggaagccccctttattctccaaatgacgatattcctgacttcatatcagcagacttaaatgttgtggaagggttttgtcataccaatttagatttaggcattgatgccgttgaagatgattttgcacagatcctcacctaccaaaggccaagaagagatgttgattatagaaggcttaacgaggaaatgtttgggaaaataaccgggaatgaagaacagagcgaggacgaagattggggccatgaaaggagaaagaaaaggacacattcaggtgttgctggggataattctgttggtttcttgaacgttatatctgatgaaaagagccagaagaaggggagaaaacttttcaggattcctcctgcagctgttgaggtacttcgcagagcttttgctgaaaatgagcttccaccccgggatgttaaagaaaatctctcaagagaattgggaatttcttttgaaaagattgataaatggttcaaaaatacacggtgtgctgctctcagagatcggaaggctgaaggaaacagtcataatacagctcccagcaaaagctcaaaaaataaaggaaaagctggaatctcaggcaagactggaaggaatggtcatgttactggtccctgcaataatttgagaacaaatgaagaaaaaacaggtatatcggggaagtttgattcaggagacaactcttgtttggttcccttctctgaagtcatcaatgtgcctacgcgattgccacacaactttgagatgaggaagatggaatcaactagaagtcctgcgaggctacacaataaaggagggttcctgtctgcaacagtccaaattaaggagagtacgttgttacccacaggcaagccttgttggcagtcagaaatgagccatccaacaactaatgaagtgagcacttcagcgcaagctactacttggatcgacgcgggggcgtgtgccgaggagcaagaacctactccttgggtggacatcggggtctcagactaccagcctttcctggatgtgatcgacgacatgtgcggacttgagtggaggctgcagagactgaaggagaacatgctctcatctagcatagacggccaaaccgccgccagtgagagtgacaaaagaaaccagaccgtggtgctagtgccaaccgccgagctcaaggaaaagctgccgcatgacggtttattcgggcattattgcccataggtcttatatacatagcggataaactgtacagagaaccaagaagaagaagaaaacaaaagggaaacagcaaacagacaggtgcccgcttacataccggtccatactgtcaggcactactctcctttcttgggcctcgacacgactaatactgtgctagtccagaacagatgagccatagccattacctgtgtgcctcccaggttcagttcatatgttgtatgtattaatgtatatcagaagagtcgtgcttagtagtagcaagaacctagtcctgatccagaccgtgaatctggatcatcttgtcctgtggttgtaccgtgcagaacagacagatgtcggctagtcgtttggttctgaagtaagaaactataagcatgcgtgattttggcccgttgcgtgacaaaaaaaaaagaggtggtgaggcgcaggtttgta

SEQ ID NO: 49527 - DNA, 1134 bp, Zea Mays
tagctccccaggtgagggaggtgctggccagggatcaaatcctagtggccaaaagaaaaaccccttgctgccaatccccaaaagactggaaggaatggtcatgttactggtccctgcaataatttgagaacaaatgaagaaaaaacaggtatatcggggaagtttgattcaggagacaactcttgtttggttcccttctctgaagtcatcaatgtgcctacgcgattgccacacaactttgagatgaggaagatggaatcaactagaagtcctgcgaggctacacaataaaggagggttcctgtctgcaacagtccaaattaaggagagtacgttgttacccacaggcaagccttgttggcagtcagaaatgagccatccaacaactaatgaagtgagcacttcagcgcaagctactacttggatcgacgcgggggcgtgtgccgaggagcaagaacctactccttgggtggacatcggggtctcagactaccagcctttcctggatgtgatcgacgacatgtgcggacttgagtggaggctgcagagactgaaggagaacatgctctcatctagcatagacggccaaaccgccgccagtgagagtgacaaaagaaaccagaccgtggtgctagtgccaaccgccgagctcaaggaaaagctgccgcatgacggtttattcgggcattattgcccataggtcttatatacatagcggataaactgtacagagaaccaagaagaagaagaaaacaaaagggaaacagcaaacagacaggtgcccgcttacataccggtccatactgtcaggcactactctcctttcttgggcctcgacacgactaatactgtgctagtccagaacagatgagccatagccattacctgtgtgcctcccaggttcagttcatatgttgtatgtattaatgtatatcagaagagtcgtgcttagtagtagcaagaacctagtcctgatccagaccgtgaatctggatcatcttgtcctgtggttgtaccgtgcagaacagacagatgtcggctagtcgtttggttctgaagtaagaaactataagcatgcgtgattttggcccgttgcgtgacaaaaaaaaaagaggtggtgaggcgcaggtttgta

SEQ ID NO: 49528 - DNA, 2591 bp, Zea Mays
gaaccctttcttcctcctcatcccccaagccccaaccagctccaattccccccccccccccccccccccatacaatatcttttctctctcatcctccaaaggaccaagaagtaccatttctgctctctccattcgtctccaatcccaacacagcttctcaattcagttcagggaattctcccttttcttttgttttgctctagtgctcttggctgtttactccgcttcttatcctcttctctccacagaagaggagtgcatgtgcagcagctgtaaagacagtatttttttttcacctcatcttctcccaaggtgttgttggtgccccaggtggaggcaactgccaaagtgtttgggtttcttgaatgttaggcttttttggggaggaggaaagggcttgatcgattaggttgttcagccattcttgccccagtgttcttggattcatggtcgtggaattaatccaagggtagctggaggctggagctgctccatttcccttccgagaaaacgaaggcgaaggcgatcgtttgaacggttacagctgttgccgttgagccggtgcaatgtcgtcttcctgcatgccgacgggcctgcggctggacctggacatggtgaaggcggcggcgtcgccgggcgcgcactcgtcgccgctgcgcccggtgcactcgtcgccgtcgtcgacgctgtcggaggcgtccaacgcgtcgtcgtcggcgacgtccgtgtcgctgaagcgggcgcgcgcgccgcggaagcggccgaaccaggcgtacaacgaggccgccgcgctgctggcgtccatccacccctccgtcttccccgtcaagaagagccccaagacggcgccgccgcgcccgccgtcgtcgcggcagctctccgggctcgcggcggcgctcgacgcctcctcctccgacctcctcccgccgctccccgtcctcgccgactccgcattcctgctccgagacatacccgcgccgtcgccgctgccgcagccgcagagcccgtccgccgccaagaactgctcgtcgccggcccccgtgagcagcgcgttccgggacttccgcgacccggcgccgtcgccggcgagccccgacaccgtcgacgtcaacgagctcggcgagatcgacttcgacgacgacggcttcgacgccgagtccatcctcgacgtcgaggaggccgcggccgcggccgagggcctcgacggcatcatgggcagcctcaccgtcgagagcaacagcaccgccgccaccacgtccgatgactccatcctgtccagctccggcatccacccctacctcaggagcctcatggtggtcggcctcgccggcaggttcgagctcggcctcgggtcccggcacggcgctcggcccaacctcaaccgcgcactgaagcggcgggacgacgatggcgcctggtggatgtggccggcagtgccggtaaaggacctaacggttgcaccaccgacaccgccggcgtcaaacgccgcagtgtcacagccacagcccgccgccgctccggagaagaacaaaagcaagaagaagaaggtggtgaaggtggagaaggtcatgatgggggcgaagggaaaagaggagctgcttcccagcgcgaaatgcaaggaggaggaagctgatggcgacggcgacgctgaaagcgcgccggtgaaggcgccaaagaccgggctggggctgaagctggacgccgacgaggtgctcaaggcgtggtccgacagagggtccatgtttgccgagggaagcgcgccggagtcgccgacatcggtcgccgaagcgcgggccaagctctcagacatggacctgtttccggagaacgaagccggcgccggcgccggcggcgtcagggaggccagcgtgctgcggtacaaggagaagaggcgcacccggctcttctccaagaagatccggtaccaggggaggtttgttaggagcccgtctcttcttcggcaagccctggaggaagagagctagctagacagacacaggcagtggtcctcgctagccttttcttttcttttagttttttttttcaaagcaactttttgttcctctagttcctcgttagctaagactaagagatgtgagtgagaaattttcccagttttttttttgtttcatcggagttttgctctggagaggataggtgaggatggctttagcgtgggttgtcatggcatggtggtcacatagtttgtctcaggtttacaatgtgagaggtaaaggaaggaaataaagcggtgttagaagaacataccgtcatacagcaagcagctccagatgatgggttctgttgtgcttttactgctccagaatatcaatcgcgttgctctgtaacatccattgcgaagaagaaaacgacgagtacaaattagcacggattgttatgcgctagtaagtagcgcgtaagtatttttcttctttaatcagctgacagcatctgctgttcagcggtaaaagtatctgcagtgcggtcactgccaaaatacagcagcaaatcagaacgaaaagagaagaacactacagatctcatcgtaacttcagcgtcgcctggagaacttttctatcagaaattttatt

SEQ ID NO: 49529 - DNA, 1552 bp, Zea Mays
ttctagtctaacataacttgtgtgttatactcatgtgttagatggtattccaagctaactacaaagaaataaagactaaagagtgtctgttactctggtgaactttatggaagttagatgttgaattttctttttcgtccgaaatataaagcatacaaaactccatagcagctcaatcagtttattaatgtcataggaaattccttgtactgattttctgtcttgtatataacactaacagtgtgcagtgtcacataatccgaattcacacttgtttgacagaacgttacccttgcagtaataatgaaaatgggcggttcatttatggagttgcgagttctcctggtaaaagagcatcgatggaggacttctatgaggcaagaatagacgacgttgatggagagaaaattggaatgttcggtgtatatgatggtcatggaggagtccgagcagctgagtatgttaagcagcaccttttcagcaatttaatcaaacacccaaagttcatcactgataccaaggctgctatcgccgaaacttacaacctcacagattcagaatttctgaaagctgatagctgtcaaactcgagatgctggctcaactgcctcaacagctattattgtaggtgaccgtttgcttgttgcaaatgttggagattctagagccgttatttctaaaggaggacaagcgattgcggtttcaagggatcacaaacctgatcagacagatgagagacaaagaattgaggacgcagggggctttgttatgtgggctgggacatggcgagtgggtggtgttcttgctgtctctcgcgcatttggtgataaactcttgaagcagtatgttgtcgctgaccctgaaatcaaggaggaggtggtcgacagctcccttgaattcctcatccttgctagtgatggactctgggatgttgtcactaatgaggaagctgttgccatggtcaagcctattcaggacccccaggaagcagcaaacaagcttctcgaagaagcgtcccgaaggggaagctctgataacatcaccgttgtcatcgtccgcttcctatatggaactaccggtgataaatcaggcgcagacaaagagaccaccaatgaccaaaactcctaattacctcctgaaactgactcccccgaccgtcgtcgtgatgctgcccgctcatgctcctagacgggaatgactgccgcagaatgacgaatagggctggtgtgtgttacagtatggtcctttacccctcctttccattaagctctgtgatgtagctgtccgtgctgttgattcatgagatcatgctagagatttttcctggcagtgcgtgtaaaactgtcgaactatttgaacgaaagttgtacactgcagtatgtaacaatctcctagatccgccttttgtggcgtcctgctgtcatgcacctgaatgctaccaagccgggacggaggtgagctatcggtttactcggtgtacagaaacgggaaggtcgaatttttacagagcaagtgcgtggattatcatattaatgtgcaaataaactgttaca

SEQ ID NO: 49530 - DNA, 1739 bp, Zea Mays
atactcatgtgttagatggtattccaagctaactacaaagaaataaagactaaagagtgtctgttactctggtgaactttatggaagttagatgttgaattttctttttcgtccgaaatataaagcatacaaaactccatagcagctcaatcagtttattaatgtcataggaaattccttgtactgattttctgtcttgtatataacactaacagtgtgcagtgtcacataatccgaattcacacttgtttgacagaacgttacccttgcagtaataatgaaaatgggcggttcatttatggagttgcgagttctcctggtaaaagagcatcgatggaggacttctatgaggcaagaatagacgacgttgatggagagaaaattggaatgttcggtgtatatgatggtcatggaggagtccgagcagctgagtatgttaagcagcaccttttcagcaatttaatcaaacacccaaagttcatcactgataccaaggctgctatcgccgaaacttacaacctcacagattcagaatttctgaaagctgatagctgtcaaactcgagatgctggctcaactgcctcaacagctattattgtaggtgaccgtttgcttgttgcaaatgttggagattctagagccgttatttctaaaggaggacaaggtaagtttctcgttggtaacatgacatatctcaatgtcttttcctatacttccacatgtatcggaaactttcaaattattatatgctgtgtattttcctggacgagtatttccttgtgacgaatggataaactgaatatcaggattccaagctaaccacgttccacttgtattcgatattttttgttatgttttccccatctcggagctgcagcgattgcggtttcaagggatcacaaacctgatcagacagatgagagacaaagaattgaggacgcagggggctttgttatgtgggctgggacatggcgagtgggtggtgttcttgctgtctctcgcgcatttggtgataaactcttgaagcagtatgttgtcgctgaccctgaaatcaaggaggaggtggtcgacagctcccttgaattcctcatccttgctagtgatggactctgggatgttgtcactaatgaggaagctgttgccatggtcaagcctattcaggacccccaggaagcagcaaacaagcttctcgaagaagcgtcccgaaggggaagctctgataacatcaccgttgtcatcgtccgcttcctatatggaactaccggtgataaatcaggcgcagacaaagagaccaccaatgaccaaaactcctaattacctcctgaaactgactcccccgaccgtcgtcgtgatgctgcccgctcatgctcctagacgggaatgactgccgcagaatgacgaatagggctggtgtgtgttacagtatggtcctttacccctcctttccattaagctctgtgatgtagctgtccgtgctgttgattcatgagatcatgctagagatttttcctggcagtgcgtgtaaaactgtcgaactatttgaacgaaagttgtacactgcagtatgtaacaatctcctagatccgccttttgtggcgtcctgctgtcatgcacctgaatgctaccaagccgggacggaggtgagctatcggtttactcggtgtacagaaacgggaaggtcgaatttttacagagcaagtgcgtggattatcatattaatgtgcaaataaactgttaca

SEQ ID NO: 49531 - DNA, 1337 bp, Zea Mays
cagaacgttacccttgcagtaataatgaaaatgggcggttcatttatggagttgcgagttctcctggtaaaagagcatcgatggaggacttctatgaggcaagaatagacgacgttgatggagagaaaattggaatgttcggtgtatatgatggtcatggaggagtccgagcagctgagtatgttaagcagcaccttttcagcaatttaatcaaacacccaaagttcatcactgataccaaggctgctatcgccgaaacttacaacctcacagattcagaatttctgaaagctgatagctgtcaaactcgagatgctggctcaactgcctcaacagctattattgtaggtgaccgtttgcttgttgcaaatgttggagattctagagccgttatttctaaaggaggacaagcgattgcggtttcaagggatcacaaacctgatcagacagatgagagacaaagaattgaggacgcagggggctttgttatgtgggctgggacatggcgagtgggtggtgttcttgctgtctctcgcgcatttggtgataaactcttgaagcagaggaggtggtcgacagctcccttgaattcctcatccttgctagtgatggactctgggatgttgtcactaatgaggaagctgttgccatggtcaagcctattcaggacccccaggaagcagcaaacaagcttctcgaagaagcgtcccgaaggggaagctctgataacatcaccgttgtcatcgtccgcttcctatatggaactaccggtgataaatcaggcgcagacaaagagaccaccaatgaccaaaactcctaattacctcctgtagggatccctcatgcgtgtgttttcttctggctgttgtatctgatgctcaaagtagatgctccgtgtgtcttccgctgctgttccgcaaggaaactgactcccccgaccgtcgtcgtgatgctgcccgctcatgctcctagacgggaatgactgccgcagaatgacgaatagggctggtgtgtgttacagtatggtcctttacccctcctttccattaagctctgtgatgtagctgtccgtgctgttgattcatgagatcatgctagagatttttcctggcagtgcgtgtaaaactgtcgaactatttgaacgaaagttgtacactgcagtatgtaacaatctcctagatccgccttttgtggcgtcctgctgtcatgcacctgaatgctaccaagccgggacggaggtgagctatcggtttactcggtgtacagaaacgggaaggtcgaatttttacagagcaagtgcgtggattatcatattaatgtgcaaataaactgttaca

SEQ ID NO: 49532 - DNA, 482 bp, Zea Mays
gtcattcgtgggcattggtaatatcaccacacgctctcggagtcccgctgtgatcccgcccgctggctcgactttgtccctgggtgcaggaatgagagggtagagctgataagcataatacatgtacggatttatgctcggatgtggagacaagagaaagtggtttggggagcattgagctatcttcatgagattcagcctattcaggtcatgtactcatgtggcacagcctagaggaccaactgaccaagaatactaaagcacataggatgtttagttttctgattttaatttttgattttctatccaaatatagactctttagtatgacacccttgcattggtttctttgataacatactagacatggatgactactgaatatgttattatagtgcggagaatctaactgtatgatcattatgaaacctatgagtgatcatcttacaaagaacaagatatttaagcatcatgtttccatc

SEQ ID NO: 49533 - DNA, 3980 bp, Zea Mays
ctcgacccgttaaccctgcgtgagcgtgggccgcgtggtccgtgataaatggcctcggatccaaccagggaaggaaggaatccaagccaccccagtccgctgcttccattccatctcccttctctcgccttctgcggcactgcagtgctctgctgcctcggcgtctccacctcctcccggcgacggcagggcatccgatacgacgccgcgcttccttccgaatcccaagccgcaccccgcaccctcccggtcgccattcccgatgctggtgttctcgagcgacgacgactgctgcggctcctcgtactaggggggcaggatcgatcggcaggtgacgtttcgttcgttctgctgttcggttcgaacgggagagtttgcttgggggttggtgcatcggtttcagaacgaccagttcattagttttggggattggggctatttcttgttttttttaaggcaggagagttgcttttcattctacgtattcgagagatgaaaaaaaagtgttttttgggctagttttgttccaatgatttggtagcaattaccatggcagttgcacgaaagggattcatgtactgggtctgaacggtttcatggcgatgcagtttccatcaccaaattcaccgtgagatgtctggtactcgttgtgactaactcagtaggcagtctgtcagttaagccaggtaaactagttactagtacttgacattgccactgtattttttgtaattactagtaccatttgatgagaagtggtactgagttttatgtgggtagacgaacgatgtcatcgcactcccttctcagtgtcaacgatcatgggtggcatgacctgtgggctgtggagggcggtcccggtccccttcgtttggcttatctggaaaatgctggttgcgcgtcaaggccatcttgaaccttggaaaaacgctgctgtgtctatctttcctgccttcctggttccgtccgtgctgtgctgacatgcgtgtcgaattctcgctcatttggttaccggtagtggggtcatgtcggatattgatgtggaagggggagttggtagtggcaccccctccgcctcggacctggcttcttctgataccggctctggagctgggtaatagagcgcagactttgggtctggaaagcgattgtggttatcgttacgacaagtatgctaggtcaaaactgtttttgtatgtagttggttcacagatgccaagggccgatttatttgtttgtttgttgctcatgttgatgttctgagcataccatttttcagatgtttatatttcatatctgataaagtttataagtttattgtcgtcattaagatgggttaagaaggatgcctgctgtgttttaggatgaggctccatttggaagtcaatagtgcaacactgctcattccaatgatatacccccactacaaacagacacttggtcataattggctttcgcacattcatattcaatgtctcaaacttgttattacgattctgcggatggtctgacaaaaccctgggcatagtgtgattattgacactaatattagttccaaagcatttcattgagtaaaaagaaataatcattctcaatatgtccagactcgcagaactataggatatcacagaacagttcttgaggtacttattgcagcctaatagtacatggagcgatattcagatatgagaccaaaggcagaagtttcatatctcggaaggggttccagattctcttctagaaatcaaagttcagaagagaggactaaccatagcagcgataaaccgggaagcagcacaagattcaatcctacgaaagcgagaattggcggtaatcaagggaggccaagatatgtatgcgattcatttaaatctccaagctcaaaggtgtcgcctgcaggctcttccaaatttccacttagcaagtttgaggagaggcgaagacagccttttgtgccagggtttgacattgctgaaagtagtagaagaaaggctgatgccaagcagctacagggtagtaagaaaattgctgcagagaacgacagttcagacaatctgcgaggtgaatcagaaggttttactactgaacaagtagtaaaaccagaaggctctcatgttgtcggtcattcaggtgtttctgcgtatacagtcgggtccctggtccaaactgcttcactaggttctaggacacacagacagaaacacaaagaagtgaatttgggtactccaggagcatcgtcttcaactctgactaacaggtctactatacctggaaattctaccatgggtgtgaggccagcttatggtcatgttaatggagggcagatacatggtcttaaaaaccttggttgttcttcggtacctgatgctcagccatcaggttgcccatctgagtctgttattagtaggaggaggtttgagttcatgagaaagagggcctttgaccaggaaagctcttccagatcagtgaacttaagcttaggtcattcaactcctacagatattcgcagaatcagaatgaatgaacaatcactttgtcaacaaataccacgaagcagcagcagaagccatcaggaatcggcaggttcagttaggacaagacgaccttctcctcatgccactaggatgagtgttcctgatggaagagcagatggcgtgctttctctgcacgagtcatccacaaaggatgtacagccagctcaggaacatctttcattggaagaagtctccactgagagttcaataaggccattctttgtggaatttgataataacattttctcgtctagtcatcttcgtcgctcgagtactcgagctgaaaggggaagaccaagctccctttttgaagaaagtcctcgacaaatgttccatagtctcatgggggagagggacagacatagacacataaccatggaaggaattacagaggttttggctgcattggagaggattgaacagcaagcagagctgacctatgatcaattgctaatgctggaggctaatctattttttggcgcctttgcctcctatgatcggcatagagacatgcggatggatattgatgatatgtcctatgaggaattattggccctggaggagagaataggctctgtgagcacagctctttcagaggagcagttcacaaaatgcctcaaaagaagcatatatagtcaggtcgctctagaagtgaacaaatcaaccgttgatgacatgaaatgcatcatctgtcaggaagagtacgcggagggcgaagaggttgggaggctgccatgcgagcaccggtaccatgtgtgctgcataggccagtggcttgggcagaagaactggtgtccagtatgcaaagcgtctgccgtgccttccaagggctgaagcattggggatgctggaaaccccgttccggattacaaaccatccttgcttttgtctacgtacattgttcttttccctatatgcattagatatagatcatgtctagatgtatgacgctagaacagcttgcgatttgggaggaagctaagagagtaatagttagctggttaataatagttcatagctaatatttgctagataactattacttggctacctattagctgtgcctttcacattgtggtacaggacaaatgcttgtcagatcgtgaacaaccttataacttgatgaatggcctaagtcaaagaggaatatgttgtgccaatctcaaccctatgctctcttcgtgtagtctgggtgtgtttggttgcgggacagtcaagaaagggacgttccctgacgttctctctcgtctttctgattttgagggataactggggataacactgtaatagttctgtttcaacccttgatcttgaactaaacaaccttatttgagggatcatctcatcttatctcgtcctgtcattacaaccaatcttgttagaaaataaaaaatgcggtagagatggtatcatagtagttgtacataagacagttcaatctattgt

SEQ ID NO: 49534 - DNA, 3010 bp, Zea Mays
gccgcgtggtccgtgataaatggcctcggatccaaccagggaaggaaggaatccaagccaccccagtccgctgcttccattccatctcccttctctcgccttctgcggcactgcagtgctctgctgcctcggcgtctccacctcctcccggcgacggcagggcatccgatacgacgccgcgcttccttccgaatcccaagccgcaccccgcaccctcccggtcgccattcccgatgctggtgttctcgagcgacgacgactgctgcggctcctcgtactaggggggcaggatcgatcggcaggatgaggctccatttggaagtcaatagtgcaacactgctcattccaatgatatacccccactacaaacagacacttggtcataattggctttcgcacattcatattcaatgtctcaaacttgttattacgattctgcggatggtctgacaaaaccctgggcatagtgtgattattgacactaatattagttccaaagcatttcattgagtaaaaagaaataatcattctcaatatgtccaggtgcatatttctgaattttcttgctcactagttgtctgtatccatcctctaggttttattgtttactgacctttaccagattgtcccacagactcgcagaactataggatatcacagaacagttcttgaggtacttattgcagcctaatagtacatggagcgatattcagatatgagaccaaaggcagaagtttcatatctcggaaggggttccagattctcttctagaaatcaaagttcagaagagaggactaaccatagcagcgataaaccgggaagcagcacaagattcaatcctacgaaagcgagaattggcggtaatcaagggaggccaagatatgtatgcgattcatttaaatctccaagctcaaaggtgtcgcctgcaggctcttccaaatttccacttagcaagtttgaggagaggcgaagacagccttttgtgccagggtttgacattgctgaaagtagtagaagaaaggctgatgccaagcagctacagggtagtaagaaaattgctgcagagaacgacagttcagacaatctgcgaggtgaatcagaaggttttactactgaacaagtagtaaaaccagaaggctctcatgttgtcggtcattcaggtgtttctgcgtatacagtcgggtccctggtccaaactgcttcactaggttctaggacacacagacagaaacacaaagaagtgaatttgggtactccaggagcatcgtcttcaactctgactaacaggtctactatacctggaaattctaccatgggtgtgaggccagcttatggtcatgttaatggagggcagatacatggtcttaaaaaccttggttgttcttcggtacctgatgctcagccatcaggttgcccatctgagtctgttattagtaggaggaggtttgagttcatgagaaagagggcctttgaccaggaaagctcttccagatcagtgaacttaagcttaggtcattcaactcctacagatattcgcagaatcagaatgaatgaacaatcactttgtcaacaaataccacgaagcagcagcagaagccatcaggaatcggcaggttcagttaggacaagacgaccttctcctcatgccactaggatgagtgttcctgatggaagagcagatggcgtgctttctctgcacgagtcatccacaaaggatgtacagccagctcaggaacatctttcattggaagaagtctccactgagagttcaataaggccattctttgtggaatttgataataacattttctcgtctagtcatcttcgtcgctcgagtactcgagctgaaaggggaagaccaagctccctttttgaagaaagtcctcgacaaatgttccatagtctcatgggggagagggacagacatagacacataaccatggaaggaattacagaggttttggctgcattggagaggattgaacagcaagcagagctgacctatgatcaattgctaatgctggaggctaatctattttttggcgcctttgcctcctatgatcggcatagagacatgcggatggatattgatgatatgtcctatgaggaattattggccctggaggagagaataggctctgtgagcacagctctttcagaggagcagttcacaaaatgcctcaaaagaagcatatatagtcaggtcgctctagaagtgaacaaatcaaccgttgatgacatgaaatgcatcatctgtcaggaagagtacgcggagggcgaagaggttgggaggctgccatgcgagcaccggtaccatgtgtgctgcataggccagtggcttgggcagaagaactggtgtccagtatgcaaagcgtctgccgtgccttccaagggctgaagcattggggatgctggaaaccccgttccggattacaaaccatccttgcttttgtctacgtacattgttcttttccctatatgcattagatatagatcatgtctagatgtatgacgctagaacagcttgcgatttgggaggaagctaagagagtaatagttagctggttaataatagttcatagctaatatttgctagataactattacttggctacctattagctgtgcctttcacattgtggtacaggacaaatgcttgtcagatcgtgaacaaccttataacttgatgaatggcctaagtcaaagaggaatatgttgtgccaatctcaaccctatgctctcttcgtgtagtctgggtgtgtttggttgcgggacagtcaagaaagggacgttccctgacgttctctctcgtctttctgattttgagggataactggggataacactgtaatagttctgtttcaacccttgatcttgaactaaacaaccttatttgagggatcatctcatcttatctcgtcctgtcattacaaccaatcttgttagaaaataaaaaatgcggtagagatggtatcatagtagttgtacataagacagttcaatctattgt

SEQ ID NO: 49535 - DNA, 3746 bp, Zea Mays
atggcctcggatccaaccagggaaggaaggaatccaagccaccccagtccgctgcttccattccatctcccttctctcgccttctgcggcactgcagtgctctgctgcctcggcgtctccacctcctcccggcgacggcagggcatccgatacgacgccgcgcttccttccgaatcccaagccgcaccccgcaccctcccggtcgccattcccgatgctggtgttctcgagcgacgacgactgctgcggctcctcgtactaggggggcaggatcgatcggcagtttccatcaccaaattcaccgtgagatgtctggtactcgttgtgactaactcagtaggcagtctgtcagttaagccaggtaaactagttactagtacttgacattgccactgtattttttgtaattactagtaccatttgatgagaagtggtactgagttttatgtgggtagacgaacgatgtcatcgcactcccttctcagtgtcaacgatcatgggtggcatgacctgtgggctgtggagggcggtcccggtccccttcgtttggcttatctggaaaatgctggttgcgcgtcaaggccatcttgaaccttggaaaaacgctgctgtgtctatctttcctgccttcctggttccgtccgtgctgtgctgacatgcgtgtcgaattctcgctcatttggttaccggtagtggggtcatgtcggatattgatgtggaagggggagttggtagtggcaccccctccgcctcggacctggcttcttctgataccggctctggagctgggtaatagagcgcagactttgggtctggaaagcgattgtggttatcgttacgacaagtatgctaggtcaaaactgtttttgtatgtagttggttcacagatgccaagggccgatttatttgtttgtttgttgctcatgttgatgttctgagcataccatttttcagatgtttatatttcatatctgataaagtttataagtttattgtcgtcattaagatgggttaagaaggatgcctgctgtgttttaggatgaggctccatttggaagtcaatagtgcaacactgctcattccaatgatatacccccactacaaacagacacttggtcataattggctttcgcacattcatattcaatgtctcaaacttgttattacgattctgcggatggtctgacaaaaccctgggcatagtgtgattattgacactaatattagttccaaagcatttcattgagtaaaaagaaataatcattctcaatatgtccaggtgcatatttctgaattttcttgctcactagttgtctgtatccatcctctaggttttattgtttactgacctttaccagattgtcccacagactcgcagaactataggatatcacagaacagttcttgaggtacttattgcagcctaatagtacatggagcgatattcagatatgagaccaaaggcagaagtttcatatctcggaaggggttccagattctcttctagaaatcaaagttcagaagagaggactaaccatagcagcgataaaccgggaagcagcacaagattcaatcctacgaaagcgagaattggcggtaatcaagggaggccaagatatgtatgcgattcatttaaatctccaagctcaaaggtgtcgcctgcaggctcttccaaatttccacttagcaagtttgaggagaggcgaagacagccttttgtgccagggtttgacattgctgaaagtagtagaagaaaggctgatgccaagcagctacagggtagtaagaaaattgctgcagagaacgacagttcagacaatctgcgaggtgaatcagaaggttttactactgaacaagtagtaaaaccagaaggctctcatgttgtcggtcattcaggtgtttctgcgtatacagtcgggtccctggtccaaactgcttcactaggttctaggacacacagacagaaacacaaagaagtgaatttgggtactccaggagcatcgtcttcaactctgactaacaggtctactatacctggaaattctaccatgggtgtgaggccagcttatggtcatgttaatggagggcagatacatggtcttaaaaaccttggttgttcttcggtacctgatgctcagccatcaggttgcccatctgagtctgttattagtaggaggaggtttgagttcatgagaaagagggcctttgaccaggaaagctcttccagatcagtgaacttaagcttaggtcattcaactcctacagatattcgcagaatcagaatgaatgaacaatcactttgtcaacaaataccacgaagcagcagcagaagccatcaggaatcggcaggttcagttaggacaagacgaccttctcctcatgccactaggatgagtgttcctgatggaagagcagatggcgtgctttctctgcacgagtcatccacaaaggatgtacagccagctcaggaacatctttcattggaagaagtctccactgagagttcaataaggccattctttgtggaatttgataataacattttctcgtctagtcatcttcgtcgctcgagtactcgagctgaaaggggaagaccaagctccctttttgaagaaagtcctcgacaaatgttccatagtctcatgggggagagggacagacatagacacataaccatggaaggaattacagaggttttggctgcattggagaggattgaacagcaagcagagctgacctatgatcaattgctaatgctggaggctaatctattttttggcgcctttgcctcctatgatcggcatagagacatgcggatggatattgatgatatgtcctatgaggaattattggccctggaggagagaataggctctgtgagcacagctctttcagaggagcagttcacaaaatgcctcaaaagaagcatatatagtcaggtcgctctagaagtgaacaaatcaaccgttgatgacatgaaatgcatcatctgtcaggaagagtacgcggagggcgaagaggttgggaggctgccatgcgagcaccggtaccatgtgtgctgcataggccagtggcttgggcagaagaactggtgtccagtatgcaaagcgtctgccgtgccttccaagggctgaagcattggggatgctggaaaccccgttccggattacaaaccatccttgcttttgtctacgtacattgttcttttccctatatgcattagatatagatcatgtctagatgtatgacgctagaacagcttgcgatttgggaggaagctaagagagtaatagttagctggttaataatagttcatagctaatatttgctagataactattacttggctacctattagctgtgcctttcacattgtggtacaggacaaatgcttgtcagatcgtgaacaaccttataacttgatgaatggcctaagtcaaagaggaatatgttgtgccaatctcaaccctatgctctcttcgtgtagtctgggtgtgtttggttgcgggacagtcaagaaagggacgttccctgacgttctctctcgtctttctgattttgagggataactggggataacactgtaatagttctgtttcaacccttgatcttgaactaaacaaccttatttgagggatcatctcatcttatctcgtcctgtcattacaaccaatcttgttagaaaataaaaaatgcggtagagatggtatcatagtagttgtacataagacagttcaatctattgt
